United States Patent Application Publication US 2024/0327476 A1 - sequence listing, part 34

SEQ ID NO: 46386 - protein, 102 aa, Homo sapiens
MRLSWFRVLTVLSICLSAVATATGAEGKRKLQIGVKKRVDHCPIKSRKGDVLHMHYTGKLEDGTEFDSSLPQNQPFVFSLGTGQVIKGWDQGLLGMCEGEKR

SEQ ID NO: 46387 - protein, 224 aa, Homo sapiens
MAAAVPQRAWTVEQLRSEQLPKKDIIKFLQEHGSDSFLAEHKLLGNIKNVAKTANKDHLVTAYNHLFETKRFKGTESISKVSEQVKNVKLNEDKPKETKSEETLDEGPPKYTKSVLKKGDKTNFPKKGDVVHCWYTGTLQDGTVFDTNIQTSAKKKKNAKPLSFKVGVGKVIRGWDEALLTMSKGEKARLEIEPEWAYGKKGQPDAKIPPNAKLTFEVELVDID

SEQ ID NO: 46388 - protein, 224 aa, Homo sapiens; identical to SEQ ID NO: 46387

SEQ ID NO: 46389 - protein, 457 aa, Homo sapiens
MTTDEGAKNNEESPTATVAEQGEDITSKKDRGVLKIVKRVGNGEETPMIGDKVYVHYKGKLSNGKKFDSSHDRNEPFVFSLGKGQVIKAWDIGVATMKKGEICHLLCKPEYAYGSAGSLPKIPSNATLFFEIELLDFKGEDLFEDGGIIRRTKRKGEGYSNPNEGATVEIHLEGRCGGRMFDCRDVAFTVGEGEDHDIPIGIDKALEKMQREEQCILYLGPRYGFGEAGKPKFGIEPNAELIYEVTLKSFEKAKESWEMDTKEKLEQAAIVKEKGTVYFKGGKYMQAVIQYGKIVSWLEMEYGLSEKESKASESFLLAAFLNLAMCYLKLREYTKAVECCDKALGLDSANEKGLYRRGEAQLLMNEFESAKGDFEKVLEVNPQNKAARLQISMCQKKAKEHNERDRRIYANMFKKFAEQDAKEEANKAMGKKTSEGVTNEKGTDSQAMEEEKPEGHV

SEQ ID NO: 46390 - protein, 457 aa, Homo sapiens; identical to SEQ ID NO: 46389

SEQ ID NO: 46391 - protein, 266 aa, Homo sapiens
LLMKVPRTMKKAPQPLLLSRERILPPKDRGVLKIVKRVGNGEETPMIGDKVYVHYKGKLSNGKKFDSSHDRNEPFVFSLGKGQVIKAWDIGVATMKKGEICHLLCKPEYAYGSAGSLPKIPSNATLFFEIELLDFKGEDLFEDGGIIRRTKRKGEGYSNPNEGATVEIHLEGRCGGRMFDCRDVAFTVGEGEDHDIPIGIDKALEKMQREEQCILYLGPRPKNPGRWIPKKNWSRLPLSKRREPYTSRCVSPYAILSISKNLFKCW

SEQ ID NO: 46392 - protein, 457 aa, Homo sapiens; identical to SEQ ID NO: 46389

SEQ ID NO: 46393 - protein, 457 aa, Homo sapiens; identical to SEQ ID NO: 46389

SEQ ID NO: 46394 - protein, 278 aa, Homo sapiens
MFDCRDVAFTVGEGEDHDIPIGIDKALEKMQREEQCILYLGPRYGFGEAGKPKFGIEPNAELIYEVTLKSFEKAKESWEMDTKEKLEQAAIVKEKGTVYFKGGKYMQAVIQYGKIVSWLEMEYGLSEKESKASESFLLAAFLNLAMCYLKLREYTKAVECCDKALGLDSANEKGLYRRGEAQLLMNEFESAKGDFEKVLEVNPQNKAARLQISMCQKKAKEHNERDRRIYANMFKKFAEQDAKEEANKAMGKKTSEGVTNEKGTDSQAMEEEKPEGHV

SEQ ID NO: 46395 - protein, 268 aa, Homo sapiens
MTTDEGAKNNEESPTATVAEQGEDITSKKDRGVLKIVKRVGNGEETPMIGDKVYVHYKGKLSNGKKFDSSHDRNEPFVFSLGKGQVIKAWDIGVATMKKGEICHLLCKPEYAYGSAGSLPKIPSNATLFFEIELLDFKGEDLFEDGGIIRRTKRKGEGYSNPNEGATVEIHLEGRCGGRMFDCRDVAFTVGEGEDHDIPIGIDKALEKMQREEQCILYLGPRPKNPGRWIPKKNWSRLPLSKRREPYTSRCVSPYAILSISKNLFKCW

SEQ ID NO: 46396 - protein, 420 aa, Homo sapiens [sequence omitted]

SEQ ID NO: 46397 - protein, 327 aa, Homo sapiens
MGGSALNQGVLEGDDAPGQSLYERLSQRMLDISGDRGVLKDVIREGAGDLVAPDASVLVKYSGYLEHMDRPFDSNYFRKTPRLMKLGEDITLWGMELGLLSMRRGELARFLFKPNYAYGTLGCPPLIPPNTTVLFEIELLDFLDCAESDKFCALSAEQQDQFPLQKVLKVAATEREFGNYLFRQNRFYDAKVRYKRALLLLRRRSAPPEEQHLVEAAKLPVLLNLSFTYLKLDRPTIALCYGEQALIIDQKNAKALFRCGQACLLLTEYQKARDFLVRAQKEQPFNHDINNELKKLASCYRDYVDKEKEMWHRMFAPCGDGSTAGES

SEQ ID NO: 46398 - protein, 322 aa, Homo sapiens
MSASSWPQNGMPPSSLYERLSQRMLDISGDRGVLKDVIREGAGDLVAPDASVLVKYSGYLEHMDRPFDSNYFRKTPRLMKLGEDITLWGMELGLLSMRRGELARFLFKPNYAYGTLGCPPLIPPNTTVLFEIELLDFLDCAESDKFCALSAEQQDQFPLQKVLKVAATEREFGNYLFRQNRFYDAKVRYKRALLLLRRRSAPPEEQHLVEAAKLPVLLNLSFTYLKLDRPTIALCYGEQALIIDQKNAKALFRCGQACLLLTEYQKARDFLVRAQKEQPFNHDINNELKKLASCYRDYVDKEKEMWHRMFAPCGDGSTAGES

SEQ ID NO: 46399 - protein, 413 aa, Homo sapiens
MASCAEPSEPSAPLPAGVPPLEDFEVLDGVEDAEGEEEEEEEEEEEDDLSELPPLEDMGQPPAEEAEQPGALAREFLAAMEPEPAPAPAPEEWLDILGNGLLRKKTLVPGPPGSSRPVKGQVVTVHLQTSLENGTRVQEEPELVFTLGDCDVIQALDLSVPLMDVGETAMVTADSKYCYGPQGSRSPYIPPHAALCLEVTLKTAVDGPDLEMLTGQERVALANRKRECGNAHYQRADFVLAANSYDLAIKAITSSAKVDMTFEEEAQLLQLKVKCLNNLAASQLKLDHYRAALRSCSLVLEHQPDNIKALFRKGKVLAQQGEYSEAIPILRAALKLEPSNKTIHAELSKLVKKHAAQRSTETALYRKMLGNPSRLPAKCPGKGAWSIPWKWLFGATAVALGGVALSVVIAARN

SEQ ID NO: 46400 - protein, 441 aa, Homo sapiens
MGVGAGRVSQSGAPSPGGAGRANSCPPSSMASCAEPSEPSAPLPAGVPPLEDFEVLDGVEDAEGEEEEEEEEEEEDDLSELPPLEDMGQPPAEEAEQPGALAREFLAAMEPEPAPAPAPEEWLDILGNGLLRKKTLVPGPPGSSRPVKGQVVTVHLQTSLENGTRVQEEPELVFTLGDCDVIQALDLSVPLMDVGETAMVTADSKYCYGPQGRSPYIPPHAALCLEVTLKTAVDGPDLEMLTGQERVALANRKRECGNAHYQRADFVLAANSYDLAIKAITSSAKVDMTFEEEAQLLQLKVKCLNNLAASQLKLDHYRAALRSCSLVLEHQPDNIKALFRKGKVLAQQGEYSEAIPILRAALKLEPSNKTIHAELSKLVKKHAAQRSTETALYRKMLGNPSRLPAKCPGKGAWSIPWKWLFGATAVALGGVALSVVIAARN

SEQ ID NO: 46401 - protein, 253 aa, Homo sapiens
MASCAEPSEPSAPLPAGVPPLEDFEVLDGVEDAEGEEEEEEEEEEEDDLSELPPLEDMGQPPAEEAEQPGALAREFLAAMEPEPAPAPAPEEWLDILVDMTFEEEAQLLQLKVKCLNNLAASQLKLDHYRAALRSCSLVLEHQPDNIKALFRKGKVLAQQGEYSEAIPILRAALKLEPSNKTIHAELSKLVKKHAAQRSTETALYRKMLGNPSRLPAKCPGKGAWSIPWKWLFGATAVALGGVALSVVIAARN

SEQ ID NO: 46402 - protein, 532 aa, Homo sapiens
MAKRVAIVGAGVSGLASIKCCLEEGLEPTCFERSDDLGGLWRFTEHVEEGRASLYKSVVSNSCKEMSCYSDFPFPEDYPNYVPNSQFLEYLKMYANHFDLLKHIQFKTKVCSVTKCSDSAVSGQWEVVTMHEEKQESAIFDAVMVCTGFLTNPYLPLDSFPGINAFKGQYFHSRQYKHPDIFKDKRVLVIGMGNSGTDIAVEASHLAEKVFLSTTGGGWVISRIFDSGYPWDMVFMTRFQNMLRNSLPTPIVTWLMERKINNWLNHANYGLIPEDRTQLKEFVLNDELPGRIITGKVFIRPSIKEVKENSVIFNNTSKEEPIDIIVFATGYTFAFPFLDESVVKVEDGQASLYKYIFPAHLQKPTLAIIGLIKPLGSMIPTGETQARWAVRVLKGVNKLPPPSVMIEEINARKENKPSWFGLCYCKALQSDYITYIDELLTYINAKPNLFSMLLTDPHLALTVFFGPCSPYQFRLTGPGKWEGARNAIMTQWDRTFKVIKARVVQESPSPFESFLKVFSFLALLVAIFLIFL

SEQ ID NO: 46403 - protein, 532 aa, Homo sapiens; identical to SEQ ID NO: 46402

SEQ ID NO: 46404 - protein, 469 aa, Homo sapiens
MAKRVAIVGAGVSGLASIKCCLEEGLEPTCFERSDDLGGLWRFTTKVCSVTKCSDSAVSGQWEVVTMHEEKQESAIFDAVMVCTGFLTNPYLPLDSFPGINAFKGQYFHSRQYKHPDIFKDKRVLVIGMGNSGTDIAVEASHLAEKVFLSTTGGGWVISRIFDSGYPWDMVFMTRFQNMLRNSLPTPIVTWLMERKINNWLNHANYGLIPEDRTQLKEFVLNDELPGRIITGKVFIRPSIKEVKENSVIFNNTSKEEPIDIIVFATGYTFAFPFLDESVVKVEDGQASLYKYIFPAHLQKPTLAIIGLIKPLGSMIPTGETQARWAVRVLKGVNKLPPPSVMIEEINARKENKPSWFGLCYCKALQSDYITYIDELLTYINAKPNLFSMLLTDPHLALTVFFGPCSPYQFRLTGPGKWEGARNAIMTQWDRTFKVIKARVVQESPSPFESFLKVFSFLALLVAIFLIFL

SEQ ID NO: 46405 - protein, 208 aa, Homo sapiens
MAKRVAIVGAGVSGLASIKCCLEEGLEPTCFERSDDLGGLWRFTEHVEEGRASLYKSVVSNSCKEMSCYSDFPFPEDYPNYVPNSQFLEYLKMYANHFDLLKHIQFKTKVCSVTKCSDSAVSGQWEVVTMHEEKQESAIFDAVMVCTGFLTNPYLPLDSFPGINAFKGQYFHSRQYKHPDIFKDKRVLVIGMGNSGTDIAVEASHLAE

SEQ ID NO: 46406 - protein, 471 aa, Homo sapiens
MAKKVAVIGAGVSGLISLKCCVDEGLEPTCFERTEDIGGVWRFKENVEDGRASIYQSVVTNTSKEMSCFSDFPMPEDFPNFLHNSKLLEYFRIFAKKFDLLKYIQFQTTVLSVRKCPDFSSSGQWKVVTQSNGKEQSAVFDAVMVCSGHHILPHIPLKSFPGMERFKGQYFHSRQYKHPDGFEGKRILVIGMGNSGSDIAVELSKNAAQVFISTRHGTWVMSRISEDGYPWDSVFHTRFRSMLRNVLPRTAVKWMIEQQMNRWFNHENYGLEPQNKYIMKEPVLNDDVPSRLLCGAIKVKSTVKELTETSAIFEDGTVEENIDVIIFATGYSFSFPFLEDSLVKVENNMVSLYKYIFPAHLDKSTLACIGLIQPLGSIFPTAELQARWVTRVFKGLCSLPSERTMMMDIIKRNEKRIDLFGESQSQTLQTNYVDYLDELALEIGAKPDFCSLLFKDPKLAVRLYFGPCNSY

SEQ ID NO: 46407 - protein, 471 aa, Homo sapiens; identical to SEQ ID NO: 46406

SEQ ID NO: 46408 - protein, 532 aa, Homo sapiens
MGKKVAIIGAGVSGLASIRSCLEEGLEPTCFEKSNDIGGLWKFSDHAEEGRASIYKSVFSNSSKEMMCFPDFPFPDDFPNFMHNSKIQEYIIAFAKEKNLLKYIQFKTFVSSVNKHPDFATTGQWDVTTERDGKKESAVFDAVMVCSGHHVYPNLPKESFPGLNHFKGKCFHSRDYKEPGVFNGKRVLVVGLGNSGCDIATELSRTAEQVMISSRSGSWVMSRVWDNGYPWDMLLVTRFGTFLKNNLPTAISDWLYVKQMNARFKHENYGLMPLNGVLRKEPVFNDELPASILCGIVSVKPNVKEFTETSAIFEDGTIFEGIDCVIFATGYSFAYPFLDESIIKSRNNEIILFKGVFPPLLEKSTIAVIGFVQSLGAAIPTVDLQSRWAAQVIKGTCTLPSMEDMMNDINEKMEKKRKWFGKSETIQTDYIVYMDELSSFIGAKPNIPWLFLTDPKLAMEVYFGPCSPYQFRLVGPGQWPGARNAILTQWDRSLKPMQTRVVGRLQKPCFFFHWLKLFAIPILLIAVFLVLT

SEQ ID NO: 46409 - protein, 532 aa, Homo sapiens; identical to SEQ ID NO: 46408

SEQ ID NO: 46410 - protein, 469 aa, Homo sapiens
MGKKVAIIGAGVSGLASIRSCLEEGLEPTCFEKSNDIGGLWKFSTFVSSVNKHPDFATTGQWDVTTERDGKKESAVFDAVMVCSGHHVYPNLPKESFPGLNHFKGKCFHSRDYKEPGVFNGKRVLVVGLGNSGCDIATELSRTAEQVMISSRSGSWVMSRVWDNGYPWDMLLVTRFGTFLKNNLPTAISDWLYVKQMNARFKHENYGLMPLNGVLRKEPVFNDELPASILCGIVSVKPNVKEFTETSAIFEDGTIFEGIDCVIFATGYSFAYPFLDESIIKSRNNEIILFKGVFPPLLEKSTIAVIGFVQSLGAAIPTVDLQSRWAAQVIKGTCTLPSMEDMMNDINEKMEKKRKWFGKSETIQTDYIVYMDELSSFIGAKPNIPWLFLTDPKLAMEVYFGPCSPYQFRLVGPGQWPGARNAILTQWDRSLKPMQTRVVGRLQKPCFFFHWLKLFAIPILLIAVFLVLT

SEQ ID NO: 46411 - protein, 512 aa, Homo sapiens
MPASTRSQKRQGMDSLLEPLKMNMDHAEEGRASIYKSVFSNSSKEMMCFPDFPFPDDFPNFMHNSKIQEYIIAFAKEKNLLKYIQFKTFVSSVNKHPDFATTGQWDVTTERDGKKESAVFDAVMVCSGHHVYPNLPKESFPGLNHFKGKCFHSRDYKEPGVFNGKRVLVVGLGNSGCDIATELSRTAEQVMISSRSGSWVMSRVWDNGYPWDMLLVTRFGTFLKNNLPTAISDWLYVKQMNARFKHENYGLMPLNGVLRKEPVFNDELPASILCGIVSVKPNVKEFTETSAIFEDGTIFEGIDCVIFATGYSFAYPFLDESIIKSRNNEIILFKGVFPPLLEKSTIAVIGFVQSLGAAIPTVDLQSRWAAQVIKGTCTLPSMEDMMNDINEKMEKKRKWFGKSETIQTDYIVYMDELSSFIGAKPNIPWLFLTDPKLAMEVYFGPCSPYQFRLVGPGQWPGARNAILTQWDRSLKPMQTRVVGRLQKPCFFFHWLKLFAIPILLIAVFLVLT

SEQ ID NO: 46412 - protein, 558 aa, Homo sapiens
MAKKVAVIGAGVSGLSSIKCCVDEDLEPTCFERSDDIGGLWKFTESSKDGMTRVYKSLVTNVCKEMSCYSDFPFHEDYPNFMNHEKFWDYLQEFAEHFDLLKYIQFKTTVCSITKRPDFSETGQWDVVTETEGKQNRAVFDAVMVCTGHFLNPHLPLEAFPGIHKFKGQILHSQEYKIPEGFQGKRVLVIGLGNTGGDIAVELSRTAAQVLLSTRTGTWVLGRSSDWGYPYNMMVTRRCCSFIAQVLPSRFLNWIQERKLNKRFNHEDYGLSITKGKKAKFIVNDELPNCILCGAITMKTSVIEFTETSAVFEDGTVEENIDVVIFTTGYTFSFPFFEEPLKSLCTKKIFLYKQVFPLNLERATLAIIGLIGLKGSILSGTELQARWVTRVFKGLCKIPPSQKLMMEATEKEQLIKRGVFKDTSKDKFDYIAYMDDIAACIGTKPSIPLLFLKDPRLAWEVFFGPCTPYQYRLMGPGKWDGARNAILTQWDRTLKPLKTRIVPDSSKPASMSHYLKAWGAPVLLASLLLICKSSLFLKLVRDKLQDRMSPYLVSLWRG

SEQ ID NO: 46413 - protein, 533 aa, Homo sapiens
MTKKRIAVIGGGVSGLSSIKCCVEEGLEPVCFERTDDIGGLWRFQENPEEGRASIYKSVIINTSKEMMCFSDYPIPDHYPNFMHNAQVLEYFRMYAKEFDLLKYIRFKTTVCSVKKQPDFATSGQWEVVTESEGKKEMNVFDGVMVCTGHHTNAHLPLESFPGIEKFKGQYFHSRDYKNPEGFTGKRVIIIGIGNSGGDLAVEISQTAKQVFLSTRRGAWILNRVGDYGYPADVLFSSRLTHFIWKICGQSLANKYLEKKINQRFDHEMFGLKPKHRALSQHPTLNDDLPNRIISGLVKVKGNVKEFTETAAIFEDGSREDDIDAVIFATGYSFDFPFLEDSVKVVKNKISLYKKVFPPNLERPTLAIIGLIQPLGAIMPISELQGRWATQVFKGLKTLPSQSEMMAEISKAQEEIDKRYVESQRHTIQGDYIDTMEELADLVGVRPNLLSLAFTDPKLALHLLLGPCTPIHYRVQGPGKWDGARKAILTTDDRIRKPLMTRVVERSSSMTSTMTIGKFMLALAFFAIIIAYF

SEQ ID NO: 46414 - protein, 285 aa, Homo sapiens
MTKKRIAVIGGGVSGLSSIKCCVEEGLEPVCFERTDDIGGLWRFQENPEEGRASIYKSVIINTSKEMMCFSDYPIPDHYPNFMHNAQVLEYFRMYAKEFDLLKYIRFKTTVCSVKKQPDFATSGQWEVVTESEGKKEMNVFDGVMVCTGHHTNAHLPLESFPGIEKFKGQYFHSRDYKNPEGFTGKRVIIIGIGNSGGDLAVEISQTAKQVFLSTRRGAWILNRVGDYGYPADVLFSSRLTHFIWKICGQSLANKYLEKKINQRFDHEMFGLKPKHRSKDIALTE

SEQ ID NO: 46415 - protein, 464 aa, Homo sapiens
MTKKRIAVIGGGVSGLSSIKCCVEEGLEPVCFERTDDIGGLWRFQENPEEGRASIYKSVIINTSKEMMCFSDYPIPDHYPNFMHNAQVLEYFRMYAKEFDLLKYIRFKTTVCSVKKQPDFATSGQWEVVTESEGKKEMNVFDGVMVCTGHHTNAHLPLESFPGIEKFKGQYFHSRDYKNPEGFTGKRVIIIGIGNSGGDLAVEISQTAKQVFLSTRRGAWILNRVGDYGYPADVLFSSRLTHFIWKICGQSLANKYLEKKINQRFDHEMFGLKPKHRALSQHPTLNDDLPNRIISGLVKVKGNVKEFTETAAIFEDGSREDDIDAVIFATGYSFDFPFLEDSVKVVKNKISLYKKVFPPNLERPTLAIIGLIQPLGAIMPISELQGRWATQVFKGLKTLPSQSEMMAEISKAQEEIDKSLTMRKTSDKPKLKNILQIPDYLKTVKIINKESLRNCPGIKGPKET

SEQ ID NO: 46416 - protein, 192 aa, Homo sapiens
MTKKRIAVIGGGVSGLSSIKCCVEEGLEPVCFERTDDIGGLWRFQENPEEGRASIYKSVIINTSKEMMCFSDYPIPDHYPNFMHNAQVLEYFRMYAKEFDLLKYIRFKTTVCSVKKQPDFATSGQWEVVTESEGKKEMNVFDGVMVCTGHHTNAHLPLESFPGIEKFKGQYFHSRDYKNPEGFTGKRVIIIG

SEQ ID NO: 46417 - protein, 145 aa, Homo sapiens
MTKKRIAVIGGGVSGLSSIKCCVEEGLEPVCFERTDDIGGLWRFQENPEEGRASIYKSVIINTSKEMMCFSDYPIPDHYPNFMHNAQVLEYFRMYAKEFDLLKYIRFKTTVCSVKKQPDFATSGQWEVVTESEGKKEMNVFDGVM

SEQ ID NO: 46418 - protein, 1269 aa, Homo sapiens
MEATGVLPFVRGVDLSGNDFKGGYFPENVKAMTSLRWLKLNRTGLCYLPEELAALQKLEHLSVSHNNLTTLHGELSSLPSLRAIVARANSLKNSGVPDDIFKLDDLSVLDLSHNQLTECPRELENAKNMLVLNLSHNSIDTIPNQLFINLTDLLYLDLSENRLESLPPQMRRLVHLQTLVLNGNPLLHAQLRQLPAMTALQTLHLRSTQRTQSNLPTSLEGLSNLADVDLSCNDLTRVPECLYTLPSLRRLNLSSNQITELSLCIDQWVHVETLNLSRNQLTSLPSAICKLSKLKKLYLNSNKLDFDGLPSGIGKLTNLEEFMAANNNLELVPESLCRCPKLRKLVLNKNHLVTLPEAIHFLTEIEVLDVRENPNLVMPPKPADRAAEWYNIDFSLQNQLRLAGASPATVAAAAAAGSGPKDPMARKMRLRRRKDSAQDDQAKQVLKGMSDVAQEKNKKQEESADARAPSGKVRRWDQGLEKPRLDYSEFFTEDVGQLPGLTIWQIENFVPVLVEEAFHGKFYEADCYIVLKTFLDDSGSLNWEIYYWIGGEATLDKKACSAIHAVNLRNYLGAECRTVREEMGDESEEFLQVFDNDISYIEGGTASGFYTVEDTHYVTRMYRVYGKKNIKLEPVPLKGTSLDPRFVFLLDRGLDIYVWRGAQATLSSTTKARLFAEKINKNERKGKAEITLLVQGQELPEFWEALGGEPSEIKKHVPEDFWPPQPKLYKVGLGLGYLELPQINYKLSVEHKQRPKVELMPRMRLLQSLLDTRCVYILDCWSDVFIWLGRKSPRLVRAAALKLGQELCGMLHRPRHATVSRSLEGTEAQVFKAKFKNWDDVLTVDYTRNAEAVLQSPGLSGKVKRDAEKKDQMKADLTALFLPRQPPMSLAEAEQLMEEWNEDLDGMEGFVLEGKKFARLPEEEFGHFYTQDCYVFLCRYWVPVEYEEEEKKEDKEEKAEGKEGEEATAEAEEKQPEEDFQCIVYFWQGREASNMGWLTFTFSLQKKFESLFPGKLEVVRMTQQQENPKFLSHFKRKFIIHRGKRKAVQGAQQPSLYQIRTNGSALCTRCIQINTDSSLLNSEFCFILKVPFESEDNQGIVYAWVGRASDPDEAKLAEDILNTMFDTSYSKQVINEGEEPENFFWVGIGAQKPYDDDAEYMKHTRLFRCSNEKGYFAVTEKCSDFCQDDLADDDIMLLDNGQEVYMWVGTQTSQVEIKLSLKACQVYIQHMRSKEHERPRRLRLVRKGNEQHAFTRCFHAWSAFCKALA

SEQ ID NO: 46419 - protein, 1183 aa, Homo sapiens
MTSLRWLKLNRTGLCYLPEELAALQKLEHLSVSHNNLTTLHGELSSLPSLRAIVARANSLKNSGVPDDIFKLDDLSVLDLSHNQLTECPRELENAKNMLVLNLSHNRQLPAMTALQTLHLRSTQRTQSNLPTSLEGLSNLADVDLSCNDLTRVPECLYTLPSLRRLNLSSNQITELSLCIDQWVHVETLNLSRNQLTSLPSAICKLSKLKKLYLNSNKLDFDGLPSGIGKLTNLEEFMAANNNLELVPESLCRCPKLRKLVLNKNHLVTLPEAIHFLTEIEVLDVRENPNLVMPPKPADRAAEWYNIDFSLQNQLRLAGASPATVAAAAAGSGPKDPMARKMRLRRRKDSAQDDQAKQVLKGMSDVAQEKNKKQEESADARAPSGKVRRWDQGLEKPRLDYSEFFTEDVGQLPGLTIWQIENFVPVLVEEAFHGKFYEADCYIVLKTFLDDSGSLNWEIYYWIGGEATLDKKACSAIHAVNLRNYLGAECRTVREEMGDESEEFLQVFDNDISYIEGGTASGFYTVEDTHYVTRMYRVYGKKNIKLEPVPLKGTSLDPRFVFLLDRGLDIYVWRGAQATLSSTTKARLFAEKINKNERKGKAEITLLVQGQELPEFWEALGGEPSEIKKHVPEDFWPPQPKLYKVGLGLGYLELPQINYKLSVEHKQRPKVELMPRMRLLQSLLDTRCVYILDCWSDVFIWLGRKSPRLVRAAALKLGQELCGMLHRPRHATVSRSLEGTEAQVFKAKFKNWDDVLTVDYTRNAEAVLQSPGLSGKVKRDAEKKDQMKADLTALFLPRQPPMSLAEAEQLMEEWNEDLDGMEGFVLEGKKFARLPEEEFGHFYTQDCYVFLCRYWVPVEYEEEEKKEDKEEKAEGKEGEEATAEAEEKQPEEDFQCIVYFWQGREASNMGWLTFTFSLQKKFESLFPGKLEVVRMTQQQENPKFLSHFKRKFIIHRGKRKAVQGAQQPSLYQIRTNGSALCTRCIQINTDSSLLNSEFCFILKVPFESEDNQGIVYAWVGRASDPDEAKLAEDILNTMFDTSYSKQVINEGEEPENFFWVGIGAQKPYDDDAEYMKHTRLFRCSNEKGYFAVTEKCSDFCQDDLADDDIMLLDNGQEVYMWVGTQTSQVEIKLSLKACQVYIQHMRSKEHERPRRLRLVRKGNEQHAFTRCFHAWSAFCKALA

SEQ ID NO: 46420 - protein, 1148 aa, Homo sapiens
MEATGVLPFVRGVDLSGNDFKGGYFPENVKAMTSLRWLKLNRTGLCYLPEELAALQKLEHLSVSHNNLTTLHGELSSLPSLRAIVARANSLKNSGVPDDIFKLDDLSVLDLSHNQLTECPRELENAKNMLVLNLSHNSIDTIPNQLFINLTDLLYLDLSENRLESLPPQMRRLVHLQTLVLNGNPLLHAQLRQLPAMTALQTLHLRSTQRTQSNLPTSLEGLSNLADVDLSCNDLTRVPECLYTLPSLRRLNLSSNQITELSLCIDQWVHVETLNLSRNQLTSLPSAICKLSKLKKLYLNSNKLDFDGLPSGIGKLTNLEEFMAANNNLELVPESLCRCPKLRKLVLNKNHLVTLPEAIHFLTEIEVLDVRENPNLVMPPKPADRAAEWYNIDFSLQNQLRLAGASPATVAAAAAAGSGPKDPMARKMRLRRRKDSAQDDQAKQVLKGMSDVAQEKNKKQEESADARAPSGKVRRWDQGLEKPRLDYSEFFTEDVGQLPGLTIWQIENFVPVLVEEAFHGKFYEADCYIVLKTFLDDSGSLNWEIYYWIGGEATLDKKACSAIHAVNLRNYLGAECRTVREEMGDESEEFLQVFDNDISYIEGGTASGFYTVEDTHYVTRMYRVYGKKNIKLEPVPLKGTSLDPRFVFLLDRGLDIYVWRGAQATLSSTTKARLFAEKINKNERKGKAEITLLVQGQELPEFWEALGGEPSEIKKNWDDVLTVDYTRNAEAVLQSPGLSGKVKRDAEKKDQMKADLTALFLPRQPPMSLAEAEQLMEEWNEDLDGMEGFVLEGKKFARLPEEEFGHFYTQDCYVFLCRYWVPVEYEEEEKKEDKEEKAEGKEGEEATAEAEEKQPEEDFQCIVYFWQGREASNMGWLTFTFSLQKKFESLFPGKLEVVRMTQQQENPKFLSHFKRKFIIHRGKRKAVQGAQQPSLYQIRTNGSALCTRCIQINTDSSLLNSEFCFILKVPFESEDNQGIVYAWVGRASDPDEAKLAEDILNTMFDTSYSKQVINEGEEPENFFWVGIGAQKPYDDDAEYMKHTRLFRCSNEKGYFAVTEKCSDFCQDDLADDDIMLLDNGQEVYMWVGTQTSQVEIKLSLKACQVYIQHMRSKEHERPRRLRLVRKGNEQHAFTRCFHAWSAFCKALA

SEQ ID NO: 46421 - protein, 427 aa, Homo sapiens
MFFTCGPNEAMVVSGFCRSPPVMVAGGRVFVLPCIQQIQRISLNTLTLNVKSEKVYTRHGVPISVTGIAQVKIQGQNKEMLAAACQMFLGKTEAEIAHIALETLEGHQRAIMAHMTVEEIYKDRQKFSEQVFKVASSDLVNMGISVVSYTLKDIHDDQDYLHSLGKARTAQVQKDARIGEAEAKRDAGIREAKAKQEKVSAQYLSEIEMAKAQRDYELKKAAYDIEVNTRRAQADLAYQLQVAKTKQQIEEQRVQVQVVERAQQVAVQEQEIARREKELEARVRKPAEAERYKLERLAEAEKSQLIMQAEAEAASVRMRGEAEAFAIGARARAEAEQMAKKAEAFQLYQEAAQLDMLLEKLPQVAEEISGPLTSANKITLVSSGSGTMGAAKVTGEVLDILTRLPESVERLTGVSISQVNHKPLRTA

SEQ ID NO: 46422 - protein, 427 aa, Homo sapiens; identical to SEQ ID NO: 46421

SEQ ID NO: 46423 - protein, 427 aa, Homo sapiens; identical to SEQ ID NO: 46421

SEQ ID NO: 46424 - protein, 145 aa, Homo sapiens
MGVEGTGRGGCRLGGPDGKGKGWAPVDATARLPHPQRLSLPLLQLQPEPCFSLVAQMRPWWSPDYLHSLGKARTAQVQKDARIGEAEAKRDAGIREAKAKQEKVSAQYLSEIEMAKAQRDYELKKAAYDIEVNTRRAQADLAYQL

SEQ ID NO: 46425 - protein, 192 aa, Homo sapiens
MFFTCGPNEAMVVSGFCRSPPVMVAGGRVFVLPCIQQIQRISLNTLTLNVKSEKVKIQGQNKEMLAAACQMFLGKTEAEIAHIALETLEGHQRAIMAHMTVEEIYKDRQKFSEQVFKVASSDLVNMGISVVSYTLKDIHDDQDYLHSLGKARTAQVQKDARIGEAEAKRDAGIREAKAKQEKVSAQYLSEIE

SEQ ID NO: 46426 - protein, 192 aa, Homo sapiens; identical to SEQ ID NO: 46425

SEQ ID NO: 46427 - protein, 238 aa, Homo sapiens
MRPWWSPVKIQGQNKEMLAAACQMFLGKTEAEIAHIALETLEGHQRAIMAHMTVEEIYKDRQKFSEQVFKVASSDLVNMGISVVSYTLKDIHDDQDYLHSLGKARTAQVQKDARIGEAEAKRDAGIREAKAKQEKVSAQYLSEIEMAKAQRDYELKKAAYDIEVNTRRAQADLAYQLQVAKTKQQIEEQRVQVQVVERAQQVAVQEQEIARREKELEARVRKPAEAERYKLERLAEAE

SEQ ID NO: 46428 - protein, 192 aa, Homo sapiens; identical to SEQ ID NO: 46425

SEQ ID NO: 46429 - protein, 192 aa, Homo sapiens; identical to SEQ ID NO: 46425

SEQ ID NO: 46430 - protein, 145 aa, Homo sapiens; identical to SEQ ID NO: 46424

SEQ ID NO: 46431 - protein, 90 aa, Homo sapiens
  VARIANT 1: note = MOD_RES - Any amino acid
XAKKAEAFQLYQEAAQLDMLLEKLPQVAEEISGPLTSANKITLVSSGSGTMGAAKVTGEVLDILTRLPESVERLTGVSISQVNHKPLRTA

SEQ ID NO: 46432 - protein, 235 aa, Homo sapiens
MFFTCGPNEAMVVSGFCRSPPVMVAGGRVFVLPCIQQIQRISLNTLTLNVKSEKVYTRHGVPISVTGIAQVKIQGQNKEMLAAACQMFLGKTEAEIAHIALETLEGHQRAIMAHMTVEEIYKDRQKFSEQVFKVASSDLVNMGISVVSYTLKDIHDDQDYLHSLGKARTAQVQKDARIGEAEAKRDAGIREAKAKQEKVSAQYLSEIEMAKAQRDYELKKAAYDIEVNTRRAQAD

SEQ ID NO: 46433 - protein, 238 aa, Homo sapiens; identical to SEQ ID NO: 46427

SEQ ID NO: 46434 - protein, 138 aa, Homo sapiens
VKIQGQNKEMLAAACQMFLGKTEAEIAHIALETLEGHQRAIMAHMTVEEIYKDRQKFSEQVFKVASSDLVNMGISVVSYTLKDIHDDQDYLHSLGKARTAQVQKDARIGEAEAKRDAGIREAKAKQEKVSAQYLSEIE

SEQ ID NO: 46435 - protein, 185 aa, Homo sapiens
MFFTCGPNEAMVVSGFCRSPPVMVAGGRVFVLPCIQQIQRISLNTLTLNVKSEKVYTRHGVPISVTGIAQVKIQGQNKEMLAAACQMFLGKTEAEIAHIALETLEGHQRAIMAHMTVEEIYKDRQKFSEQVFKVASSDLVNMGISVVSYTLKDIHDDQDYLHSLGKARTAQVQKDARIGEAEAKR

SEQ ID NO: 46436 - protein, 115 aa, Homo sapiens
MGVEGTGRGGCRLGGPDGKGKGWAPVDATARLPHPQRLSLPLLQLQPEPCFSLVAQMRPWWSPDYLHSLGKARTAQVQKDARIGEAEAKRDAGIREAKAKQEKVSAQYLSEIEMA

SEQ ID NO: 46437 - protein, 186 aa, Homo sapiens
VAKTKQQIEEQRVQVQVVERAQQVAVQEQEIARREKELEARVRKPAEAERYKLERLAEAEKSQLIMQAEAEAASVRMRGEAEAFAIGARARAEAEQMAKKAEAFQLYQEAAQLDMLLEKLPQVAEEISGPLTSANKITLVSSGSGTMGAAKVTGEVLDILTRLPESVERLTGVSISQVNHKPLRTA

SEQ ID NO: 46438 - protein, 145 aa, Homo sapiens; identical to SEQ ID NO: 46424

SEQ ID NO: 46439 - protein, 185 aa, Homo sapiens; identical to SEQ ID NO: 46435

SEQ ID NO: 46440 - protein, 210 aa, Homo sapiens
MFFTCGPNEAMVVSGFCRSPPVMVAGGRVFVLPCIQQIQRISLNTLTLNVKSEKVYTRHGVPISVTGIAQVKIQGQNKEMLAAACQMFLGKTEAEIAHIALETLEGHQRAIMAHMTVEEIYKDRQKFSEQVFKVASSDLVNMGISVVSYTLKDIHDDQDYLHSLGKARTAQVQKDARIGEAEAKRDAGIREAKAKQEKVSAQYLSEIEMA

SEQ ID NO: 46441 - protein, 210 aa, Homo sapiens; identical to SEQ ID NO: 46440

SEQ ID NO: 46442 - protein, 252 aa, Homo sapiens
MFFTCGPNEAMVVSGFCRSPPVMVAGGRVFVLPCIQQIQRISLNTLTLNVKSEKVYTRHGVPISVTGIAQVKIQGQNKEMLAAACQMFLGKTEAEIAHIALETLEGHQRAIMAHMTVEEIYKDRQKFSEQVFKVASSDLVNMGISVVSYTLKDIHDDQDYLHSLGKARTAQVQKDARIGEAEAKRDAGIREAKAKQEKVSAQYLSEIEMAKAQRDYELKKAAYDIEVNTRRAQADLAYQLQVAKTKQQIEEQ

SEQ ID NO: 46443 - protein, 147 aa, Homo sapiens
MRPWWSPVKIQGQNKEMLAAACQMFLGKTEAEIAHIALETLEGHQRAIMAHMTVEEIYKDRQKFSEQVFKVASSDLVNMGISVVSYTLKDIHDDQDYLHSLGKARTAQVQKDARIGEAEAKRDAGIREAKAKQEKVSAQYLSEIEMA

SEQ ID NO: 46444 - protein, 182 aa, Homo sapiens
VKIQGQNKEMLAAACQMFLGKTEAEIAHIALETLEGHQRAIMAHMTVEEIYKDRQKFSEQVFKVASSDLVNMGISVVSYTLKDIHDDQDYLHSLGKARTAQVQKDARIGEAEAKRDAGIREAKAKQEKVSAQYLSEIEMAKAQRDYELKKAAYDIEVNTRRAQADLAYQLQVAKTKQQIEEQ

SEQ ID NO: 46445 - protein, 115 aa, Homo sapiens
VKIQGQNKEMLAAACQMFLGKTEAEIAHIALETLEGHQRAIMAHMTVEEIYKDRQKFSEQVFKVASSDLVNMGISVVSYTLKDIHDDQDYLHSLGKARTAQVQKDARIGEAEAKR

SEQ ID NO: 46446 - protein, 235 aa, Homo sapiens; identical to SEQ ID NO: 46432

SEQ ID NO: 46447 - protein, 427 aa, Homo sapiens; identical to SEQ ID NO: 46421

SEQ ID NO: 46448 - protein, 165 aa, Homo sapiens
VKIQGQNKEMLAAACQMFLGKTEAEIAHIALETLEGHQRAIMAHMTVEEIYKDRQKFSEQVFKVASSDLVNMGISVVSYTLKDIHDDQDYLHSLGKARTAQVQKDARIGEAEAKRDAGIREAKAKQEKVSAQYLSEIEMAKAQRDYELKKAAYDIEVNTRRAQAD

SEQ ID NO: 46449 - protein, 145 aa, Homo sapiens; identical to SEQ ID NO: 46424

SEQ ID NO: 46450 - protein, 252 aa, Homo sapiens; identical to SEQ ID NO: 46442

SEQ ID NO: 46451 - protein, 252 aa, Homo sapiens; identical to SEQ ID NO: 46442

SEQ ID NO: 46452 - protein, 82 aa, Homo sapiens
DYLHSLGKARTAQVQKDARIGEAEAKRDAGIREAKAKQEKVSAQYLSEIEMAKAQRDYELKKAAYDIEVNTRRAQADLAYQL

SEQ ID NO: 46453 - protein, 185 aa, Homo sapiens; identical to SEQ ID NO: 46435

SEQ ID NO: 46454 - protein, 252 aa, Homo sapiens; identical to SEQ ID NO: 46442

SEQ ID NO: 46455 - protein, 185 aa, Homo sapiens; identical to SEQ ID NO: 46435

SEQ ID NO: 46456 - protein, 238 aa, Homo sapiens; identical to SEQ ID NO: 46427

SEQ ID NO: 46457 - protein, 427 aa, Homo sapiens; identical to SEQ ID NO: 46421

SEQ ID NO: 46458 - protein, 192 aa, Homo sapiens; identical to SEQ ID NO: 46425

SEQ ID NO: 46459 - protein, 235 aa, Homo sapiens; identical to SEQ ID NO: 46432

SEQ ID NO: 46460 - protein, 60 aa, Homo sapiens
VAKTKQQIEEQRVQVQVVERAQQVAVQEQEIARREKELEARVRKPAEAERYKLERLAEAE

SEQ ID NO: 46461 - protein, 238 aa, Homo sapiens; identical to SEQ ID NO: 46427

SEQ ID NO: 46462 - protein, 235 aa, Homo sapiens; identical to SEQ ID NO: 46432

SEQ ID NO: 46463 - protein, 357 aa, Homo sapiens
VKIQGQNKEMLAAACQMFLGKTEAEIAHIALETLEGHQRAIMAHMTVEEIYKDRQKFSEQVFKVASSDLVNMGISVVSYTLKDIHDDQDYLHSLGKARTAQVQKDARIGEAEAKRDAGIREAKAKQEKVSAQYLSEIEMAKAQRDYELKKAAYDIEVNTRRAQADLAYQLQVAKTKQQIEEQRVQVQVVERAQQVAVQEQEIARREKELEARVRKPAEAERYKLERLAEAEKSQLIMQAEAEAASVRMRGEAEAFAIGARARAEAEQMAKKAEAFQLYQEAAQLDMLLEKLPQVAEEISGPLTSANKITLVSSGSGTMGAAKVTGEVLDILTRLPESVERLTGVSISQVNHKPLRTA

SEQ ID NO: 46464 - protein, 11 aa, Homo sapiens
VAKTKQQIEEQ

SEQ ID NO: 46465 - protein, 252 aa, Homo sapiens; identical to SEQ ID NO: 46442

SEQ ID NO: 46466 - protein, 235 aa, Homo sapiens; identical to SEQ ID NO: 46432

SEQ ID NO: 46467 - protein, 185 aa, Homo sapiens; identical to SEQ ID NO: 46435

SEQ ID NO: 46468 - protein, 145 aa, Homo sapiens; identical to SEQ ID NO: 46424

SEQ ID NO: 46469 - protein, 238 aa, Homo sapiens; identical to SEQ ID NO: 46427

SEQ ID NO: 46470 - protein, 379 aa, Homo sapiens
MFFTCGPNEAMVVSGFCRSPPVMVAGGRVFVLPCIQQIQRISLNTLTLNVKSEKVYTRHGVPISVTGIAQEIYKDRQKFSEQVFKVASSDLVNMGISVVSYTLKDIHDDQDYLHSLGKARTAQVQKDARIGEAEAKRDAGIREAKAKQEKVSAQYLSEIEMAKAQRDYELKKAAYDIEVNTRRAQADLAYQLQVAKTKQQIEEQRVQVQVVERAQQVAVQEQEIARREKELEARVRKPAEAERYKLERLAEAEKSQLIMQAEAEAASVRMRGEAEAFAIGARARAEAEQMAKKAEAFQLYQEAAQLDMLLEKLPQVAEEISGPLTSANKITLVSSGSGTMGAAKVTGEVLDILTRLPESVERLTGVSISQVNHKPLRTA

SEQ ID NO: 46471 - protein, 185 aa, Homo sapiens; identical to SEQ ID NO: 46435

SEQ ID NO: 46472 - protein, 231 aa, Homo sapiens
VKIQGQNKEMLAAACQMFLGKTEAEIAHIALETLEGHQRAIMAHMTVEEIYKDRQKFSEQVFKVASSDLVNMGISVVSYTLKDIHDDQDYLHSLGKARTAQVQKDARIGEAEAKRDAGIREAKAKQEKVSAQYLSEIEMAKAQRDYELKKAAYDIEVNTRRAQADLAYQLQVAKTKQQIEEQRVQVQVVERAQQVAVQEQEIARREKELEARVRKPAEAERYKLERLAEAE

SEQ ID NO: 46473 - protein, 210 aa, Homo sapiens; identical to SEQ ID NO: 46440

SEQ ID NO: 46474 - protein, 192 aa, Homo sapiens; identical to SEQ ID NO: 46425

SEQ ID NO: 46475 - protein, 379 aa, Homo sapiens; identical to SEQ ID NO: 46470

SEQ ID NO: 46476 - protein, 379 aa, Homo sapiens; identical to SEQ ID NO: 46470

SEQ ID NO: 46477 - protein, 379 aa, Homo sapiens; identical to SEQ ID NO: 46470

SEQ ID NO: 46478 - protein, 379 aa, Homo sapiens; identical to SEQ ID NO: 46470

SEQ ID NO: 46479 - protein, 286 aa, Homo sapiens [sequence omitted]

SEQ ID NO: 46480 - protein, 483 aa, Homo sapiens
MGNCHTVGPNEALVVSGGCCGSDYKQYVFGGWAWAWWCISDTQRLSLEVMTILCRCENIETSEGVPLFVTGVAQVPCPCLLDCKWGNSKGFWKLCQVCQISLEIMTLQPRCEDVETAEGVALTVTGVAQVKIMTEKELLAVACEQFLGKNVQDIKNVVLQTLEGHLRSILGTLTVEQIYQDRDQFAKLVREVAAPDVGRMGIEILSFTIKDVYDKVDYLSSLGKTQTAVVQRDADIGVAEAERDAGIREAECKKEMLDVKFMADTKIADSKRAFELQKSAFSEEVNIKTAEAQLAYELQGAREQQKIRQEEIEIEVVQRKKQIAVEAQEILRTDKELIATVRRPAEAEAHRIQQIAEGEKVKQVLLAQAEAEKIRKIGEAEAAVIEAMGKAEAERMKLKAEAYQKYGDAAKMALVLEALPQIAAKIAAPLTKVDEIVVLSGDNSKVTSEVNRLLAELPASVHALTGVDLSKIPLIKKATGVQV

SEQ ID NO: 46481 - protein, 428 aa, Homo sapiens
MGNCHTVGPNEALVVSGGCCGSDYKQYVFGGWAWAWWCISDTQRISLEIMTLQPRCEDVETAEGVALTVTGVAQVKIMTEKELLAVACEQFLGKNVQDIKNVVLQTLEGHLRSILGTLTVEQIYQDRDQFAKLVREVAAPDVGRMGIEILSFTIKDVYDKVDYLSSLGKTQTAVVQRDADIGVAEAERDAGIREAECKKEMLDVKFMADTKIADSKRAFELQKSAFSEEVNIKTAEAQLAYELQGAREQQKIRQEEIEIEVVQRKKQIAVEAQEILRTDKELIATVRRPAEAEAHRIQQIAEGEKVKQVLLAQAEAEKIRKIGEAEAAVIEAMGKAEAERMKLKAEAYQKYGDAAKMALVLEALPQIAAKIAAPLTKVDEIVVLSGDNSKVTSEVNRLLAELPASVHALTGVDLSKIPLIKKATGVQV

SEQ ID NO: 46482 - protein, 993 aa, Homo sapiens
MPALARDGGQLPLLVVFSAMIFGTITNQDLPVIKCVLINHKNNDSSVGKSSSYPMVSESPEDLGCALRPQSSGTVYEAAAVEVDVSASITLQVLVDAPGNISCLWVFKHSSLNCQPHFDLQNRGVVSMVILKMTETQAGEYLLFIQSEATNYTILFTVSIRNTLLYTLRRPYFRKMENQDALVCISESVPEPIVEWVLCDSQGESCKEESPAVVKKEEKVLHELFGTDIRCCARNELGRECTRLFTIDLNQTPQTTLPQLFLKVGEPLWIRCKAVHVNHGFGLTWELENKALEEGNYFEMSTYSTNRTMIRILFAFVSSVARNDTGYYTCSSSKHPSQSALVTIVEKGFINATNSSEDYEIDQYEEFCFSVRFKAYPQIRCTWTFSRKSFPCEQKGLDNGYSISKFCNHKHQPGEYIFHAENDDAQFTKMFTLNIRRKPQVLAEASASQASCFSDGYPLPSWTWKKCSDKSPNCTEEITEGVWNRKANRKVFGQWVSSSTLNMSEAIKGFLVKCCAYNSLGTSCETILLNSPGPFPFIQDNISFYATIGVCLLFIVVLTLLICHKYKKQFRYESQLQMVQVTGSSDNEYFYVDFREYEYDLKWEFPRENLEFGKVLGSGAFGKVMNATAYGISKTGVSIQVAVKMLKEKADSSEREALMSELKMMTQLGSHENIVNLLGACTLSGPIYLIFEYCCYGDLLNYLRSKREKFHRTWTEIFKEHNFSFYPTFQSHPNSSMPGSREVQIHPDSDQISGLHGNSFHSEDEIEYENQKRLEEEEDLNVLTFEDLLCFAYQVAKGMEFLEFKSCVHRDLAARNVLVTHGKVVKICDFGLARDIMSDSNYVVRGNARLPVKWMAPESLFEGIYTIKSDVWSYGILLWEIFSLGVNPYPGIPVDANFYKLIQNGFKMDQPFYATEEIYIIMQSCWAFDSRKRPSFPNLTSFLGCQLADAEEAMYQNVDGRVSECPHTYQNRRPFSREMDLGLLSPQAQVEDS

SEQ ID NO: 46483 - protein, 996 aa, Homo sapiens
MPALARDGGQLPLLVVFSAMIFGTITNQDLPVIKCVLINHKNNDSSVGKSSSYPMVSESPEDLGCALRPQSSGTVYEAAAVEVDVSASITLQVLVDAPGNISCLWVFKHSSLNCQPHFDLQNRGVVSMVILKMTETQAGEYLLFIQSEATNYTILFTVSIRNTLLYTLRRPYFRKMENQDALVCISESVPEPIVEWVLCDSQGESCKEESPAVVKKEEKVLHELFGTDIRCCARNELGRECTRLFTIDLNQTPQTTLPQLFLKVGEPLWIRCKAVHVNHGFGLTWELENKALEEGNYFEMSTYSTNRTMIRILFAFVSSVARNDTGYYTCSSSKHPSQSALVTIVEKGFINATNSSEDYEIDQYEEFCFSVRFKAYPQIRCTWTFSRKSFPCEQKGLDNGYSISKFCNHKHQPGEYIFHAENDDAQFTKMFTLNIRRKPQVLAEASASQASCFSDGYPLPSWTWKKCSDKSPNCTEEITEGVWNRKANRKVFGQWVSSSTLNMSEAIKGFLVKCCAYNSLGTSCETILLNSPGPFPFIQDNISFYATIGVCLLFIVVLTLLICHKYKKQFRYESQLQMVQVTGSSDNEYFYVDFREYEYDLKWEFPRENLEFGKVLGSGAFGKVMNATAYGISKTGVSIQVAVKMLKEKADSSEREALMSELKMMTQLGSHENIVNLLGACTLSGPIYLIFEYCCYGDLLNYLRSKREKFHRTWTEIFKEHNFSFYPTFQSHPNSSMPGSREVQIHPDSDQISGLHGNSFHSEDEIEYENQKRLEEEEDLNVLTFEDLLCFAYQVAKGMEFLEFKSCVHRDLAARNVLVTHGKVVKICDFGLARDIMSDSNYVVRGNVRLARLPVKWMAPESLFEGIYTIKSDVWSYGILLWEIFSLGVNPYPGIPVDANFYKLIQNGFKMDQPFYATEEIYIIMQSCWAFDSRKRPSFPNLTSFLGCQLADAEEAMYQNVDGRVSECPHTYQNRRPFSREMDLGLLSPQAQVEDS

SEQ ID NO: 46484 - protein, 952 aa, Homo sapiens
MPALARDGGQLPLLVVFSAMIFGTITNQDLPVIKCVLINHKNNDSSVGKSSSYPMVSESPEDLGCALRPQSSGTVYEAAAVEVDVSASITLQVLVDAPGNISCLWVFKHSSLNCQPHFDLQNRGVVSMVILKMTETQAGEYLLFIQSEATNYTILFTVSIRNTLLYTLRRPYFRKMENQDALVCISESVPEPIVEWVLCDSQGESCKEESPAVVKKEEKVLHELFGTDIRCCARNELGRECTRLFTIDLNQTPQTTLPQLFLKVGEPLWIRCKAVHVNHGFGLTWELENKALEEGNYFEMSTYSTNRTMIRILFAFVSSVARNDTGYYTCSSSKHPSQSALVTIVEKGFINATNSSEDYEIDQYEEFCFSVRFKAYPQIRCTWTFSRKSFPCEQKGLDNGYSISKFCNHKHQPGEYIFHAENDDAQFTKMFTLNIRRKPQVLAEASASQASCFSDGYPLPSWTWKKCSDKSPNCTEEITEGVWNRKANRKVFGQWVSSSTLNMSEAIKGFLVKCCAYNSLGTSCETILLNSPGPFPFIQDNISFYATIGVCLLFIVVLTLLICHKYKKQFRYESQLQMVQVTGSSDNEYFYVDFREYEYDLKWEFPRENLEFGKVLGSGAFGKVMNATAYGISKTGVSIQVAVKMLKEKADSSEREALMSELKMMTQLGSHENIVNLLGACTLSGPIYLIFEYCCYGDLLNYLRSKREKFHRTWTEIFKEHNFSFYPTFQSHPNSSMPGSREVQIHPDSDQISGLHGNSFHSEDEIEYENQKRLEEEEDLNVLTFEDLLCFAYQVAKGMEFLEFKSARLPVKWMAPESLFEGIYTIKSDVWSYGILLWEIFSLGVNPYPGIPVDANFYKLIQNGFKMDQPFYATEEIYIIMQSCWAFDSRKRPSFPNLTSFLGCQLADAEEAMYQNVDGRVSECPHTYQNRRPFSREMDLGLLSPQAQVEDS

SEQ ID NO: 46485 - protein, 750 aa, Homo sapiens
MWNLLHETDSAVATARRPRWLCAGALVLAGGFFLLGFLFGWFIKSSNEATNITPKHNMKAFLDELKAENIKKFLYNFTQIPHLAGTEQNFQLAKQIQSQWKEFGLDSVELAHYDVLLSYPNKTHPNYISIINEDGNEIFNTSLFEPPPPGYENVSDIVPPFSAFSPQGMPEGDLVYVNYARTEDFFKLERDMKINCSGKIVIARYGKVFRGNKVKNAQLAGAKGVILYSDPADYFAPGVKSYPDGWNLPGGGVQRGNILNLNGAGDPLTPGYPANEYAYRRGIAEAVGLPSIPVHPIGYYDAQKLLEKMGGSAPPDSSWRGSLKVPYNVGPGFTGNFSTQKVKMHIHSTNEVTRIYNVIGTLRGAVEPDRYVILGGHRDSWVFGGIDPQSGAAVVHEIVRSFGTLKKEGWRPRRTILFASWDAEEFGLLGSTEWAEENSRLLQERGVAYINADSSIEGNYTLRVDCTPLMYSLVHNLTKELKSPDEGFEGKSLYESWTKKSPSPEFSGMPRISKLGSGNDFEVFFQRLGIASGRARYTKNWETNKFSGYPLYHSVYETYELVEKFYDPMFKYHLTVAQVRGGMVFELANSIVLPFDCRDYAVVLRKYADKIYSISMKHPQEMKTYSVSFDSLFSAVKNFTEIASKFSERLQDFDKSNPIVLRMMNDQLMFLERAFIDPLGLPDRPFYRHVIYAPSSHNKYAGESFPGIYDALFDIESKVDPSKAWGEVKRQIYVAAFTVQAAAETLSEVA

SEQ ID NO: 46486 - protein, 735 aa, Homo sapiens
MTAGSSYPLFLAAYACTGCLAERLGWFIKSSNEATNITPKHNMKAFLDELKAENIKKFLYNFTQIPHLAGTEQNFQLAKQIQSQWKEFGLDSVELAHYDVLLSYPNKTHPNYISIINEDGNEIFNTSLFEPPPPGYENVSDIVPPFSAFSPQGMPEGDLVYVNYARTEDFFKLERDMKINCSGKIVIARYGKVFRGNKVKNAQLAGAKGVILYSDPADYFAPGVKSYPDGWNLPGGGVQRGNILNLNGAGDPLTPGYPANEYAYRRGIAEAVGLPSIPVHPIGYYDAQKLLEKMGGSAPPDSSWRGSLKVPYNVGPGFTGNFSTQKVKMHIHSTNEVTRIYNVIGTLRGAVEPDRYVILGGHRDSWVFGGIDPQSGAAVVHEIVRSFGTLKKEGWRPRRTILFASWDAEEFGLLGSTEWAEENSRLLQERGVAYINADSSIEGNYTLRVDCTPLMYSLVHNLTKELKSPDEGFEGKSLYESWTKKSPSPEFSGMPRISKLGSGNDFEVFFQRLGIASGRARYTKNWETNKFSGYPLYHSVYETYELVEKFYDPMFKYHLTVAQVRGGMVFELANSIVLPFDCRDYAVVLRKYADKIYSISMKHPQEMKTYSVSFDSLFSAVKNFTEIASKFSERLQDFDKSNPIVLRMMNDQLMFLERAFIDPLGLPDRPFYRHVIYAPSSHNKYAGESFPGIYDALFDIESKVDPSKAWGEVKRQIYVAAFTVQAAAETLSEVA

SEQ ID NO: 46487 - protein, 442 aa, Homo sapiens
MGGSAPPDSSWRGSLKVPYNVGPGFTGNFSTQKVKMHIHSTNEVTRIYNVIGTLRGAVEPDRYVILGGHRDSWVFGGIDPQSGAAVVHEIVRSFGTLKKEGWRPRRTILFASWDAEEFGLLGSTEWAEENSRLLQERGVAYINADSSIEGNYTLRVDCTPLMYSLVHNLTKELKSPDEGFEGKSLYESWTKKSPSPEFSGMPRISKLGSGNDFEVFFQRLGIASGRARYTKNWETNKFSGYPLYHSVYETYELVEKFYDPMFKYHLTVAQVRGGMVFELANSIVLPFDCRDYAVVLRKYADKIYSISMKHPQEMKTYSVSFDSLFSAVKNFTEIASKFSERLQDFDKSNPIVLRMMNDQLMFLERAFIDPLGLPDRPFYRHVIYAPSSHNKYAGESFPGIYDALFDIESKVDPSKAWGEVKRQIYVAAFTVQAAAETLSEVA

SEQ ID NO: 46488 - protein, 719 aa, Homo sapiens
MWNLLHETDSAVATARRPRWLCAGALVLAGGFFLLGFLFGWFIKSSNEATNITPKHNMKAFLDELKAENIKKFLYNFTQIPHLAGTEQNFQLAKQIQSQWKEFGLDSVELAHYDVLLSYPNKTHPNYISIINEDGNEIFNTSLFEPPPPGYENVSDIVPPFSAFSPQGMPEGDLVYVNYARTEDFFKLERDMKINCSGKIVIARYGKVFRGNKVKNAQLAGAKGVILYSDPADYFAPGVKSYPDGWNLPGGGVQRGNILNLNGAGDPLTPGYPANEYAYRRGIAEAVGLPSIPVHPIGYYDAQKLLEKMGGSAPPDSSWRGSLKVPYNVGPGFTGNFSTQKVKMHIHSTNEVTRIYNVIGTLRGAVEPDRYVILGGHRDSWVFGGIDPQSGAAVVHEIVRSFGTLKKEGWRPRRTILFASWDAEEFGLLGSTEWAEENSRLLQERGVAYINADSSIEGNYTLRVDCTPLMYSLVHNLTKELKSPDEGFEGKSLYESWTKKSPSPEFSGMPRISKLGSGNDFEVFFQRLGIASGRARYTKNWETNKFSGYPLYHSVYETYELVEKFYDPMFKYHLTVAQVRGGMVFELANSIVLPFDCRDYAVVLRKYADKIYSISMKHPQEMKTYSVSFDSLFSAVKNFTEIASKFSERLQDFDKSKHVIYAPSSHNKYAGESFPGIYDALFDIESKVDPSKAWGEVKRQIYVAAFTVQAAAETLSEVA

SEQ ID NO: 46489 - protein, 545 aa, Homo sapiens
MWNLLHETDSAVATARRPRWLCAGALVLAGGFFLLGFLFGWFIKSSNEATNITPKHNMKAFLDELKAENIKKFLYNFTQIPHLAGTEQNFQLAKQIQSQWKEFGLDSVELAHYDVLLSYPNKTHPNYISIINEDGNEIFNTSLFEPPPPGYENVSDIVPPFSAFSPQGMPEGDLVYVNYARTEDFFKLERDMKINCSGKIVIARYGKVFRGNKVKNAQLAGAKGVILYSDPADYFAPGVKSYPDGWNLPGGGVQRGNILNLNGAGDPLTPGYPANEYAYRRGIAEAVGLPSIPVHPIGYYDAQKLLEKMGGSAPPDSSWRGSLKVPYNVGPGFTGNFSTQKVKMHIHSTNEVTRIYNVIGTLRGAVEPDRYVILGGHRDSWVFGGIDPQSGAAVVHEIVRSFGTLKKEDILGWRPRRTILFASWDAEEFGLLGSTEWAEENSRLLQERGVAYINADSSIEGNYTLRVDCTPLMYSLVHNLTKELKSPDEGFEGKSLYESWTKKSPSPEFSGMPRISKLGSGNDFEVFFQRLGIASGRARYTKKKK

SEQ ID NO: 46490 - protein, 704 aa, Homo sapiens
MTAGSSYPLFLAAYACTGCLAERLGWFIKSSNEATNITPKHNMKAFLDELKAENIKKFLYNFTQIPHLAGTEQNFQLAKQIQSQWKEFGLDSVELAHYDVLLSYPNKTHPNYISIINEDGNEIFNTSLFEPPPPGYENVSDIVPPFSAFSPQGMPEGDLVYVNYARTEDFFKLERDMKINCSGKIVIARYGKVFRGNKVKNAQLAGAKGVILYSDPADYFAPGVKSYPDGWNLPGGGVQRGNILNLNGAGDPLTPGYPANEYAYRRGIAEAVGLPSIPVHPIGYYDAQKLLEKMGGSAPPDSSWRGSLKVPYNVGPGFTGNFSTQKVKMHIHSTNEVTRIYNVIGTLRGAVEPDRYVILGGHRDSWVFGGIDPQSGAAVVHEIVRSFGTLKKEGWRPRRTILFASWDAEEFGLLGSTEWAEENSRLLQERGVAYINADSSIEGNYTLRVDCTPLMYSLVHNLTKELKSPDEGFEGKSLYESWTKKSPSPEFSGMPRISKLGSGNDFEVFFQRLGIASGRARYTKNWETNKFSGYPLYHSVYETYELVEKFYDPMFKYHLTVAQVRGGMVFELANSIVLPFDCRDYAVVLRKYADKIYSISMKHPQEMKTYSVSFDSLFSAVKNFTEIASKFSERLQDFDKSKHVIYAPSSHNKYAGESFPGIYDALFDIESKVDPSKAWGEVKRQIYVAAFTVQAAAETLSEVA

SEQ ID NO: 46491 - protein, 257 aa, Homo sapiens
MAQRMTTQLLLLLVWVAVVGEAQTRIAWARTELLNVCMNAKHHKEKPGPEDKLHEQCRPWRKNACCSTNTSQEAHKDVSYLYRFNWNHCGEMAPACKRHFIQDTCLYECSPNLGPWIQQVDQSWRKERVLNVPLCKEDCEQWWEDCRTSYTCKSNWHKGWNWTSGFNKCAVGAACQPFHFYFPTPTVLCNEIWTHSYKVSNYSRGSGRCIQMWFDPAQGNPNEEVARFYAAAMSGAGPWAAWPFLLSLALMLLWLLS

SEQ ID NO: 46492 - protein, 257 aa, Homo sapiens; identical to SEQ ID NO: 46491

SEQ ID NO: 46493 - protein, 257 aa, Homo sapiens; identical to SEQ ID NO: 46491

SEQ ID NO: 46494 - protein, 257 aa, Homo sapiens; identical to SEQ ID NO: 46491

SEQ ID NO: 46495 - protein, 255 aa, Homo sapiens
MVWKWMPLLLLLVCVATMCSAQDRTDLLNVCMDAKHHKTKPGPEDKLHDQCSPWKKNACCTASTSQELHKDTSRLYNFNWDHCGKMEPACKRHFIQDTCLYECSPNLGPWIQQVNQSWRKERFLDVPLCKEDCQRWWEDCHTSHTCKSNWHRGWDWTSGVNKCPAGALCRTFESYFPTPAALCEGLWSHSYKVSNYSRGSGRCIQMWFDSAQGNPNEEVARFYAAAMHVNAGEMLHGTGGLLLSLALMLQLWLLG

SEQ ID NO: 46496 - protein, 242 aa, Homo sapiens
MLPAATEVQLRLQGQKDMVWKWMPLLLLLVCVATMCSAQDRTDLLNVCMDAKHHKTKPGPEDKLHDQCSPWKKNACCTASTSQELHKDTSRLYNFNWDHCGKMEPACATSSRTPVSMSAHPGALDPAGESELAKNASWMCPYAKRTVSAGGRIVTPPTRARATGTEDGTGPQELTSAQLGLSAAPLSPTSPLQLPFVKASGVTHTRSATTAEGAAAASRCGLIQPRATPTRKWRGSMLQPCM

SEQ ID NO: 46497 - protein, 171 aa, Homo sapiens
MVWKWMPLLLLLVCVATMCSAQDRTDLLNVCMDAKHHKTKPGPEDKLHDQCSPWKKNACCTASTSQELHKDTSRLYNFNWDHCGKMEPACKRHFIQDTCLYECSPNLGPWIQQVNQSWRKERFLDVPLCKEDCQRWWEDCHTSHTCKSNWHRGWDWTSGVNKCPAGALCRT

SEQ ID NO: 46498 - protein, 669 aa, Homo sapiens
MALLLVSLLAFLSLGSGCHHRICHCSNRVFLCQESKVTEIPSDLPRNAIELRFVLTKLRVIQKGAFSGFGDLEKIEISQNDVLEVIEADVFSNLPKLHEIRIEKANNLLYINPEAFQNLPNLQYLLISNTGIKHLPDVHKIHSLQKVLLWLNKNGIQEIHNCAFNGTQLDELNLSDNNNLEELPNDVFHGASGPVILDISRTRIHSLPSYGLENLKKLRARSTYNLKKLPTLEKLVALMEASLTYPSHCCAFANWRRQISELHPICNKSILRQEVDYMTQARGQRSSLAEDNESSYSRGFDMTYTEFDYDLCNEVVDVTCSPKPDAFNPCEDIMGYNILRVLIWFISILAITGNIIVLVILTTSQYKLTVPRFLMCNLAFADLCIGIYLLLIASVDIHTKSQYHNYAIDWQTGAGCDAAGFFTVFASELSVYTLTAITLERWHTITHAMQLDCKVQLRHAASVMVMGWIFAFAAALFPIFGISSYMKVSICLPMDIDSPLSQLYVMSLLVLNVLAFVVICGCYIHIYLTVRNPNIVSSSSDTRIAKRMAMLIFTDFLCMAPISFFAISASLKVPLITVSKAKILLVLFHPINSCANPFLYAIFTKNFRRDFFILLSKCGCYEMQAQIYRTETSSTVHNTHPRNGHCSSAPRVTSGSTYILVPLSHLAQN

SEQ ID NO: 46499 - protein, 633 aa, Homo sapiens
MALLLVSLLAFLSLGSGCHHRICHCSNRVFLCQESKVTEIPSDLPRNAIELRFVLTKLRVIQKGAFSGFGDLEKIEISQNDVLEVIEADVFSNLPKLHEIRIEKANNLLYINPEAFQNLPNLQYLLISNTGIKHLPDVHKIHSLQKVLLDIQDNINIHTIERNSFVGLSFESVILWLNKNGIQEIHNCAFNGTQLDELNLSDNNNLEELPNDVFHGASGPVILSELHPICNKSILRQEVDYMTQARGQRSSLAEDNESSYSRGFDMTYTEFDYDLCNEVVDVTCSPKPDAFNPCEDIMGYNILRVLIWFISILAITGNIIVLVILTTSQYKLTVPRFLMCNLAFADLCIGIYLLLIASVDIHTKSQYHNYAIDWQTGAGCDAAGFFTVFASELSVYTLTAITLERWHTITHAMQLDCKVQLRHAASVMVMGWIFAFAAALFPIFGISSYMKVSICLPMDIDSPLSQLYVMSLLVLNVLAFVVICGCYIHIYLTVRNPNIVSSSSDTRIAKRMAMLIFTDFLCMAPISFFAISASLKVPLITVSKAKILLVLFHPINSCANPFLYAIFTKNFRRDFFILLSKCGCYEMQAQIYRTETSSTVHNTHPRNGHCSSAPRVTSGSTYILVPLSHLAQN

SEQ ID NO: 46500 - protein, 695 aa, Homo sapiens
MALLLVSLLAFLSLGSGCHHRICHCSNRVFLCQESKVTEIPSDLPRNAIELRFVLTKLRVIQKGAFSGFGDLEKIEISQNDVLEVIEADVFSNLPKLHEIRIEKANNLLYINPEAFQNLPNLQYLLISNTGIKHLPDVHKIHSLQKVLLDIQDNINIHTIERNSFVGLSFESVILWLNKNGIQEIHNCAFNGTQLDELNLSDNNNLEELPNDVFHGASGPVILDISRTRIHSLPSYGLENLKKLRARSTYNLKKLPTLEKLVALMEASLTYPSHCCAFANWRRQISELHPICNKSILRQEVDYMTQARGQRSSLAEDNESSYSRGFDMTYTEFDYDLCNEVVDVTCSPKPDAFNPCEDIMGYNILRVLIWFISILAITGNIIVLVILTTSQYKLTVPRFLMCNLAFADLCIGIYLLLIASVDIHTKSQYHNYAIDWQTGAGCDAAGFFTVFASELSVYTLTAITLERWHTITHAMQLDCKVQLRHAASVMVMGWIFAFAAALFPIFGISSYMKVSICLPMDIDSPLSQLYVMSLLVLNVLAFVVICGCYIHIYLTVRNPNIVSSSSDTRIAKRMAMLIFTDFLCMAPISFFAISASLKVPLITVSKAKILLVLFHPINSCANPFLYAIFTKNFRRDFFILLSKCGCYEMQAQIYRTETSSTVHNTHPRNGHCSSAPRVTSGSTYILVPLSHLAQN

SEQ ID NO: 46501 - protein, 431 aa, Homo sapiens
MEASLTYPSHCCAFANWRRQISELHPICNKSILRQEVDYMTQARGQRSSLAEDNESSYSRGFDMTYTEFDYDLCNEVVDVTCSPKPDAFNPCEDIMGYNILRVLIWFISILAITGNIIVLVILTTSQYKLTVPRFLMCNLAFADLCIGIYLLLIASVDIHTKSQYHNYAIDWQTGAGCDAAGFFTVFASELSVYTLTAITLERWHTITHAMQLDCKVQLRHAASVMVMGWIFAFAAALFPIFGISSYMKVSICLPMDIDSPLSQLYVMSLLVLNVLAFVVICGCYIHIYLTVRNPNIVSSSSDTRIAKRMAMLIFTDFLCMAPISFFAISASLKVPLITVSKAKILLVLFHPINSCANPFLYAIFTKNFRRDFFILLSKCGCYEMQAQIYRTETSSTVHNTHPRNGHCSSAPRVTSGSTYILVPLSHLAQN

SEQ ID NO: 46502 - protein, 1138 aa, Homo sapiens
MAPTLFQKLFSKRTGLGAPGRDARDPDCGFSWPLPEFDPSQIRLIVYQDCERRGRNVLFDSSVKRRNEDISVSKLGSDAQVKVFGKCCQLKPGGDSSSSLDSSVTSSSDIKDQCLKYQGSRCSSDANMLGEMMFGSVAMSYKGSTLKIHQIRSPPQLMLSKVFTARTGSSICGSLNTLQDSLEFINQDNNTLKADNNTVINGLLGNIVHSNPMDMPGRELNEDRDSGIARSASLSSLLITPFPSPNSSLTRSCASSYQRRWRRSQTTSLENGVFPRWSIEESFNLSDESCGPNPGIVRKKKIAIGVIFSLSKDEDENNKFNEFFFSHFPLFESHMNKLKSAIEQAMKMSRRSADASQRSLAYNRIVDALNEFRTTICNLYTMPRIGEPVWLTMMSGTPEKNHLCYRFMKEFTFLMENASKNQFLPALITAVLTNHLAWVPTVMPNGQPPIKIFLEKHSSQSVDMLAKTHPYNPLWAQLGDLYGAIGSPVRLARTVVVGKRQDMVQRLLYFLTYFIRCSELQETHLLENGEDEAIVMPGTVITTTLEKGEIEESEYVLVTMHRNKSSLLFKESEEIRTPNCNCKYCSHPLLGQNVENISQQEREDIQNSSKELLGISDECQMISPSDCQEENAVDVKQYRDKLRTCFDAKLETVVCTGSVPVDKCALSESGLESTEETWQSEKLLDSDSHTGKAMRSTGMVVEKKPPDKIVPASFSCEAAQTKVTFLIGDSMSPDSDTELRSQAVVDQITRHHTKPLKEERGAIDQHQETKQTTKDQSGESDTQNMVSEEPCELPCWNHSDPESMSLFDEYFNDDSIETRTIDDVPFKTSTDSKDHCCMLEFSKILCTKNNKQNNEFCKCIETVPQDSCKTCFPQQDQRDTLSILVPHGDKESSDKKIAVGTEWDIPRNESSDSALGDSESEDTGHDMTRQVSSYYGGEQEDWAEEDEIPFPGSKLIEVSAVQPNIANFGRSLLGGYCSSYVPDFVLQGIGSDERFRQCLMSDLSHAVQHPVLDEPIAEAVCIIADMDKWTVQVASSQRRVTDNKLGKEVLVSSLVSNLLHSTLQLYKHNLSPNFCVMHLEDRLQELYFKSKMLSEYLRGQMRVHVKELGVVLGIESSDLPLLAAVASTHSPYVAQILL

SEQ ID NO: 46503 - protein, 1166 aa, Homo sapiens
MAPTLFQKLFSKRTGLGAPGRDARDPDCGFSWPLPEFDPSQIRLIVYQDCERRGRNVLFDSSVKRRNEDISVSKLGSDAQVKVFGKCCQLKPGGDSSSSLDSSVTSSSDIKDQCLKYQGSRCSSDANMLGEMMFGSVAMSYKGSTLKIHQIRSPPQLMLSKVFTARTGSSICGSLNTLQDSLEFINQDNNTLKADNNTVINGLLGNIGLSQFCSPRRAFSEQGPLRLIRSASFFAVHSNPMDMPGRELNEDRDSGIARSASLSSLLITPFPSPNSSLTRSCASSYQRRWRRSQTTSLENGVFPRWSIEESFNLSDESCGPNPGIVRKKKIAIGVIFSLSKDEDENNKFNEFFFSHFPLFESHMNKLKSAIEQAMKMSRRSADASQRSLAYNRIVDALNEFRTTICNLYTMPRIGEPVWLTMMSGTPEKNHLCYRFMKEFTFLMENASKNQFLPALITAVLTNHLAWVPTVMPNGQPPIKIFLEKHSSQSVDMLAKTHPYNPLWAQLGDLYGAIGSPVRLARTVVVGKRQDMVQRLLYFLTYFIRCSELQETHLLENGEDEAIVMPGTVITTTLEKGEIEESEYVLVTMHRNKSSLLFKESEEIRTPNCNCKYCSHPLLGQNVENISQQEREDIQNSSKELLGISDECQMISPSDCQEENAVDVKQYRDKLRTCFDAKLETVVCTGSVPVDKCALSESGLESTEETWQSEKLLDSDSHTGKAMRSTGMVVEKKPPDKIVPASFSCEAAQTKVTFLIGDSMSPDSDTELRSQAVVDQITRHHTKPLKEERGAIDQHQETKQTTKDQSGESDTQNMVSEEPCELPCWNHSDPESMSLFDEYFNDDSIETRTIDDVPFKTSTDSKDHCCMLEFSKILCTKNNKQNNEFCKCIETVPQDSCKTCFPQQDQRDTLSILVPHGDKESSDKKIAVGTEWDIPRNESSDSALGDSESEDTGHDMTRQVSSYYGGEQEDWAEEDEIPFPGSKLIEVSAVQPNIANFGRSLLGGYCSSYVPDFVLQGIGSDERFRQCLMSDLSHAVQHPVLDEPIAEAVCIIADMDKWTVQVASSQRRVTDNKLGKEVLVSSLVSNLLHSTLQLYKHNLSPNFCVMHLEDRLQELYFKSKMLSEYLRGQMRVHVKELGVVLGIESSDLPLLAAVASTHSPYVAQILL

SEQ ID NO: 46504 - protein, 508 aa, Homo sapiens
MAPTLFQKLFSKRTGLGAPGRDARDPDCGFSWPLPEFDPSQIRLIVYQDCERRGRNVLFDSSVKRRNEDISVSKLGSDAQVKVFGKCCQLKPGGDSSSSLDSSVTSSSDIKDQCLKYQGSRCSSDANMLGEMMFGSVAMSYKGSTLKIHQIRSPPQLMLSKVFTARTGSSICGSLNTLQDSLEFINQDNNTLKADNNTVINGLLGNIGLSQFCSPRRAFSEQGPLRLIRSASFFAVHSNPMDMPGRELNEDRDSGIARSASLSSLLITPFPSPNSSLTRSCASSYQRRWRRSQTTSLENGVFPRWSIEESFNLSDESCGPNPGIVRKKKIAIGVIFSLSKDEDENNKFNEFFFSHFPLFESHMNKLKSAIEQAMKMSRRSADASQRSLAYNRIVDALNEFRTTICNLYTMPRIGEPVWLTMMSGTPEKNHLCYRFMKEFTFLMENASKNQFLPALITAVLTNHLAWVPTVMPNGQPPIKIFLEKHSSQSVDMLAKTHPYNPLWAQLGM

SEQ ID NO: 46505 - protein, 918 aa, Homo sapiens
MDMPGRELNEDRDSGIARSASLSSLLITPFPSPNSSLTRSCASSYQRRWRRSQTTSLENGVFPRWSIEESFNLSDESCGPNPGIVRKKKIAIGVIFSLSKDEDENNKFNEFFFSHFPLFESHMNKLKSAIEQAMKMSRRSADASQRSLAYNRIVDALNEFRTTICNLYTMPRIGEPVWLTMMSGTPEKNHLCYRFMKEFTFLMENASKNQFLPALITAVLTNHLAWVPTVMPNGQPPIKIFLEKHSSQSVDMLAKTHPYNPLWAQLGDLYGAIGSPVRLARTVVVGKRQDMVQRLLYFLTYFIRCSELQETHLLENGEDEAIVMPGTVITTTLEKGEIEESEYVLVLLFKESEEIRTPNCNCKYCSHPLLGQNVENISQQEREDIQNSSKELLGISDECQMISPSDCQEENAVDVKQYRDKLRTCFDAKLETVVCTGSVPVDKCALSESGLESTEETWQSEKLLDSDSHTGKAMRSTGMVVEKKPPDKIVPASFSCEAAQTKVTFLIGDSMSPDSDTELRSQAVVDQITRHHTKPLKEERGAIDQHQETKQTTKDQSGESDTQNMVSEEPCELPCWNHSDPESMSLFDEYFNDDSIETRTIDDVPFKTSTDSKDHCCMLEFSKILCTKNNKQNNEFCKCIETVPQDSCKTCFPQQDQRDTLSILVPHGDKESSDKKIAVGTEWDIPRNESSDSALGDSESEDTGHDMTRQVSSYYGGEQEDWAEEDEIPFPGSKLIEVSAVQPNIANFGRSLLGGYCSSYVPDFVLQGIGSDERFRQCLMSDLSHAVQHPVLDEPIAEAVCIIADMDKWTVQVASSQRRVTDNKLGKEVLVSSLVSNLLHSTLQLYKHNLSPNFCVMHLEDRLQELYFKSKMLSEYLRGQMRVHVKELGVVLGIESSDLPLLAAVASTHSPYVAQILL

SEQ ID NO: 46506 - protein, 1114 aa, Homo sapiens
MAPTLLQKLFNKRGSSGSSAAASAQGRAPKEGPAFSWSCSEFDLNEIRLIVYQDCDRRGRQVLFDSKAVQKIEEVTAQKTEDVPIKISAKCCQGSSSVSSSSSSSISSHSSSGGSSHHAKEQLPKYQYTRPASDVNMLGEMMFGSVAMSYKGSTLKIHYIRSPPQLMISKVFSARMGSFCGSTNNLQDSFEYINQDPNLGKLNTNQNSLGPCRTGSNLAHSTPVDMPSRGQNEDRDSGIARSASLSSLLITPFPSPSSSTSSSSSYQRRWLRSQTTSLENGIIPRRSTDETFSLAEETCSSNPAMVRRKKIAISIIFSLCEKEEAQRNFQDFFFSHFPLFESHMNRLKSAIEKAMISCRKIAESSLRVQFYVSRLMEALGEFRGTIWNLYSVPRIAEPVWLTMMSGTLEKNQLCQRFLKEFTLLIEQINKNQFFAALLTAVLTYHLAWVPTVMPVDHPPIKAFSEKRTSQSVNMLAKTHPYNPLWAQLGDLYGAIGSPVRLTRTVVVGKQKDLVQRILYVLTYFLRCSELQENQLTWSGNHGEGDQVLNGSKIITALEKGEVEESEYVVITVRNEPALVPPILPPTAAERHNPWPTGFPECPEGTDSRDLGLKPDKEANRRPEQGSEACSAGCLGPASDASWKPQNAFCGDEKNKEAPQDGSSRLPSCEVLGAGMKMDQQAVCELLKVEMPTRLPDRSVAWPCPDRHLREKPSLEKVTFQIGSFASPESDFESRMKKMEERVKACGPSLEASEAADVAQDPQVSRSPFKPGFQENVCCPQNRLSEGDEGESDKGFAEDRGSRNDMAADIAGQLSHAADLGTASHGAGGTGGRRLEATRGLYVKAAEGPVLEPVAPRCVQRGPGLVAGANIPCGDDNKKANFRTEGDIPRNESSDSALGDSDDEACASAMLDLGHGGDRTGGSLEVELPLPRSQSISTQNVRNFGRSLLAGYCPTYMPDLVLHGTGSDEKLKQCLVADLVHTVHHPVLDEPIAEAVCIIADTDKWSVQVATSQRKVTDNMKLGQDVLVSSQVSSLLQSILQLYKLHLPADFCIMHLEDRLQEMYLKSKMLSEYLRGHTRVHVKELGVVLGIESNDLPLLTAIASTHSPYVAQILL

SEQ ID NO: 46507 - protein, 1137 aa, Homo sapiens
MCGGTANTTNQPESWQDSARCVSDAVPGAGRIYRALLCTKIKKHTGVDRSTDHTELDNSWSCSEFDLNEIRLIVYQDCDRRGRQVLFDSKAVQKIEEVTAQKTEDVPIKISAKCCQGSSSVSSSSSSSISSHSSSGGSSHHAKEQLPKYQYTRPASDVNMLGEMMFGSVAMSYKGSTLKIHYIRSPPQLMISKVFSARMGSFCGSTNNLQDSFEYINQDPNLGKLNTNQNSLGPCRTGSNLAHSTPVDMPSRGQNEDRDSGIARSASLSSLLITPFPSPSSSTSSSSSYQRRWLRSQTTSLENGIIPRRSTDETFSLAEETCSSNPAMVRRKKIAISIIFSLCEKEEAQRNFQDFFFSHFPLFESHMNRLKSAIEKAMISCRKIAESSLRVQFYVSRLMEALGEFRGTIWNLYSVPRIAEPVWLTMMSGTLEKNQLCQRFLKEFTLLIEQINKNQFFAALLTAVLTYHLAWVPTVMPVDHPPIKAFSEKRTSQSVNMLAKTHPYNPLWAQLGDLYGAIGSPVRLTRTVVVGKQKDLVQRILYVLTYFLRCSELQENQLTWSGNHGEGDQVLNGSKIITALEKGEVEESEYVVITVRNEPALVPPILPPTAAERHNPWPTGFPECPEGTDSRDLGLKPDKEANRRPEQGSEACSAGCLGPASDASWKPQNAFCGDEKNKEAPQDGSSRLPSCEVLGAGMKMDQQAVCELLKVEMPTRLPDRSVAWPCPDRHLREKPSLEKVTFQIGSFASPESDFESRMKKMEERVKACGPSLEASEAADVAQDPQVSRSPFKPGFQENVCCPQNRLSEGDEGESDKGFAEDRGSRNDMAADIAGQLSHAADLGTASHGAGGTGGRRLEATRGLYVKAAEGPVLEPVAPRCVQRGPGLVAGANIPCGDDNKKANFRTEGDIPRNESSDSALGDSDDEACASAMLDLGHGGDRTGGSLEVELPLPRSQSISTQNVRNFGRSLLAGYCPTYMPDLVLHGTGSDEKLKQCLVADLVHTVHHPVLDEPIAEAVCIIADTDKWSVQVATSQRKVTDNMKLGQDVLVSSQVSSLLQSILQLYKLHLPADFCIMHLEDRLQEMYLKSKMLSEYLRGHTRVHVKELGVVLGIESNDLPLLTAIASTHSPYVAQILL

SEQ ID NO: 46508 - protein, 673 aa, Homo sapiens
MCGGTANTTNQPESWQDSARCVSDAVPGAGRIYRALLCTKIKKHTGVDRSTDHTELDNSWSCSEFDLNEIRLIVYQDCDRRGRQVLFDSKAVQKIEEVTAQKTEDVPIKISAKCCQGSSSVSSSSSSSISSHSSSGGSSHHAKEQLPKYQYTRPASDVNMLGEMMFGSVAMSYKGSTLKIHYIRSPPQLMISKVFSARMGSFCGSTNNLQDSFEYINQDPNLGKLNTNQNSLGPCRTGSNLAHSTPVDMPSRGQNEDRDSGIARSASLSSLLITPFPSPSSSTSSSSSYQRRWLRSQTTSLENGIIPRRSTDETFSLAEETCSSNPAMVRRKKIAISIIFSLCEKEEAQRNFQDFFFSHFPLFESHMNRLKSAIEKAMISCRKIAESSLRVQFYVSRLMEALGEFRGTIWNLYSVPRIAEPVWLTMMSGTLEKNQLCQRFLKEFTLLIEQINKNQFFAALLTAVLTYHLAWVPTVMPVDHPPIKAFSEKRTSQSVNMLAKTHPYNPLWAQLGDLYGAIGSPVRLTRTVVVGKQKDLVQRILYVLTYFLRCSELQENQLTWSGNHGEGDQVLNGSKIITALEKGEVEESEYVVITVRNEPALVPPILPPTAAERHNPWPTGFPECPEGTDSRDLGLKPDKEANRRPEQGSEACSAGCLGPASDASWKPQNAFCG

SEQ ID NO: 46509 - protein, 219 aa, Homo sapiens
MDPAPGVLDPRAAPPALLGTPQAEVLEDVLREQFGPLPQLAAVCRLKRLPSGGYSSTENLQLVLERRRVANAKERERIKNLNRGFARLKALVPFLPQSRKPSKVDILKGATEYIQVLSDLLEGAKDSKKQDPDEQSYSNNSSESHTSSARQLSRNITQHISCAFGLKNEEEGPWADGGSGEPAHACRHSVMSTTEIISPTRSLDRFPEVELLSHRLPQV

SEQ ID NO: 46510 - protein, 344 aa, Homo sapiens
MVRARHQPGGLCLLLLLLCQFMEDRSAQAGNCWLRQAKNGRCQVLYKTELSKEECCSTGRLSTSWTEEDVNDNTLFKWMIFNGGAPNCIPCKETCENVDCGPGKKCRMNKKNKPRCVCAPDCSNITWKGPVCGLDGKTYRNECALLKARCKEQPELEVQYQGRCKKTCRDVFCPGSSTCVVDQTNNAYCVTCNRICPEPASSEQYLCGNDGVTYSSACHLRKATCLLGRSIGLAYEGKCIKAKSCEDIQCTGGKKCLWDFKVGRGRCSLCDELCPDSKSDEPVCASDNATYASECAMKEAACSSGVLLEVKHSGSCNSISEDTEEEEEDEDQDYSFPISSILEW

SEQ ID NO: 46511 - protein, 317 aa, Homo sapiens
MVRARHQPGGLCLLLLLLCQFMEDRSAQAGNCWLRQAKNGRCQVLYKTELSKEECCSTGRLSTSWTEEDVNDNTLFKWMIFNGGAPNCIPCKETCENVDCGPGKKCRMNKKNKPRCVCAPDCSNITWKGPVCGLDGKTYRNECALLKARCKEQPELEVQYQGRCKKTCRDVFCPGSSTCVVDQTNNAYCVTCNRICPEPASSEQYLCGNDGVTYSSACHLRKATCLLGRSIGLAYEGKCIKAKSCEDIQCTGGKKCLWDFKVGRGRCSLCDELCPDSKSDEPVCASDNATYASECAMKEAACSSGVLLEVKHSGSCN

SEQ ID NO: 46512 - protein, 340 aa, Homo sapiens
MVRARHQPGGLCLLLLLLCQFMEDRSAQAGNCWLRQAKNGRCQVLYKTELSKEECCSTGRLSTSWTEEDVNDNTLFKWMIFNGGAPNCIPCKETCENVDCGPGKKCRMNKKNKPRCVCAPDCSNITWKGPVCGLDGKTYRNECALLKARCKEQPELEVQYQGRCKKTCRDVFCPGSSTCVVDQTNNAYCVTCNRICPEPASSEQYLCGNDGVTYSSACHLRKATCLLGRSIGLAYEGKCIKAKSCEDIQCTGGKKCLWDFKVGRGRCSLCDELCPDSKSDEPVCASDNATYASECAMKEAACSSGVLLEVKHSGSCNYTEEEEEDEDQDYSFPISSILEW

SEQ ID NO: 46513 - protein, 308 aa, Homo sapiens
MWKRWLALALALVAVAWVRAEEELRSKSKICANVFCGAGRECAVTEKGEPTCLCIEQCKPHKRPVCGSNGKTYLNHCELHRDACLTGSKIQVDYDGHCKEKKSVSPSASPVVCYQSNRDELRRRIIQWLEAEIIPDGWFSKGSNYSEILDKYFKNFDNGDSRLDSSEFLKFVEQNETAINITTYPDQENNKLLRGLCVDALIELSDENADWKLSFQEFLKCLNPSFNPPEKKCALEDETYADGAETEVDCNRCVCACGNWVCTAMTCDGKNQKGAQTQTEEEMTRYVQELQKHQETAEKTKRVSTKEI

SEQ ID NO: 46514 - protein, 140 aa, Homo sapiens
MWKRWLALALALVAVAWVRAEEELRSKSKICANVFCGAGRECAVTEKGEPTCLCIEQCKPHKRPVCGSNGKTYLNHCELHRDACLTGSKIQVDYDGHCKEKKSVSPSASPVVCYQSNRDELRRRIIQWLEAEIIPDGWFS

SEQ ID NO: 46515 - protein, 251 aa, Homo sapiens
MCFVEPAGNVQSQRKGNPPVSALSNANLTGSKIQVDYDGHCKEKKSVSPSASPVVCYQSNRDELRRRIIQWLEAEIIPDGWFSKGSNYSEILDKYFKNFDNGDSRLDSSEFLKFVEQNETAINITTYPDQENNKLLRGLCVDALIELSDENADWKLSFQEFLKCLNPSFNPPEKKCALEDETYADGAETEVDCNRCVCACGNWVCTAMTCDGKNQKGAQTQTEEEMTRYVQELQKHQETAEKTKRVSTKEI

SEQ ID NO: 46516 - protein, 263 aa, Homo sapiens
MRPGAPGPLWPLPWGALAWAVGFVSSMGSGNPAPGGVCWLQQGQEATCSLVLQTDVTRAECCASGNIDTAWSNLTHPGNKINLLGFLGLVHCLPCKDSCDGVECGPGKACRMLGGRPRCECAPDCSGLPARLQVCGSDGATYRDECELRAARCRGHPDLSVMYRGRCRKSCEHVVCPRPQSCVVDQTGSAHCVVCRAAPCPVPSSPGQELCGNNNVTYISSCHMRQATCFLGRSIGVRHAGSCAGTPEEPPGGESAEEEENFV

SEQ ID NO: 46517 - protein, 537 aa, Homo sapiens
MLNTLQTNAGYLEQVKRQRGDPQTQLEAMELYLARSGLQVEDLDRLNIIHVTGTKGKGSTCAFTECILRSYGLKTGFFSSPHLVQVRERIRINGQPISPELFTKYFWRLYHRLEETKDGSCVSMPPYFRFLTLMAFHVFLQEKVDLAVVEVGIGGAYDCTNIIRKPVVCGVSSLGIDHTSLLGDTVEKIAWQKGGIFKQGVPAFTVLQPEGPLAVLRDRAQQISCPLYLCPMLEALEEGGPPLTLGLEGEHQRSNAALALQLAHCWLQRQDRHGAGEPKASRPGLLWQLPLAPVFQPTSHMRLGLRNTEWPGRTQVLRRGPLTWYLDGAHTASSAQACVRWFRQALQGRERPSGGPEVRVLLFNATGDRDPAALLKLLQPCQFDYAVFCPNLTEVSSTGNADQQNFTVTLDQVLLRCLEHQQHWNHLDEEQASPDLWSAPSPEPGGSASLLLAPHPPHTCSASSLVFSCISHALQWISQGRDPIFQPPSPPKGLLTHPVAHSGASILREAAAIHVLVTGSLHLVGGVLKLLEPALSQ

SEQ ID NO: 46518 - protein, 375 aa, Homo sapiens
MSRARSHLRAALFLAAASARGITTQVAARRGLSAWPVPQEPSMEYQDAVRMLNTLQTNAGYLEQVKRQRGDPQTQLEAMELYLARSGLQVEDLDRLNIIHVTGTKGKGSTCAFTECILRSYGLKTGFFSSPHLVQVRERIRINGQPISPELFTKYFWRLYHRLEETKDGSCVSMPPYFRFLTLMAFHVFLQEKVDLAVVEVGIGGAYDCTNIIRKPVVCGVSSLGIDHTSLLGDTVEKIAWQKGGIFKQGVPAFTVLQPEGPLAVLRDRAQQISVLGSQRHPGQGSCGSCPWHLCSSPHPTCGSGFGTRSGRAGRRCCGAGPSPGTWTVRTPPAARRPACAGSARRCRAARGRAVAPRFESCSSMLPGTGTRRPC

SEQ ID NO: 46519 - protein, 375 aa, Homo sapiens; identical to SEQ ID NO: 46518

SEQ ID NO: 46520 - protein, 587 aa, Homo sapiens
MSRARSHLRAALFLAAASARGITTQVAARRGLSAWPVPQEPSMEYQDAVRMLNTLQTNAGYLEQVKRQRGDPQTQLEAMELYLARSGLQVEDLDRLNIIHVTGTKGKGSTCAFTECILRSYGLKTGFFSSPHLVQVRERIRINGQPISPELFTKYFWRLYHRLEETKDGSCVSMPPYFRFLTLMAFHVFLQEKVDLAVVEVGIGGAYDCTNIIRKPVVCGVSSLGIDHTSLLGDTVEKIAWQKGGIFKQGVPAFTVLQPEGPLAVLRDRAQQISCPLYLCPMLEALEEGGPPLTLGLEGEHQRSNAALALQLAHCWLQRQDRHGAGEPKASRPGLLWQLPLAPVFQPTSHMRLGLRNTEWPGRTQVLRRGPLTWYLDGAHTASSAQACVRWFRQALQGRERPSGGPEVRVLLFNATGDRDPAALLKLLQPCQFDYAVFCPNLTEVSSTGNADQQNFTVTLDQVLLRCLEHQQHWNHLDEEQASPDLWSAPSPEPGGSASLLLAPHPPHTCSASSLVFSCISHALQWISQGRDPIFQPPSPPKGLLTHPVAHSGASILREAAAIHVLVTGSLHLVGGVLKLLEPALSQ

SEQ ID NO: 46521 - protein, 561 aa, Homo sapiens
MSRARSHLRAALFLAAASARGITTQVAARRGLSAWPVPQEPSMEYQDAVRMLNTLQTNAGYLEQVKRQRGDPQTQLEAMELYLARSGLQVEDLDRLNIIHVTGTKGKGSTCAFTECILRSYGLKTGFFSSPHLVQVRERIRINGQPISPELFTKYFWRLYHRLEETKVDLAVVEVGIGGAYDCTNIIRKPVVCGVSSLGIDHTSLLGDTVEKIAWQKGGIFKQGVPAFTVLQPEGPLAVLRDRAQQISCPLYLCPMLEALEEGGPPLTLGLEGEHQRSNAALALQLAHCWLQRQDRHGAGEPKASRPGLLWQLPLAPVFQPTSHMRLGLRNTEWPGRTQVLRRGPLTWYLDGAHTASSAQACVRWFRQALQGRERPSGGPEVRVLLFNATGDRDPAALLKLLQPCQFDYAVFCPNLTEVSSTGNADQQNFTVTLDQVLLRCLEHQQHWNHLDEEQASPDLWSAPSPEPGGSASLLLAPHPPHTCSASSLVFSCISHALQWISQGRDPIFQPPSPPKGLLTHPVAHSGASILREAAAIHVLVTGSLHLVGGVLKLLEPALSQ

SEQ ID NO: 46522 - protein, 194 aa, Homo sapiens
MLNTLQTNAGYLEQVKRQRGDPQTQLEAMELYLARSGLQVEDLDRLNIIHVTGTKGKGSTCAFTECILRSYGLKTGFFSSPHLVQVRERIRINGQPISPELFTKYFWRLYHRLEETKVDLAVVEVGIGGAYDCTNIIRKPVVCGVSSLGIDHTSLLGDTVEKIAWQKGGIFKQGVPAFTVLQPEGPLAVLRDRA

SEQ ID NO: 46523 - protein, 265 aa, Homo sapiens
MLNTLQTNAGYLEQVKRQRGDPQTQLEAMELYLARSGLQVEDLDRLNIIHVTGTKGKGSTCAFTECILRSYGLKTGFFSSPHLVQVRERIRINGQPISPELFTKYFWRLYHRLEETKDGSCVSMPPYFRFLTLMAFHVFLQEKVDLAVVEVGIGGAYDCTNIIRKPVVCGVSSLGIDHTSLLGDTVEKIAWQKGGIFKQGVPAFTVLQPEGPLAVLRDRAQQISVLGSQRHPGQGSCGSCPWHLCSSPHPTCGSGFGTRSGRAGR

SEQ ID NO: 46524 - protein, 463 aa, Homo sapiens
MHSASSMLGAVKMEGHEPSDWSSYYAEPEGYSSVSNMNAGLGMNGMNTYMSMSAAAMGSGSGNMSAGSMNMSSYVGAGMSPSLAGMSPGAGAMAGMGGSAGAAGVAGMGPHLSPSLSPLGGQAAGAMGGLAPYANMNSMSPMYGQAGLSRARDPKTYRRSYTHAKPPYSYISLITMAIQQSPNKMLTLSEIYQWIMDLFPFYRQNQQRWQNSIRHSLSFNDCFLKVPRSPDKPGKGSFWTLHPDSGNMFENGCYLRRQKRFKCEKQLALKEAAGAAGSGKKAAAGAQASQAQLGEAAGPASETPAGTESPHSSASPCQEHKRGGLGELKGTPAAALSPPEPAPSPGQQQQAAAHLLGPPHHPGLPPEAHLKPEHHYAFNHPFSINNLMSSEQQHHHSHHHHQPHKMDLKAYEQVMHYPGYGSPMPGSLAMGPVTNKTGLDASPLAADTSYYQGVYSRPIMNSS

SEQ ID NO: 46525 - protein, 457 aa, Homo sapiens
MLGAVKMEGHEPSDWSSYYAEPEGYSSVSNMNAGLGMNGMNTYMSMSAAAMGSGSGNMSAGSMNMSSYVGAGMSPSLAGMSPGAGAMAGMGGSAGAAGVAGMGPHLSPSLSPLGGQAAGAMGGLAPYANMNSMSPMYGQAGLSRARDPKTYRRSYTHAKPPYSYISLITMAIQQSPNKMLTLSEIYQWIMDLFPFYRQNQQRWQNSIRHSLSFNDCFLKVPRSPDKPGKGSFWTLHPDSGNMFENGCYLRRQKRFKCEKQLALKEAAGAAGSGKKAAAGAQASQAQLGEAAGPASETPAGTESPHSSASPCQEHKRGGLGELKGTPAAALSPPEPAPSPGQQQQAAAHLLGPPHHPGLPPEAHLKPEHHYAFNHPFSINNLMSSEQQHHHSHHHHQPHKMDLKAYEQVMHYPGYGSPMPGSLAMGPVTNKTGLDASPLAADTSYYQGVYSRPIMNSS

SEQ ID NO: 46526 - protein, 457 aa, Homo sapiens; identical to SEQ ID NO: 46525

SEQ ID NO: 46527 - protein, 343 aa, Homo sapiens
MLGAVKMEGHEPSDWSSYYAEPEGYSSVSRARDPKTYRRSYTHAKPPYSYISLITMAIQQSPNKMLTLSEIYQWIMDLFPFYRQNQQRWQNSIRHSLSFNDCFLKVPRSPDKPGKGSFWTLHPDSGNMFENGCYLRRQKRFKCEKQLALKEAAGAAGSGKKAAAGAQASQAQLGEAAGPASETPAGTESPHSSASPCQEHKRGGLGELKGTPAAALSPPEPAPSPGQQQQAAAHLLGPPHHPGLPPEAHLKPEHHYAFNHPFSINNLMSSEQQHHHSHHHHQPHKMDLKAYEQVMHYPGYGSPMPGSLAMGPVTNKTGLDASPLAADTSYYQGVYSRPIMNSS

SEQ ID NO: 46528 - protein, 350 aa, Homo sapiens
MLGSVKMEAHDLAEWSYYPEAGEVYSPVTPVPTMAPLNSYMTLNPLSSPYPPGGLPASPLPSGPLAPPAPAAPLGPTFPGLGVSGGSSSSGYGAPGPGLVHGKEMPKGYRRPLAHAKPPYSYISLITMAIQQAPGKMLTLSEIYQWIMDLFPYYRENQQRWQNSIRHSLSFNDCFVKVARSPDKPGKGSYWALHPSSGNMFENGCYLRRQKRFKLEEKVKKGGSGAATTTRNGTGSAASTTTPAATVTSPPQPPPPAPEPEAQGGEDVGALDCGSPASSTPYFTGLELPGELKLDAPYNFNHPFSINNLMSEQTPAPPKLDVGFGGYGAEGGEPGVYYQGLYSRSLLNAS

SEQ ID NO: 46529 - protein, 553 aa, Homo sapiens
MQARYSVSSPNSLGVVPYLGGEQSYYRAAAAAAGGGYTAMPAPMSVYSHPAHAEQYPGGMARAYGPYTPQPQPKDMVKPPYSYIALITMAIQNAPDKKITLNGIYQFIMDRFPFYRDNKQGWQNSIRHNLSLNECFVKVPRDDKKPGKGSYWTLDPDSYNMFENGSFLRRRRRFKKKDAVKDKEEKDRLHLKEPPPPGRQPPPAPPEQADGNAPGPQPPPVRIQDIKTENGTCPSPPQPLSPAAALGSGSAAAVPKIESPDSSSSSLSSGSSPPGSLPSARPLSLDGADSAPPPPAPSAPPPHHSQGFSVDNIMTSLRGSPQSAAAELSSGLLASAAASSRAGIAPPLALGAYSPGQSSLYSSPCSQTSSAGSSGGGGGGAGAAGGAGGAGTYHCNLQAMSLYAAGERGGHLQGAPGGAGGSAVDDPLPDYSLPPVTSSSSSSLSHGGGGGGGGGGQEAGHHPAAHQGRLTSWYLNQAGGDLGHLASAAAAAAAAGYPGQQQNFHSVREMFESQRIGLNNSPVNGNSSCQMAFPSSQSLYRTSGAFVYDCSKF

SEQ ID NO: 46530 - protein, 212 aa, Homo sapiens
MQARYSVSSPNSLGVVPYLGGEQSYYRAAAAAAGGGYTAMPAPMSVYSHPAHAEQYPGGMARAYGPYTPQPQPKDMVKPPYSYIALITMAIQNAPDKKITLNGIYQFIMDRFPFYRDNKQGWQNSIRHNLSLNECFVKVPRDDKKPGKGSYWTLDPDSYNMFENGSFLRRRRRFKKKDAVKDKEEKDRPQATRASSRTSTRCGRCSSHRGSA

SEQ ID NO: 46531 - protein, 495 aa, Homo sapiens
MTLGSCCCEIMSSESSPAALSEADADIDVVGGGSGGGELPARSGPRAPRDVLPHGHEPPAEEAEADLAEDEEESGGCSDGEPRALASRGAAAAAGSPGPGAAAARGAAGPGPGPPSGGAATRSPLVKPPYSYIALITMAILQSPKKRLTLSEICEFISGRFPYYREKFPAWQNSIRHNLSLNDCFVKIPREPGNPGKGNYWTLDPESADMFDNGSFLRRRKRFKRQPLPPPHPHPHPHPELLLRGGAAAAGDPGAFLPGFAAYGAYGYGYGLALPAYGAPPPGPAPHPHPHPHAFAFAAAAAAAPCQLSVPPGRAAAPPPGPPTASVFAGAGSAPAPAPASGSGPGPGPAGLPAFLGAELGCAKAFYAASLSPPAAGTAAGLPTALLRQGLKTDAGGGAGGGGAGAGQRPSFSIDHIMGHGGGGAAPPGAGEGSPGPPFAAAAGPGGQAQVLAMLTAPALAPVAGHIRLSHPGDALLSSGSRFASKVAGLSGCHF

SEQ ID NO: 46532 - protein, 478 aa, Homo sapiens
MTLSGGGSASDMSGQTVLTAEDVDIDVVGEGDDGLEEKDSDAGCDSPAGPPELRLDEADEVPPAAPHHGQPQPPHQQPLTLPKEAAGAGAGPGGDVGAPEADGCKGGVGGEEGGASGGGPGAGSGSAGGLAPSKPKNSLVKPPYSYIALITMAILQSPQKKLTLSGICEFISNRFPYYREKFPAWQNSIRHNLSLNDCFVKIPREPGNPGKGNYWTLDPQSEDMFDNGSFLRRRKRFKRHQQEHLREQTALMMQSFGAYSLAAAAGAAGPYGRPYGLHPAAAAGAYSHPAAAAAAAAAAALQYPYALPPVAPVLPPAVPLLPSGELGRKAAAFGSQLGPGLQLQLNSLGAAAAAAGTAGAAGTTASLIKSEPSARPSFSIENIIGGGPAAPGGSAVGAGVAGGTGGSGGGSTAQSFLRPPGTVQSAALMATHQPLSLSRTTATIAPILSVPLSGQFLQPAASAAAAAAAAAQAKWPAQ

SEQ ID NO: 46533 - protein, 439 aa, Homo sapiens
MNLPRAERLRSTPQRSLRDSDGEDGKIDVLGEEEDEDEEEAASQQFLEQSLQPGLQVARWGGVALPREHIEGGGGPSDPSEFGTEFRAPPRSAAASEDARQPAKPPSSYIALITMAILQSPHKRLTLSGICAFISDRFPYYRRKFPAWQNSIRHNLSLNDCFVKIPREPGRPGKGNYWSLDPASQDMFDNGSFLRRRKRFQRHQPTPGAHLPHPFPLPAAHAALHNPRPGPLLGAPAPPQPVPGAYPNTGPGRRPYALLHPHPPRYLLLSAPAYAGAPKKAEGADLATPAPFPCCSPHLVLSLGRRARVWRRHREADASLSALRVSCKGSGERVQGLRRVCPRPRGATAPCSSDRQACRTILQQQQRHQEEDCANGCAPTKGAVLGGHLSAASALLRYQAVAEGSGLTSLAAPLGGEGTSPVFLVSPTPSSLAESAGPS

SEQ ID NO: 46534 - protein, 408 aa, Homo sapiens
MNLPRAERPRSTPQRSLRDSDGEDGKIDVLGEEEDEDEVEDEEEEASQKFLEQSLQPGLQVARWGGVALPREHIEGGGPSDPSEFGTEFRAPPRSAAASEDARQPAKPPYSYIALITMAILQSPHKRLTLSGICAFISGRFPYYRRKFPAWQNSIRHNLSLNDCFVKIPREPGHPGKGTYWSLDPASQDMFDNGSFLRRRKRFKRHQLTPGAHLPHPFPLPAAHAALHNPRPGPLLGAPALPQPVPGAYPNTAPGRRPYALLHPHPPRYLLLSAPAYAGAPKKAEGADLATPGTLPVLQPSLGPQPWEEGKGLASPPGGGCISFSIESIMQGVRGAGTGAAQSLSPTAWSYCPLLQRPSSLSDNFAATAAASGGGLRQRLRSHQGRGAGRAPVGRVGAAAVSGGGRGL

SEQ ID NO: 46535 - protein, 416 aa, Homo sapiens
MNLPRAERPRSTPQRSLRDSDGEDGKIDVLGEEEDEDEVEDEEEEARQQFLEQSLQPGLQVARWGGVALPREHIEGGGGPSDPSEFGTKFRAPPRSAAASEDARQPAKPPYSYIALITMAILQNPHKRLTLSGICAFISGRFPYYRRKFPAWQNSIRHNLSLNDCFVKIPREPGHPGKGNYWSLDPASQDMFDNGSFLRRRKRFKRHQLTPGAHLPHPFPLPAAHAALHNPHPGPLLGAPAPPQPVPGAYPNTAPGRRPYALLHPHPLRYLLLSARVYAGAPKKAEGADLATPAPFPCCSPHLVLSLGRRARVWRRHREADASLSALRVLCKGSGERVQGLRRVCPRPRGATATCSSDHQACCIPKPLPLCCKCPPPLLLGQFCSNSSSIRRTAPTAALPPRARCWAGTCRPRRRC

SEQ ID NO: 46536 - protein, 417 aa, Homo sapiens
MNLPRAERLRSTPQRSLRDSDGEDGKIDVLGEEEDEDEVEDEEEAASQQFLEQSLQPGLQVARWGGVALPREHIEGGGGPSDPSEFGTKFRAPPRSAAASEDARQPAKPPYSYIALITMAILQNPHKRLTLSGICAFISGRFPYYRRKFPAWQNSIRHNLSLNDCFVKIPREPGHPGKGNYWSLDPASQDMFDNGSFLRRRKRFKRHQLTPGAHLPHPFPLPAAHAALHNPRPGPLLGAPAPPQPVPGAYPNTAPGRRPYALLHPHPLRYLLLSAPVYAGAPKKAEGAALATPAPFPCCSPHLVLSLGRRARVWRRHREADASLSALRVLCKGSGERVQGLRRICPRPRGATATCSSDHQACCIPRPLPLCCKCPPPPLLGQFCSNSSSIRRRTAPTAALPPRARCWAGTCRPRRPC

SEQ ID NO: 46537 - protein, 373 aa, Homo sapiens
MTAESGPPPPQPEVLATVKEERGETAAGAGVPGEATGRGAGGRRRKRPLQRGKPPYSYIALIAMAIAHAPERRLTLGGIYKFITERFPFYRDNPKKWQNSIRHNLTLNDCFLKIPREAGRPGKGNYWALDPNAEDMFESGSFLRRRKRFKRSDLSTYPAYMHDAAAAAAAAAAAAAAAAIFPGAVPAARPPYPGAVYAGYAPPSLAAPPPVYYPAASPGPCRVFGLVPERPLSPELGPAPSGPGGSCAFASAGAPATTTGYQPAGCTGARPANPSAYAAAYAGPDGAYPQGAGSAIFAAAGRLAGPASPPAGGSSGGVETTVDFYGRTSPGQFGALGACYNPGGQLGGASAGAYHARHAAAYPGGIDRFVSAM

SEQ ID NO: 46538 - protein, 319 aa, Homo sapiens
MAGRSDMDPPAAFSGFPALPAVAPSGPPPSPLAGAEPGREPEEAAAGRGEAAPTPAPGPGRRRRRPLQRGKPPYSYIALIAMALAHAPGRRLTLAAIYRFITERFAFYRDSPRKWQNSIRHNLTLNDCFVKVPREPGNPGKGNYWTLDPAAADMFDNGSFLRRRKRFKRAELPAHAAAAPGPPLPFPYAPYAPAPGPALLVPPPSAGPGPSPPARLFSVDSLVNLQPELAGLGAPEPPCCAAPDAAAAAFPPCAAAASPPLYSQVPDRLVLPATRPGPGPLPAEPLLALAGPAAALGPLSPGEAYLRQPGFASGLERYL

SEQ ID NO: 46539 - protein, 444 aa, Homo sapiens
MTTEGGPPPAPLRRACSPVPGALQAALMSPPPAAAAAAAAAPETTSSSSSSSSASCASSSSSSNSASAPSAACKSAGGGGAGAGSGGAKKASSGLRRPEKPPYSYIALIVMAIQSSPSKRLTLSEIYQFLQARFPFFRGAYQGWKNSVRHNLSLNECFIKLPKGLGRPGKGHYWTIDPASEFMFEEGSFRRRPRGFRRKCQALKPMYHRVVSGLGFGASLLPQGFDFQAPPSAPLGCHSQGGYGGLDMMPAGYDAGAGAPSHAHPHHHHHHHVPHMSPNPGSTYMASCPVPAGPGGVGAAGGGGGGDYGPDSSSSPVPSSPAMASAIECHSPYTSPAAHWSSPGASPYLKQPPALTPSSNPAASAGLHSSMSSYSLEQSYLHQNAREDLSVGLPRYQHHSTPVCDRKDFVLNFNGISSFHPSASGSYYHHHHQSVCQDIKPCVM

SEQ ID NO: 46540 - protein, 489 aa, Homo sapiens [sequence omitted]

SEQ ID NO: 46541 - protein, 489 aa, Homo sapiens [sequence omitted]

SEQ ID NO: 46542 - protein, 378 aa, Homo sapiens
MSSFDLPAPSPPRCSPQFPSIGQEPPEMNLYYENFFHPQGVPSPQRPSFEGGGEYGATPNPYLWFNGPTMTPPPYLPGPNASPFLPQAYGVQRPLLPSVSGLGGSDLGWLPIPSQEELMKLVRPPYSYSALIAMAIHGAPDKRLTLSQIYQYVADNFPFYNKSKAGWQNSIRHNLSLNDCFKKVPRDEDDPGKGNYWTLDPNCEKMFDNGNFRRKRKRKSDVSSSTASLALEKTESSLPVDSPKTTEPQDILDGASPGGTTSSPEKRPSPPPSGAPCLNSFLSSMTAYVSGGSPTSHPLVTPGLSPEPSDKTGQNSLTFNSFSPLTNLSNHSGGGDWANPMPTNMLSYGGSVLSQFSPHFYNSVNTSGVLYPREGTEV

SEQ ID NO: 46543 - protein, 283 aa, Homo sapiens
MSSFDLPAPSPPRCSPQFPSIGQEPPEMNLYYENFFHPQGVPSPQRPSFEGGGEYGATPNPYLWFNGPTMTPPPYLPGPNASPFLPQAYGVQRPLLPSVSGLGGSDLGWLPIPSQEELMKLVRPPYSYSALIAMAIHGAPDKRLTLSQIYQYVADNFPFYNKSKAGWQNSIRHNLSLNDCFKKVPRDEDDPAYVSGGSPTSHPLVTPGLSPEPSDKTGQNSLTFNSFSPLTNLSNHSGGGDWANPMPTNMLSYGGSVLSQFSPHFYNSVNTSGVLYPREGTEV

SEQ ID NO: 46544 - protein, 421 aa, Homo sapiens
MAESWLRLSGAGPAEEAGPEGGLEEPDALDDSLTSLQWLQEFSILNAKAPALPPGGTDPHGYHQVPGSAAPGSPLAADPACLGQPHTPGKPTSSCTSRSAPPGLQAPPPDDVDYATNPHVKPPYSYATLICMAMQASKATKITLSAIYKWITDNFCYFRHADPTWQNSIRHNLSLNKCFIKVPREKDEPGKGGFWRIDPQYAERLLSGAFKKRRLPPVHIHPAFARQAAQEPSAVPRAGPLTVNTEAQQLLREFEEATGEAGWGAGEGRLGHKRKQPLPKRVAKVPRPPSTLLPTPEEQGELEPLKGNFDWEAIFDAGTLGGELGALEALELSPPLSPASHVDVDLTIHGRHIDCPATWGPSVEQAADSLDFDETFLATSFLQHPWDESGSGCLPPEPLFEAGDATLASDLQDWASVGAFL

SEQ ID NO: 46545 - protein, 328 aa, Homo sapiens
MAAAAAALSGAGTPPAGGGAGGGGAGGGGSPPGGWAVARLEGREFEYLMKKRSVTIGRNSSQGSVDVSMGHSSFISRRHLEIFTPPGGGGHGGAAPELPPAQPRPDAGGDFYLRCLGKNGVFVDGVFQRRGAPPLQLPRVCTFRFPSTNIKITFTALSSEKREKQEASESPVKAVQPHISPLTINIPDTMAHLISPLPSPTGTISAANSCPSSPRGAGSSGYKVGRVMPSDLNLMADNSQPENEKEASGGDSPKDDSKPPYSYAQLIVQAITMAPDKQLTLNGIYTHITKNYPYYRTADKGWQRGESFAHVGNTRIRIGLPAHKAPQR

SEQ ID NO: 46546 - protein, 660 aa, Homo sapiens
MAAAAAALSGAGTPPAGGGAGGGGAGGGGSPPGGWAVARLEGREFEYLMKKRSVTIGRNSSQGSVDVSMGHSSFISRRHLEIFTPPGGGGHGGAAPELPPAQPRPDAGGDFYLRCLGKNGVFVDGVFQRRGAPPLQLPRVCTFRFPSTNIKITFTALSSEKREKQEASESPVKAVQPHISPLTINIPDTMAHLISPLPSPTGTISAANSCPSSPRGAGSSGYKVGRVMPSDLNLMADNSQPENEKEASGGDSPKDDSKPPYSYAQLIVQAITMAPDKQLTLNGIYTHITKNYPYYRTADKGWQNSIRHNLSLNRYFIKVPRSQEEPGKGSFWRIDPASESKLIEQAFRKRRPRGVPCFRTPLGPLSSRSAPASPNHAGVLSAHSSGAQTPESLSREGSPAPLEPEPGAAQPKLAVIQEARFAQSAPGSPLSSQPVLITVQRQLPQAIKPVTYTVATPVTTSTSQPPVVQTVHVVHQIPAVSVTSVAGLAPANTYTVSGQAVVTPAAVLAPPKAEAQENGDHREVKVKVEPIPAIGHATLGTASRIIQTAQTTPVQTVTIVQQAPLGQHQLPIKTVTQNGTHVASVPTAVHGQVNNAAASPLHMLATHASASASLPTKRHNGDQPEQPELKRIKTEDGEGIVIALSVDTPPAAVREKGVQN

SEQ ID NO: 46547 - protein, 610 aa, Homo sapiens
MAAARRALGAGTPRARGRGRGAGGGGSRRALGRGAPGGPRVRVSDEEALGDHRPQLVAGLGGREHGPLELHLPAPPRDLHAPGRRGHGGAAPELPPAQPRPDAGGDFYLRCLGKNGVFVDGVFQRRGAPPLQLPRVCTFRFPSTNIKITFTALSSEKREKQEASESPVKAVQPHISPLTINIPDTMAHLISPLPSPTGTISAANSCPSSPRGAGSSGYKVGRVMPSDLNLMADNSQPENEKEASGGDSPKDDSKPPYSYAQLIVQAITMAPDKQLTLNGIYTHITKNYPYYRTADKGWQNSIRHNLSLNRYFIKVPRSQEEPGKGSFWRIDPASESKLIEQAFRKRRPRGVPCFRTPLGPLSSRSAPASPNHAGVLSAHSSGAQTPESLSREGSPAPLEPEPGAAQPKLAVIQEARFAQSAPGSPLSSQPVLITVQRQLPQAIKPVTYTVATPVTTSTSQPPVVQTVHVVHQIPAVSVTSVAGLAPANTYTVSGQAVVTPAAVLAPPKAEAQENGDHREVKVKVEPIPAIGHATLGTASRIIQTAQTTPVQTVTIVQQAPLGQHQLPIKTVTQNGTHVASVPTAVHGQVNNGPLGLRRPPCASSDWSCLS

SEQ ID NO: 46548 - protein, 345 aa, Homo sapiens
MSHLFDPRLPALAASPMLYLYGPERPGLPLAFAPAAALAASGRAETPQKPPYSYIALIAMAIQDAPEQRVTLNGIYQFIMDRFPFYHDNRQGWQNSIRHNLSLNDCFVKVPREKGRPGKGSYWTLDPRCLDMFENGNYRRRKRKPKPGPGAPEAKRPRAETHQRSAEAQPEAGSGAGGSGPAISRLQAAPAGPSPLLDGPSPPAPLHWPGTASPNEDAGDAAQGAAAVAVGQAARTGDGPGSPLRPASRSSPKSSDKSKSFSIDSILAGKQGQKPPSGDELLGGAKPGPGGRLGASLLAASSSLRPPFNASLMLDPHVQGGFYQLGIPFLSYFPLQVPDTVLHFQ

SEQ ID NO: 46549 - protein, 376 aa, Homo sapiens
MMASYPEPEDAAGALLAPETGRTVKEPEGPPPSPGKGGGGGGGTAPEKPDPAQKPPYSYVALIAMAIRESAEKRLTLSGIYQYIIAKFPFYEKNKKGWQNSIRHNLSLNECFIKVPREGGGERKGNYWTLDPACEDMFEKGNYRRRRRMKRPFRPPPAHFQPGKGLFGAGGAAGGCGVAGAGADGYGYLAPPKYLQSGFLNNSWPLPQPPSPMPYASCQMAAAAAAAAAAAAAAGPGSPGAAAVVKGLAGPAASYGPYTRVQSMALPPGVVNSYNGLGGPPAAPPPPPHPHPHPHAHHLHAAAAPPPAPPHHGAAAPPPGQLSPASPATAAPPAPAPTSAPGLQFACARQPELAMMHCSYWDHDSKTGALHSRLDL

SEQ ID NO: 46550 - protein, 269 aa, Homo sapiens
MMASYPEPEDAAGALLAPETGRTVKEPEGPPPSPGKGGGGGGGTAPEKPDPAQKPPYSYVALIAMAIRESAEKRLTLSGIYQYIIAKFPFYEKNKKGWQNSIRHNLSLNECFIKVPREGGGERKGNYWTLDPACEDMFEKGNYRRRRRMKRPFRPPPAHFQPGKGLFGAGGAAGGCGVAGAGADGYGYLAPPKYLQSGFLNNSWPLPQPPSPMPYASCQMAAAAAAAAAAAAAAGPGSLARPLWSRGWRARPPRTGRTHACRAWRCPPA

SEQ ID NO: 46551 - protein, 801 aa, Homo sapiens
MKTSPRRPLILKRRRLPLPVQNAPSETSEEEPKRSPAQQESNQAEASKEVAESNSCKFPAGIKIINHPTMPNTQVVAIPNNANIHSIITALTAKGKESGSSGPNKFILISCGGAPTQPPGLRPQTQTSYDAKRTEVTLETLGPKPAARDVNLPRPPGALCEQKRETCADGEAAGCTINNSLSNIQWLRKMSSDGLGSRSIKQEMEEKENCHLEQRQVKVEEPSRPSASWQNSVSERPPYSYMAMIQFAINSTERKRMTLKDIYTWIEDHFPYFKHIAKPGWKNSIRHNLSLHDMFVRETSANGKVSFWTIHPSANRYLTLDQVFKPLDPGSPQLPEHLESQQKRPNPELRRNMTIKTELPLGARRKMKPLLPRVSSYLVPIQFPVNQSLVLQPSVKVPLPLAASLMSSELARHSKRVRIAPKVFGEQVVFGYMSKFFSGDLRDFGTPITSLFNFIFLCLSVLLAEEGIAPLSSAGPGKEEKLLFGEGFSPLLPVQTIKEEEIQPGEEMPHLARPIKVESPPLEEWPSPAPSFKEESSHSWEDSSQSPTPRPKKSYSGLRSPTRCVSEMLVIQHRERRERSRSRRKQHLLPPCVDEPELLFSEGPSTSRWAAELPFPADSSDPASQLSYSQEVGGPFKTPIKETLPISSTPSKSVLPRTPESWRLTPPAKVGGLDFSPVQTSQGASDPLPDPLGLMDLSTTPLQSAPPLESPQRLLSSEPLDLISVPFGNSSPSDIDVPKPGSPEPQVSGLAANRSLTEGLVLDTMNDSLSKILLDISFPGLDEDPLGPDNINWSQFIPELQ

SEQ ID NO: 46552 - protein, 763 aa, Homo sapiens
MKTSPRRPLILKRRRLPLPVQNAPSETSEEEPKRSPAQQESNQAEASKEVAESNSCKFPAGIKIINHPTMPNTQVVAIPNNANIHSIITALTAKGKESGSSGPNKFILISCGGAPTQPPGLRPQTQTSYDAKRTEVTLETLGPKPAARDVNLPRPPGALCEQKRETCADGEAAGCTINNSLSNIQWLRKMSSDGLGSRSIKQEMEEKENCHLEQRQVKVEEPSRPSASWQNSVSERPPYSYMAMIQFAINSTERKRMTLKDIYTWIEDHFPYFKHIAKPGWKNSIRHNLSLHDMFVRETSANGKVSFWTIHPSANRYLTLDQVFKPLDPGSPQLPEHLESQQKRPNPELRRNMTIKTELPLGARRKMKPLLPRVSSYLVPIQFPVNQSLVLQPSVKVPLPLAASLMSSELARHSKRVRIAPKVLLAEEGIAPLSSAGPGKEEKLLFGEGFSPLLPVQTIKEEEIQPGEEMPHLARPIKVESPPLEEWPSPAPSFKEESSHSWEDSSQSPTPRPKKSYSGLRSPTRCVSEMLVIQHRERRERSRSRRKQHLLPPCVDEPELLFSEGPSTSRWAAELPFPADSSDPASQLSYSQEVGGPFKTPIKETLPISSTPSKSVLPRTPESWRLTPPAKVGGLDFSPVQTSQGASDPLPDPLGLMDLSTTPLQSAPPLESPQRLLSSEPLDLISVPFGNSSPSDIDVPKPGSPEPQVSGLAANRSLTEGLVLDTMNDSLSKILLDISFPGLDEDPLGPDNINWSQFIPELQ

SEQ ID NO: 46553 - protein, 748 aa, Homo sapiens
MKTSPRRPLILKRRRLPLPVQNAPSETSEEEPKRSPAQQESNQAEASKEVAESNSCKFPAGIKIINHPTMPNTQVVAIPNNANIHSIITALTAKGKESGSSGPNKFILISCGGAPTQPPGLRPQTQTSYDAKRTEVTLETLGPKPAARDVNLPRPPGALCEQKRETCADGEAAGCTINNSLSNIQWLRKMSSDGLGSRSIKQEMEEKENCHLEQRQVKVEEPSRPSASWQNSVSERPPYSYMAMIQFAINSTERKRMTLKDIYTWIEDHFPYFKHIAKPGWKNSIRHNLSLHDMFVRETSANGKVSFWTIHPSANRYLTLDQVFKQQKRPNPELRRNMTIKTELPLGARRKMKPLLPRVSSYLVPIQFPVNQSLVLQPSVKVPLPLAASLMSSELARHSKRVRIAPKVLLAEEGIAPLSSAGPGKEEKLLFGEGFSPLLPVQTIKEEEIQPGEEMPHLARPIKVESPPLEEWPSPAPSFKEESSHSWEDSSQSPTPRPKKSYSGLRSPTRCVSEMLVIQHRERRERSRSRRKQHLLPPCVDEPELLFSEGPSTSRWAAELPFPADSSDPASQLSYSQEVGGPFKTPIKETLPISSTPSKSVLPRTPESWRLTPPAKVGGLDFSPVQTSQGASDPLPDPLGLMDLSTTPLQSAPPLESPQRLLSSEPLDLISVPFGNSSPSDIDVPKPGSPEPQVSGLAANRSLTEGLVLDTMNDSLSKILLDISFPGLDEDPLGPDNINWSQFIPELQ

SEQ ID NO: 46554 - protein, 648 aa, Homo sapiens
MVSLPPPQSDVTLPGPTRLEGERQGDLMQAPGLPGSPAPQSKHAGFSCSSFVSDGPPERTPSLPPHSPRIASPGPEQVQGHCPAGPGPGPFRLSPSDKYPGFGFEEAAASSPGRFLKGSHAPFHPYKRPFHEDVFPEAETTLALKGHSFKTPGPLEAFEEIPVDVAEAEAFLPGFSAEAWCNGLPYPSQEHGPQVLGSEVKVKPPVLESGAGMFCYQPPLQHMYCSSQPPFHQYSPGGGSYPIPYLGSSHYQYQRMAPQASTDGHQPLFPKPIYSYSILIFMALKNSKTGSLPVSEIYNFMTEHFPYFKTAPDGWKNSVRHNLSLNKCFEKVENKSGSSSRKGCLWALNPAKIDKMQEELQKWKRKDPIAVRKSMAKPEELDSLIGDKREKLGSPLLGCPPPGLSGSGPIRPLAPPAGLSPPLHSLHPAPGPIPGKNPLQDLLMGHTPSCYGQTYLHLSPGLAPPGPPQPLFPQPDGHLELRAQPGTPQDSPLPAHTPPSHSAKLLAEPSPARTMHDTLLPDGDLGTDLDAINPSLTDFDFQGNLWEQLKDDSLALDPLVLVTSSPTSSSMPPPQPPPHCFPPGPCLTETGSGAGDLAAPGSGGSGALGDLHLTTLYSAFMELEPTPPTAPAGPSVYLSPSSKPVALA

SEQ ID NO: 46555 - protein, 490 aa, Homo sapiens
MGPVMPPSKKPESSGISVSSGLSQCYGGSGFSKALQEDDDLDFSLPDIRLEEGAMEDEELTNLNWLHESKNLLKSFGESVLRSVSPVQDLDDDTPPSPAHSDMPYDARQNPNCKPPYSFSCLIFMAIEDSPTKRLPVKDIYNWILEHFPYFANAPTGWKNSVRHNLSLNKCFKKVDKERSQSIGKGSLWCIDPEYRQNLIQALKKTPYHPHPHVFNTPPTCPQAYQSTSGPPIWPGSTFFKRNGALLQDPDIDAASAMMLLNTPPEIQAGFPPGVIQNGARVLSRGLFPGVRPLPITPIGVTAAMRNGITSCRMRTESEPSCGSPVVSGDPKEDHNYSSAKSSNARSTSPTSDSISSSSSSADDHYEFATKGSQEGSEGSEGSFRSHESPSDTEEDDRKHSQKEPKDSLGDSGYASQHKKRQHFAKARKVPSDTLPLKKRRTEKPPESDDEEMKEAAGSLLHLAGIRSCLNNITNRTAKGQKEQKETTKN

SEQ ID NO: 46556 - protein, 490 aa, Homo sapiens; identical to SEQ ID NO: 46555

SEQ ID NO: 46557 - protein, 54 aa, Homo sapiens
MGPVMPPSKKPESSGISVSSGLSQCYGGSGFSKALQEDDDLDFSLPDIRLEEGA

SEQ ID NO: 46558 - protein, 93 aa, Homo sapiens
MGPVMPPSKKPESSGISVSSGLSQCYGGSGFSKALQEDDDLDFSLPDIRLEEGAMEDEELTNLNWLHESKNLLKSFGESVLRSVSPVQDLDDD

SEQ ID NO: 46559 - protein, 468 aa, Homo sapiens
MGPVMPPSKKPESSGISVSSGLSQCYGGSGFSKALQEDDDLDFSLPDIRLEEGAMEDEELTNLNWLHESKNLLKSFGESVLRSVSPVQDLDDDTPPSPAHSDMPYDARQNPNCKPPYSFSCLIFMAIEDSPTKRLPVKDIYNWILEHFPYFANAPTGWKNSVRHNLSLNKCFKKVDKERSQSIGKGSLWCIDPEYRQNLIQALKKTPYHPHPHVFNTPPTCPQAYQSTSGPPIWPGSTFFKRNGALLQVPPGVIQNGARVLSRGLFPGVRPLPITPIGVTAAMRNGITSCRMRTESEPSCGSPVVSGDPKEDHNYSSAKSSNARSTSPTSDSISSSSSSADDHYEFATKGSQEGSEGSEGSFRSHESPSDTEEDDRKHSQKEPKDSLGDSGYASQHKKRQHFAKARKVPSDTLPLKKRRTEKPPESDDEEMKEAAGSLLHLAGIRSCLNNITNRTAKGQKEQKETTKN

SEQ ID NO: 46560 - protein, 208 aa, Homo sapiens
MGPVMPPSKKPESSGISVSSGLSQCYGGSGFSKALQEDDDLDFSLPDIRLEEGAMEDEELTNLNWLHESKNLLKSFGESVLRSVSPVQDLDDDTPPSPAHSDMPYDARQNPNCKPPYSFSCLIFMAIEDSPTKRLPVKDIYNWILEHFPYFANAPTGWKNSVRHNLSLNKCFKKVDKERSQSIGKGSLWCIDPEYRQNLIQALKKTPY

SEQ ID NO: 46561 - protein, 468 aa, Homo sapiens; identical to SEQ ID NO: 46559

SEQ ID NO: 46562 - protein, 258 aa, Homo sapiens
MIESDTSSIMSGIIRNSGQNHHPSPQEYRLLATTSDDDLPGDLQSLSWLTAVDVPRLQQMASGRVDLGGPCVPHPHPGALAGVADLHVGATPSPLLHGPAGMAPRGMPGLGPITGHRDSQMSQFPVGGQPSSGLQDPPHLYSPATQPQFPLPPGAQQLSDRHGPEEQQDRQPACERDLQLHEGALPLLQDGPRRVEELGAAQPVSEQVLREGGEQDERLLPQGLPVGSEPGPHRQDGGGDAQVEEEGPGCHPPEYGQP

SEQ ID NO: 46563 - protein, 517 aa, Homo sapiens
MIESDTSSIMSGIIRNSGQNHHPSPQEYRLLATTSDDDLPGDLQSLSWLTAVDVPRLQQMASGRVDLGGPCVPHPHPGALAGVADLHVGATPSPLLHGPAGMAPRGMPGLGPITGHRDSMSQFPVGGQPSSGLQDPPHLYSPATQPQFPLPPGAQQCPPVGLYGPPFGVRPPYPQPHVAVHSSQELHPKHYPKPIYSYSCLIAMALKNSKTGSLPVSEIYSFMKEHFPYFKTAPDGWKNSVRHNLSLNKCFEKVENKMSGSSRKGCLWALNLARIDKMEEEMHKWKRKDLAAIHRSMANPEELDKLISDRPESCRRPGKPGEPEAPVLTHATTVAVAHGCLAVSQLPPQPLMTLSLQSVPLHHQVQPQAHLAPDSPAPAQTPPLHALPDLSPSPLPHPAMGRAPVDFINISTDMNTEVDALDPSIMDFALQGNLWEEMKDEGFSLDTLGAFADSPLGCDLGASGLTPASGGSDQSFPDLQVTGLYTAYSTPDSVAASGTSSSSQYLGAQGNKPIALL

SEQ ID NO: 46564 - protein, 337 aa, Homo sapiens
MPGLPCPALPCPAPPPAPSCLIAMALKNSKTGSLPVSEIYSFMKEHFPYFKTAPDGWKNSVRHNLSLNKCFEKVENKMSGSSRKGCLWALNLARIDKMEEEMHKWKRKDLAAIHRSMANPEELDKLISDRPESCRRPGKPGEPEAPVLTHATTVAVAHGCLAVSQLPPQPLMTLSLQSVPLHHQVQPQAHLAPDSPAPAQTPPLHALPDLSPSPLPHPAMGRAPVDFINISTDMNTEVDALDPSIMDFALQGNLWEEMKDEGFSLDTLGAFADSPLGCDLGASGLTPASGGSDQSFPDLQVTGLYTAYSTPDSVAASGTSSSSQYLGAQGNKPIALL

SEQ ID NO: 46565 - protein, 559 aa, Homo sapiens
MAAKLRAHQVDVDPDFAPQSRPRSCTWPLPQPDLAGDEDGALGAGVAEGAEDCGPERRATAPAMAPAPPLGAEVGPLRKAKSSRRNAWGNLSYADLITKAIESAPDKRLTLSQIYDWMVRYVPYFKDKGDSNSSAGWKNSIRHNLSLHTRFIRVQNEGTGKSSWWMLNPEGGKTGKTPRRRAVSMDNGAKFLRIKGKASKKKQLQAPERSPDDSSPSAPAPGPVPAAAKWAASPASHASDDYEAWADFRGGGRPLLGEAAELEDDEALEALAPSSPLMYPSPASALSPALGSRCPGELPRLAELGGPLGLHGGGGAGLPEGLLDGAQDAYGPRARAQARPGAGCAGGAGAGGRSRRLPRQRGGPVRAARALAQCLSPPHQPYDAARRGGRRGPGTAGPRRRLRGPARRPPAGRSAGALRCRRRRAAGRRARPLPGRPGPRHVQREPRVRRGVHHPQRLHGQRRNGLQLRFGPASAAAGPGRGPAPQPELGAGLRAASRLRAPRPVPRGPLSSHPDSRVPAPDSSSPGGGPSPARDPSRRPAAGEGEGGAGAPHCSCPHS

SEQ ID NO: 46566 - protein, 677 aa, Homo sapiens
MMQESGTETKSNGSAIQNGSGGSNHLLECGGLREGRSNGETPAVDIGAADLAHAQQQQQQALQVARQLLLQQQQQQQVSGLKSPKRNDKQPALQVPVSVAMMTPQVITPQQMQQILQQQVLSPQQLQVLLQQQQALMLQQQQLQEFYKKQQEQLQLQLLQQQHAGKQPKEQQQVATQQLAFQQQLLQMQQLQQQHLLSLQRQGLLTIQPGQPALPLQPLAQGMIPTELQQLWKEVTSAHTAEETTGNNHSSLDLTTTCVSSSAPSKTSLIMNPHASTNGQLSVHTPKRESLSHEEHPHSHPLYGHGVCKWPGCEAVCEDFQSFLKHLNSEHALDDRSTAQCRVQMQVVQQLELQLAKDKERLQAMMTHLHVKSTEPKAAPQPLNLVSSVTLSKSASEASPQSLPHTPTTPTAPLTPVTQGPSVITTTSMHTVGPIRRRYSDKYNVPISSADIAQNQEFYKNAEVRPPFTYASLIRQAILESPEKQLTLNEIYNWFTRMFAYFRRNAATWKNAVRHNLSLHKCFVRVENVKGAVWTVDEVEFQKRRPQKISGNPSLIKNMQSSHAYCTPLNAALQASMAENSIPLYTTASMGNPTLGNLASAIREELNGAMEHTNSNESDSSPGRSPMQAVHPVHVKEEPLDPEEAEGPLSLVTTANHSPDFDHDRDYEDEPVNEDME

SEQ ID NO: 46567 - protein, 358 aa, Homo sapiens
MMTPQVITPQQMQQILQQQVLSPQQLQVLLQQQQALMLQQQQLQEFYKKQQEQLQLQLLQQQHAGKQPKEQQQVATQQLAFQQQLLQMQQLQQQHLLSLQRQGLLTIQPGQPALPLQPLAQGMIPTELQQLWKEVTSAHTAEETTGNNHSSLDLTTTCVSSSAPSKTSLIMNPHASTNGQLSVHTPKRESLSHEEHPHSHPLYGHGVCKWPGCEAVCEDFQSFLKHLNSEHALDDRSTAQCRVQMQVVQQLELQLAKDKERLQAMMTHLHVKSTEPKAAPQPLNLVSSVTLSKSASEASPQSLPHTPTTPTPPDSRHPRPLCHHNHQHAHGGTHPQAVLRQIQRAHFVSRYCAEPRIL

SEQ ID NO: 46568 - protein, 502 aa, Homo sapiens
MMQESGTETKSNGSAIQNGSGGSNHLLECGGLREGRSNGETPAVDIGAADLAHAQQQQQQALQVARQLLLQQQQQQQVSGLKSPKRNDKQPALQVPVSVAMMTPQVITPQQMQQILQQQVLSPQQLQVLLQQQQALMLQQQQLQEFYKKQQEQLQLQLLQQQHAGKQPKEQQQVATQQLAFQQQLLQMQQLQQQHLLSLQRQGLLTIQPGQPALPLQPLAQGMIPTELQQLWKEVTSAHTAEETTGNNHSSLDLTTTCVSSSAPSKTSLIMNPHASTNGQLSVHTPKRESLSHEEHPHSHPLYGHGVCKWPGCEAVCEDFQSFLKHLNSEHALDDRSTAQCRVQMQVVQQLELQLAKDKERLQAMMTHLHVKSTEPKAAPQPLNLVSSVTLSKSASEASPQSLPHTPTTPTAPLTPVTQGPSVITTTSMHTVGPIRRRYSDKYNVPISSADIAQNQEFYKNAEVRPPFTYASLIRQAILESPEKKKKERQTLGTMPIHSTQQ

SEQ ID NO: 46569 - protein, 489 aa, Homo sapiens
MMTPQVITPQQMQQILQQQVLSPQQLQVLLQQQQALMLQLQQLWKEVTSAHTAEETTGNNHSSLDLTTTCVSSSAPSKTSLIMNPHASTNGQLSVHTPKRESLSHEEHPHSHPLYGHGVCKWPGCEAVCEDFQSFLKHLNSEHALDDRSTAQCRVQMQVVQQLELQLAKDKERLQAMMTHLHVKSTEPKAAPQPLNLVSSVTLSKSASEASPQSLPHTPTTPTAPLTPVTQGPSVITTTSMHTVGPIRRRYSDKYNVPISSADIAQNQEFYKNAEVRPPFTYASLIRQAILESPEKQLTLNEIYNWFTRMFAYFRRNAATWKNAVRHNLSLHKCFVRVENVKGAVWTVDEVEFQKRRPQKISGNPSLIKNMQSSHAYCTPLNAALQASMAENSIPLYTTASMGNPTLGNLASAIREELNGAMEHTNSNESDSSPGRSPMQAVHPVHVKEEPLDPEEAEGPLSLVTTANHSPDFDHDRDYEDEPVNEDME

SEQ ID NO: 46570 - protein, 677 aa, Homo sapiens; identical to SEQ ID NO: 46566

SEQ ID NO: 46571 - protein, 601 aa, Homo sapiens
MMQESGTETKSNGSAIQNGSGGSNHLLECGGLREGRSNGETPAVDIGAADLAHAQQQQQQALQVARQLLLQQQQQQQVSGLKSPKRNDKQPALQQQQVATQQLAFQQQLLQMQQLQQQHLLSLQRQGLLTIQPGQPALPLQPLAQGMIPTELQQLWKEVTSAHTAEETTGNNHSSLDLTTTCVSSSAPSKTSLIMNPHASTNGQLSVHTPKRESLSHEEHPHSHPLYGHGVCKWPGCEAVCEDFQSFLKHLNSEHALDDRSTAQCRVQMQVVQQLELQLAKDKERLQAMMTHLHVKSTEPKAAPQPLNLVSSVTLSKSASEASPQSLPHTPTTPTAPLTPVTQGPSVITTTSMHTVGPIRRRYSDKYNVPISSADIAQNQEFYKNAEVRPPFTYASLIRQAILESPEKQLTLNEIYNWFTRMFAYFRRNAATWKNAVRHNLSLHKCFVRVENVKGAVWTVDEVEFQKRRPQKISGNPSLIKNMQSSHAYCTPLNAALQASMAENSIPLYTTASMGNPTLGNLASAIREELNGAMEHTNSNESDSSPGRSPMQAVHPVHVKEEPLDPEEAEGPLSLVTTANHSPDFDHDRDYEDEPVNEDME

SEQ ID NO: 46572 - protein, 224 aa, Homo sapiens
MMTPQVITPQQMQQILQQQVLSPQQLQVLLQQQQALMLQQQQLQEFYKKQQEQLQLQLLQQQHAGKQPKEQQQVATQQLAFQQQLLQMQQLQQQHLLSLQRQGLLTIQPGQPALPLQPLAQGMIPTELQQLWKEVTSAHTAEETTGNNHSSLDLTTTCVSSSAPSKTSLIMNPHASTNGQLSVHTPKRESLSHEEHPHSHPLYGHGVCKWPGCEAVCEDFQSFL

SEQ ID NO: 46573 - protein, 679 aa, Homo sapiens
MFQCVFSSSVLQPHSTSCLFKHLFYHSATPASQKQPEPIYSKKTEIQRQTVRAPFAKLFIFSALQVARQLLLQQQQQQQVSGLKSPKRNDKQPALQVPVSVAMMTPQVITPQQMQQILQQQVLSPQQLQVLLQQQQALMLQQQQLQEFYKKQQEQLQLQLLQQQHAGKQPKEQQQVATQQLAFQQQLLQMQQLQQQHLLSLQRQGLLTIQPGQPALPLQPLAQGMIPTELQQLWKEVTSAHTAEETTGNNHSSLDLTTTCVSSSAPSKTSLIMNPHASTNGQLSVHTPKRESLSHEEHPHSHPLYGHGVCKWPGCEAVCEDFQSFLKHLNSEHALDDRSTAQCRVQMQVVQQLELQLAKDKERLQAMMTHLHVKSTEPKAAPQPLNLVSSVTLSKSASEASPQSLPHTPTTPTAPLTPVTQGPSVITTTSMHTVGPIRRRYSDKYNVPISSADIAQNQEFYKNAEVRPPFTYASLIRQAILESPEKQLTLNEIYNWFTRMFAYFRRNAATWKNAVRHNLSLHKCFVRVENVKGAVWTVDEVEFQKRRPQKISGNPSLIKNMQSSHAYCTPLNAALQASMAENSIPLYTTASMGNPTLGNLASAIREELNGAMEHTNSNESDSSPGRSPMQAVHPVHVKEEPLDPEEAEGPLSLVTTANHSPDFDHDRDYEDEPVNEDME

SEQ ID NO: 46574 - protein, 123 aa, Homo sapiens
MMTPQVITPQQMQQILQQQVLSPQQLQVLLQQQQALMLQQQQLQEFYKKQQEQLQLQLLQQQHAGKQPKEQQQVATQQLAFQQQLLQMQQLQQQHLLSLQRQGLLTIQPGQPALPLQPLAQGM

SEQ ID NO: 46575 - protein, 677 aa, Homo sapiens; identical to SEQ ID NO: 46566

SEQ ID NO: 46576 - protein, 114 aa, Homo sapiens
MMQESGTETKSNGSAIQNGSGGSNHLLECGGLREGRSNGETPAVDIGAADLAHAQQQQQQWHLINHQPSRSPSSWLKRLISSPWELEVLQVPLWGAVAETKMSGPVCQPNPSPF

SEQ ID NO: 46577 - protein, 222 aa, Homo sapiens
MMQESATETISNSSMNQNGMSTLSSQLDAGSRDGRSSGDTSSEVSTVELLHLQQQQALQAARQLLLQQQTSGLKSPKSSDKQRPLQVPVSVAMMTPQVITPQQMQQILQQQVLSPQQLQALLQQQQAVMLQQQQLQEFYKKQQEQLHLQLLQQQQQQQQQQQQQQQQQQQQQQQQQQQQQQQQQQQQQQQQHPGKQAKEQQQQQQQQQQLAAQQLVFQQQLL

SEQ ID NO: 46578 - protein, 715 aa, Homo sapiens
MMQESATETISNSSMNQNGMSTLSSQLDAGSRDGRSSGDTSSEVSTVELLHLQQQQALQAARQLLLQQQTSGLKSPKSSDKQRPLQVPVSVAMMTPQVITPQQMQQILQQQVLSPQQLQALLQQQQAVMLQQQQLQEFYKKQQEQLHLQLLQQQQQQQQQQQQQQQQQQQQQQQQQQQQQQQQQQQQQQQQHPGKQAKEQQQQQQQQQQLAAQQLVFQQQLLQMQQLQQQQHLLSLQRQGLISIPPGQAALPVQSLPQAGLSPAEIQQLWKEVTGVHSMEDNGIKHGGLDLTTNNSSSTTSSNTSKASPPITHHSIVNGQSSVLSARRDSSSHEETGASHTLYGHGVCKWPGCESICEDFGQFLKHLNNEHALDDRSTAQCRVQMQVVQQLEIQLSKERERLQAMMTHLHMRPSEPKPSPKPLNLVSSVTMSKNMLETSPQSLPQTPTTPTAPVTPITQGPSVITPASVPNVGAIRRRHSDKYNIPMSSEIAPNYEFYKNADVRPPFTYATLIRQAIMESSDRQLTLNEIYSWFTRTFAYFRRNAATWKNAVRHNLSLHKCFVRVENVKGAVWTVDEVEYQKRRSQKITGSPTLVKNIPTSLGYGAALNASLQAALAESSLPLLSNPGLINNASSGLLQAVHEDLNGSLDHIDSNGNSSPGCSPQPHIHSIHVKEEPVIAEDEDCPMSLVTTANHSPELEDDREIEEEPLSEDLE

SEQ ID NO: 46579 - protein, 432 aa, Homo sapiens
MMQESATETISNSSMNQNGMSTLSSQLDAGSRDGRSSGDTSSEVSTVELLHLQQQQALQAARQLLLQQQTSGLKSPKSSDKQRPLQVPVSVAMMTPQVITPQQMQQILQQQVLSPQQLQALLQQQQAVMLQQQQLQEFYKKQQEQLHLQLLQQQQQQQQQQQQQQQQQQQQQQQQQQQQQQQQQQQQQQQQHPGKQAKEQQQQQQQQQQLAAQQLVFQQQLLQMQQLQQQQHLLSLQRQGLISIPPGQAALPVQSLPQAGLSPAEIQQLWKEVTGVHSMEDNGIKHGGLDLTTNNSSSTTSSNTSKASPPITHHSIVNGQSSVLSARRDSSSHEETGASHTLYGHGVCKWPGCESICEDFGQFLKHLNNEHALDDRSTAQCRVQMQVVQQLEIQLSKERERLQAMMTHLHMRPSEPKPSPKPVSAYCFINSK

SEQ ID NO: 46580 - protein, 456 aa, Homo sapiens
MQESATETISNSSMNQNGMSTLSSQLDAGSRDGRSSGDTSSEVSTVELLHLQQQQALQAARQLLLQQQTSGLKSPKSSDKQRPLQELLPETKLCICGHSSGDGHPHNTFAVPVSVAMMTPQVITPQQMQQILQQQVLSPQQLQALLQQQQAVMLQQQQLQEFYKKQQEQLHLQLLQQQQQQQQQQQQQQQQQQQQQQQQQQQQQQQQQQQQQQQQHPGKQAKEQQQQQQQQQQLAAQQLVFQQQLLQMQQLQQQQHLLSLQRQGLISIPPGQAALPVQSLPQAGLSPAEIQQLWKEVTGVHSMEDNGIKHGGLDLTTNNSSSTTSSNTSKASPPITHHSIVNGQSSVLSARRDSSSHEETGASHTLYGHGVCKWPGCESICEDFGQFLKHLNNEHALDDRSTAQCRVQMQVVQQLEIQLSKERERLQAMMTHLHMRPSEPKPSPKPVSAYCFINSK

SEQ ID NO: 46581 - protein, 623 aa, Homo sapiens
MMTPQVITPQQMQQILQQQVLSPQQLQALLQQQQAVMLQQQQLQEFYKKQQEQLHLQLLQQQQQQQQQQQQQQQQQQQQQQQQQQQQQQQQQQQQQQQQHPGKQAKEQQQQQQQQQQLAAQQLVFQQQLLQMQQLQQQQHLLSLQRQGLISIPPGQAALPVQSLPQAGLSPAEIQQLWKEVTGVHSMEDNGIKHGGLDLTTNNSSSTTSSNTSKASPPITHHSIVNGQSSVLSARRDSSSHEETGASHTLYGHGVCKWPGCESICEDFGQFLKHLNNEHALDDRSTAQCRVQMQVVQQLEIQLSKERERLQAMMTHLHMRPSEPKPSPKPLNLVSSVTMSKNMLETSPQSLPQTPTTPTAPVTPITQGPSVITPASVPNVGAIRRRHSDKYNIPMSSEIAPNYEFYKNADVRPPFTYATLIRQAIMESSDRQLTLNEIYSWFTRTFAYFRRNAATWKNAVRHNLSLHKCFVRVENVKGAVWTVDEVEYQKRRSQKITGSPTLVKNIPTSLGYGAALNASLQAALAESSLPLLSNPGLINNASSGLLQAVHEDLNGSLDHIDSNGNSSPGCSPQPHIHSIHVKEEPVIAEDEDCPMSLVTTANHSPELEDDREIEEEPLSEDLE

SEQ ID NO: 46582 - protein, 530 aa, Homo sapiens
MMTPQVITPQQMQQILQQQVLSPQQLQALLQQQQAVMLQQQQLQEFYKKQQEQLHLQLLQQQQQQQQQQQQQQQQQQQQQQQQQQQQQQQQQQQQQQQQHPGKQAKEQQQQQQQQQQLAAQQLVFQQQLLQMQQLQQQQHLLSLQRQGLISIPPGQAALPVQSLPQAGLSPAEIQQLWKEVTGVHSMEDNGIKHGGLDLTTNNSSSTTSSNTSKASPPITHHSIVNGQSSVLSARRDSSSHEETGASHTLYGHGVCKWPGCESICEDFGQFLKHLNNEHALDDRSTAQCRVQMQVVQQLEIQLSKERERLQAMMTHLHMRPSEPKPSPKPAIMESSDRQLTLNEIYSWFTRTFAYFRRNAATWKNAVRHNLSLHKCFVRVENVKGAVWTVDEVEYQKRRSQKITGSPTLVKNIPTSLGYGAALNASLQAALAESSLPLLSNPGLINNASSGLLQAVHEDLNGSLDHIDSNGNSSPGCSPQPHIHSIHVKEEPVIAEDEDCPMSLVTTANHSPELEDDREIEEEPLSEDLE

SEQ ID NO: 46583 - protein, 715 aa, Homo sapiens; identical to SEQ ID NO: 46578

SEQ ID NO: 46584 - protein, 382 aa, Homo sapiens
MMTPQVITPQQMQQILQQQVLSPQQLQALLQQQQAVMLQQDFLDSGLENFRAALEKNQQLQEFYKKQQEQLHLQLLQQQQQQQQQQQQQQQQQQQQQQQQQQQQQQQQQQQQQQQQHPGKQAKEQQQQQQQQQQLAAQQLVFQQQLLQMQQLQQQQHLLSLQRQGLISIPPGQAALPVQSLPQAGLSPAEIQQLWKEVTGVHSMEDNGIKHGGLDLTTNNSSSTTSSNTSKASPPITHHSIVNGQSSVLSARRDSSSHEETGASHTLYGHGVCKWPGCESICEDFGQFLKHLNNEHALDDRSTAQCRVQMQVVQQLEIQLSKERERLQAMMTHLHMRPSEPKPSPKPNICKVTYRCIWMFLRFSNYAEVLLYIPEKLTPVAL

SEQ ID NO: 46585 - protein, 732 aa, Homo sapiens
MMQESATETISNSSMNQNGMSTLSSQLDAGSRDGRSSGDTSSEVSTVELLHLQQQQALQAARQLLLQQQTSGLKSPKSSDKQRPLQVPVSVAMMTPQVITPQQMQQILQQQVLSPQQLQALLQQQQAVMLQQDFLDSGLENFRAALEKNQQLQEFYKKQQEQLHLQLLQQQQQQQQQQQQQQQQQQQQQQQQQQQQQQQQQQQQQQQQHPGKQAKEQQQQQQQQQQLAAQQLVFQQQLLQMQQLQQQQHLLSLQRQGLISIPPGQAALPVQSLPQAGLSPAEIQQLWKEVTGVHSMEDNGIKHGGLDLTTNNSSSTTSSNTSKASPPITHHSIVNGQSSVLSARRDSSSHEETGASHTLYGHGVCKWPGCESICEDFGQFLKHLNNEHALDDRSTAQCRVQMQVVQQLEIQLSKERERLQAMMTHLHMRPSEPKPSPKPLNLVSSVTMSKNMLETSPQSLPQTPTTPTAPVTPITQGPSVITPASVPNVGAIRRRHSDKYNIPMSSEIAPNYEFYKNADVRPPFTYATLIRQAIMESSDRQLTLNEIYSWFTRTFAYFRRNAATWKNAVRHNLSLHKCFVRVENVKGAVWTVDEVEYQKRRSQKITGSPTLVKNIPTSLGYGAALNASLQAALAESSLPLLSNPGLINNASSGLLQAVHEDLNGSLDHIDSNGNSSPGCSPQPHIHSIHVKEEPVIAEDEDCPMSLVTTANHSPELEDDREIEEEPLSEDLE

SEQ ID NO: 46586 - protein, 740 aa, Homo sapiens
MMQESATETISNSSMNQNGMSTLSSQLDAGSRDGRSSGDTSSEVSTVELLHLQQQQALQAARQLLLQQQTSGLKSPKSSDKQRPLQELLPETKLCICGHSSGDGHPHNTFAVPVSVAMMTPQVITPQQMQQILQQQVLSPQQLQALLQQQQAVMLQQQQLQEFYKKQQEQLHLQLLQQQQQQQQQQQQQQQQQQQQQQQQQQQQQQQQQQQQQQQQHPGKQAKEQQQQQQQQQQLAAQQLVFQQQLLQMQQLQQQQHLLSLQRQGLISIPPGQAALPVQSLPQAGLSPAEIQQLWKEVTGVHSMEDNGIKHGGLDLTTNNSSSTTSSNTSKASPPITHHSIVNGQSSVLSARRDSSSHEETGASHTLYGHGVCKWPGCESICEDFGQFLKHLNNEHALDDRSTAQCRVQMQVVQQLEIQLSKERERLQAMMTHLHMRPSEPKPSPKPLNLVSSVTMSKNMLETSPQSLPQTPTTPTAPVTPITQGPSVITPASVPNVGAIRRRHSDKYNIPMSSEIAPNYEFYKNADVRPPFTYATLIRQAIMESSDRQLTLNEIYSWFTRTFAYFRRNAATWKNAVRHNLSLHKCFVRVENVKGAVWTVDEVEYQKRRSQKITGSPTLVKNIPTSLGYGAALNASLQAALAESSLPLLSNPGLINNASSGLLQAVHEDLNGSLDHIDSNGNSSPGCSPQPHIHSIHVKEEPVIAEDEDCPMSLVTTANHSPELEDDREIEEEPLSEDLE

SEQ ID NO: 46587 - protein, 396 aa, Homo sapiens
MPNPRPGKPSAPSLALGPSPGASPSWRAAPKASDLLGARGPGGTFQGRDLRGGAHASSSSLNPMPPSQLQLSTVDAHARTPVLQVHPLESPAMISLTPPTTATGVFSLKARPGLPPGINVASLEWVSREPALLCTFPNPSAPRKDSTLSAVPQSSYPLLANGVCKWPGCEKVFEEPEDFLKHCQADHLLDEKGRAQCLLQREMVQSLEQQLVLEKEKLSAMQAHLAGKMALTKASSVASSDKGSCCIVAAGSQGPVVPAWSGPREAPDSLFAVRRHLWGSHGNSTFPEFLHNMDYFKFHNMRPPFTYATLIRWAILEAPEKQRTLNEIYHWFTRMFAFFRNHPATWKNAIRHNLSLHKCFVRVESEKGAVWTVDELEFRKKRSQRPSRCSNPTPGP

SEQ ID NO: 46588 - protein, 431 aa, Homo sapiens
MPNPRPGKPSAPSLALGPSPGASPSWRAAPKASDLLGARGPGGTFQGRDLRGGAHASSSSLNPMPPSQLQLPTLPLVMVAPSGARLGPLPHLQALLQDRPHFMHQLSTVDAHARTPVLQVHPLESPAMISLTPPTTATGVFSLKARPGLPPGINVASLEWVSREPALLCTFPNPSAPRKDSTLSAVPQSSYPLLANGVCKWPGCEKVFEEPEDFLKHCQADHLLDEKGRAQCLLQREMVQSLEQQLVLEKEKLSAMQAHLAGKMALTKASSVASSDKGSCCIVAAGSQGPVVPAWSGPREAPDSLFAVRRHLWGSHGNSTFPEFLHNMDYFKFHNMRPPFTYATLIRWAILEAPEKQRTLNEIYHWFTRMFAFFRNHPATWKNAIRHNLSLHKCFVRVESEKGAVWTVDELEFRKKRSQRPSRCSNPTPGP

SEQ ID NO: 46589 - protein, 404 aa, Homo sapiens
MPNPRPGKPSAPSLALGPSPGASPSWRAAPKASDLLGARGPGGTFQGRDLRGGAHASSSSLNPMPPSQLQLPTLPLVMVAPSGARLGPLPHLQALLQDRPHFMHQLSTVDAHARTPVLQVHPLESPAMISLTPPTTATGVFSLKARPGLPPGINVASLEWVSREPALLCTFPNPSAPRKDSTLSAVPQSSYPLLANGVCKWPGCEKVFEEPEDFLKHCQADHLLDEKGRAQCLLQREMVQSLEQQASSDKGSCCIVAAGSQGPVVPAWSGPREAPDSLFAVRRHLWGSHGNSTFPEFLHNMDYFKFHNMRPPFTYATLIRWAILEAPEKQRTLNEIYHWFTRMFAFFRNHPATWKNAIRHNLSLHKCFVRVESEKGAVWTVDELEFRKKRSQRPSRCSNPTPGP

SEQ ID NO: 46590 - protein, 396 aa, Homo sapiens; identical to SEQ ID NO: 46587

SEQ ID NO: 46591 - protein, 680 aa, Homo sapiens
MMVESASETIRSAPSGQNGVGSLSGQADGSSGGATGTTASGTGREVTTGADSNGEMSPAELLHFQQQQALQVARQFLLQQASGLSSPGNNDSKQSASAVQVPVSVAMMSPQMLTPQQMQQILSPPQLQALLQQQQALMLQQLQEYYKKQQEQLHLQLLTQQQAGKPQPKEALGNKQLAFQQQLLQMQQLQQQHLLNLQRQGLVSLQPNQASGPLQTLPQAAVCPTDLPQLWKGEGAPGQPAEDSVKQEGLDLTGTAATATSFAAPPKVSPPLSHHTLPNGQPTVLTSRRDSSSHEETPGSHPLYGHGECKWPGCETLCEDLGQFIKHLNTEHALDDRSTAQCRVQMQVVQQLEIQLAKESERLQAMMAHLHMRPSEPKPFSQPLNPVPGSSSFSKVTVSAADSFPDGLVHPPTSAAAPVTPLRPPGLGSASLHGGGPARRRSSDKFCSPISSELAQNHEFYKNADVRPPFTYASLIRQAILETPDRQLTLNEIYNWFTRMFAYFRRNTATWKNAVRHNLSLHKCFVRVENVKGAVWTVDEREYQKRRPPKMTGSPTLVKNMISGLSYGALNASYQAALAESSFPLLNSPGMLNPGSASSLLPLSHDDVGAPVEPLPSNGSSSPPRLSPPQYSHQVQVKEEPAEAEEDRQPGPPLGAPNPSASGPPEDRDLEEELPGEELS

SEQ ID NO: 46592 - protein, 678 aa, Homo sapiens
MMVESASETIRSAPSGQNGVGSLSGQADGSSGGATGTTASGTGREVTTGADSNGEMSPAELLHFQQQQALQVARQFLLQQASGLSSPGNNDSKQSASAVQVPVSVAMMSPQMLTPQQMQQILSPPQLQALLQQQQALMLQQEYYKKQQEQLHLQLLTQQQAGKPQPKEALGNKQLAFQQQLLQMQQLQQQHLLNLQRQGLVSLQPNQASGPLQTLPQAAVCPTDLPQLWKGEGAPGQPAEDSVKQEGLDLTGTAATATSFAAPPKVSPPLSHHTLPNGQPTVLTSRRDSSSHEETPGSHPLYGHGECKWPGCETLCEDLGQFIKHLNTEHALDDRSTAQCRVQMQVVQQLEIQLAKESERLQAMMAHLHMRPSEPKPFSQPLNPVPGSSSFSKVTVSAADSFPDGLVHPPTSAAAPVTPLRPPGLGSASLHGGGPARRRSSDKFCSPISSELAQNHEFYKNADVRPPFTYASLIRQAILETPDRQLTLNEIYNWFTRMFAYFRRNTATWKNAVRHNLSLHKCFVRVENVKGAVWTVDEREYQKRRPPKMTGSPTLVKNMISGLSYGALNASYQAALAESSFPLLNSPGMLNPGSASSLLPLSHDDVGAPVEPLPSNGSSSPPRLSPPQYSHQVQVKEEPAEAEEDRQPGPPLGAPNPSASGPPEDRDLEEELPGEELS

SEQ ID NO: 46593 - protein, 680 aa, Homo sapiens; identical to SEQ ID NO: 46591

SEQ ID NO: 46594 - protein, 667 aa, Homo sapiens
MMVESASETIRSAPSGQNGVGSLSGQADGSSGGATGTTASGTGREVTTGADSNGEMSPAELLHFQQQQALQVARQFLLQQASGLSSPGNNDSKQSASAVQVPVSVAMMSPQMLTPQQMQQILSPPQLQALLQQQQALMLQQLQEYYKKQQEQLHLQLLTQQQAGKPQPKEALGNKQLAFQQQLLQMQQLQQQHLLNLQRQGLVSLQPNQASGPLQTLPQAVCPTDLPQLWKGEGAPGQPAEDSVKQEGLDLTGTAATATSFAAPPKVSPPLSHHTLPNGQPTVLTSRRDSSSHEETPGSHPLYGHGECKWPGCETLCEDLGQFIKHLNTEHALDDRSTAQCRVQMQVVQQLEIQLAKESERLQAMMAHLHMRPSEPKPFSQPVTVSAADSFPDGLVHPPTSAAAPVTPLRPPGLGSASLHGGGPARRRSSDKFCSPISSELAQNHEFYKNADVRPPFTYASLIRQAILETPDRQLTLNEIYNWFTRMFAYFRRNTATWKNAVRHNLSLHKCFVRVENVKGAVWTVDEREYQKRRPPKMTGSPTLVKNMISGLSYGALNASYQAALAESSFPLLNSPGMLNPGSASSLLPLSHDDVGAPVEPLPSNGSSSPPRLSPPQYSHQVQVKEEPAEAEEDRQPGPPLGAPNPSASGPPEDRDLEEELPGEELS

SEQ ID NO: 46595 - protein, 668 aa, Homo sapiens
MMVESASETIRSAPSGQNGVGSLSGQADGSSGGATGTTASGTGREVTTGADSNGEMSPAELLHFQQQQALQVARQFLLQQASGLSSPGNNDSKQSASAVQVPVSVAMMSPQMLTPQQMQQILSPPQLQALLQQQQALMLQQLQEYYKKQQEQLHLQLLTQQQAGKPQPKEALGNKQLAFQQQLLQMQQLQQQHLLNLQRQGLVSLQPNQASGPLQTLPQAAVCPTDLPQLWKGEGAPGQPAEDSVKQEGLDLTGTAATATSFAAPPKVSPPLSHHTLPNGQPTVLTSRRDSSSHEETPGSHPLYGHGECKWPGCETLCEDLGQFIKHLNTEHALDDRSTAQCRVQMQVVQQLEIQLAKESERLQAMMAHLHMRPSEPKPFSQPVTVSAADSFPDGLVHPPTSAAAPVTPLRPPGLGSASLHGGGPARRRSSDKFCSPISSELAQNHEFYKNADVRPPFTYASLIRQAILETPDRQLTLNEIYNWFTRMFAYFRRNTATWKNAVRHNLSLHKCFVRVENVKGAVWTVDEREYQKRRPPKMTGSPTLVKNMISGLSYGALNASYQAALAESSFPLLNSPGMLNPGSASSLLPLSHDDVGAPVEPLPSNGSSSPPRLSPPQYSHQVQVKEEPAEAEEDRQPGPPLGAPNPSASGPPEDRDLEEELPGEELS

SEQ ID NO: 46596 - protein, 403 aa, Homo sapiens
MKLEVFVPRAAHGDKQGSDLEGAGGSDAPSPLSAAGDDSLGSDGDCAANSPAAGGGARDTQGDGEQSAGGGPGAEEAIPAAAAAAVVAEGAEAGAAGPGAGGAGSGEGARSKPYTRRPKPPYSYIALIAMAIRDSAGGRLTLAEINEYLMGKFPFFRGSYTGWRNSVRHNLSLNDCFVKVLRDPSRPWGKDNYWMLNPNSEYTFADGVFRRRRKRLSHRAPVPAPGLRPEEAPGLPAAPPPAPAAPASPRMRSPARQEERASPAGKFSSSFAIDSILRKPFRSRRLRDTAPGTTLQWGAAPCPPLPAFPALLPAAPCRALLPLCAYGAGEPARLGAREAEVPPTAPPLLLAPLPAAAPAKPLRGPAAGGAHLYCPLRLPAALQAASVRRPGPHLPYPVETLLA

SEQ ID NO: 46597 - protein, 541 aa, Homo sapiens
MSQLVECVPNFSEGKNQEVIDAISGAITQTPGCVLLDVDAGPSTNRTVYTFVGPPECVVEGALNAARVASRLIDMSRHQGEHPRMGALDVCPFIPVRGVSVDECVLCAQAFGQRLAEELDVPVYLYGEAARMDSRRTLPAIRAGEYEALPKKLQQADWAPDFGPSSFVPSWGATATGARKFLIAFNINLLGTKEQAHRIALNLREQGRGKDQPGRLKKVQGIGWYLDEKNLAQVSTNLLDFEVTALHTVYEETCREAQELSLPVVGSQLVGLVPLKALLDAAAFYCEKENLFILEEEQRIRLVVSRLGLDSLCPFSPKERIIEYLVPERGPERGLGSKSLRAFVGEVGARSAAPGGGSVAAAAAAMGAALGSMVGLMTYGRRQFQSLDTTMRRLIPPFREASAKLTTLVDADAEAFTAYLEAMRLPKNTPEEKDRRTAALQEGLRRAVSVPLTLAETVASLWPALQELARCGNLACRSDLQVAAKALEMGVFGAYFNVLINLRDITDEAFKDQIHHRVSSLLQEAKTQAALVLDCLETRQE

SEQ ID NO: 46598 - protein, 495 aa, Homo sapiens
MSQLVECVPNFSEGKNQEVIDAISGAITQTPGCVLLDVDAGPSTNRTVYTFVGPPECVVEGALNAARVASRLIDMSRHQGEHPRMGALDVCPFIPVRGVSVDECVLCAQAFGQRLAEELDVPVYLYGEAARMDSRRTLPAIRAGEYEALPKKLQQADWAPDFGPSSFVPSWGATATGARKFLIAFNINLLGTKEQAHRIALNLREQGRGKDQPGRLKKVQGIGWYLDEKNLAQVSTNLLDFEVTALHTVYEETCREAQELSLPVVGSQLVGLVPLKALLDAAAFYCEKENLFILEEEQRIRLVVSRLGLDSLCPFSPKERIIEYLVPERGPERGLGSKSLRAFVGEVGARSAAPGGGSVAAAAAAMGAALGSMVGLMTYGRRQFQSLDTTMRRLIPPFREASAKLTTLVDADAEAFTAYLAHGGPTGGSEAGSLCAADAGGDGGLAVAGPAGTGPVWEPGLPVRPPGGGQSPGDGRVWRIFQRAHQPEGHHRRGI

SEQ ID NO: 46599 - protein, 572 aa, Homo sapiens
MSQLVECVPNFSEGKNQEVIDAISGAITQTPGCVLLDVDAGPSTNRTVYTFVGPPECVVEGALNAARVASRLIDMSRHQGEHPRMGALDVCPFIPVRGVSVDECVLCAQAFGQRLAEELDVPVYLYGEAARMDSRRTLPAIRAGEYEALPKKLQQADWAPDFGPSSFVPSWGATATGARKFLIAFNINLLGTKEQAHRIALNLREQGRGKDQPGRLKKVQGIGWYLDEKNLAQVSTNLLDFEVTALHTVYEETCREAQELSLPVVGSQLVGLVPLKALLDAAAFYCEKENLFILEEEQRIRLVVSRLGLDSLCPFSPKERIIEYLVPERGPERGLGSKSLRAFVGEVGARSAAPGGGSVAAAAAAMGAALGSMVGLMTYGRRQFQSLDTTMRRLIPPFREASAKLTTLVDADAEAFTAYLEAMRLPKNTPEEKDRRTAALQEGLRRAVSVPLTLAETVASLWPALQELARCGNLACRSDLQVAAKALEMGVFGAYFNVLINLRDITDEAFKDQPPAGSQDPGCTGAGLLGDPAGVTVREASPGSVAPPSPIPRGQSCDLETPGTAGPSTLEG

SEQ ID NO: 46600 - protein, 495 aa, Homo sapiens; identical to SEQ ID NO: 46598

SEQ ID NO: 46601 - protein, 541 aa, Homo sapiens; identical to SEQ ID NO: 46597

SEQ ID NO: 46602 - protein, 572 aa, Homo sapiens; identical to SEQ ID NO: 46599

SEQ ID NO: 46603 - protein, 592 aa, Homo sapiens
MSWGTELWDQFDNLEKHTQWGIDILEKYIKFVKERTEIELSYAKQLRNLSKKYQPKKNSKEEEEYKYTSCKAFISNLNEMNDYAGQHEVISENMASQIIVDLARYVQELKQERKSNFHDGRKAQQHIETCWKQLESSKRRFERDCKEADRAQQYFEKMDADINVTKADVEKARQQAQIRHQMAEDSKADYSSILQKFNHEQHEYYHTHIPNIFQKIQEMEERRIVRMGESMKTYAEVDRQVIPIIGKCLDGIVKAAESIDQKNDSQLVIEAYKSGFEPPGDIEFEDYTQPMKRTVSDNSLSNSRGEGKPDLKFGGKSKGKLWPFIKKNKSPKQQKEPLSHRFNEFMTSKPKIHCFRSLKRGHSLLKGATPEDFSNLPPEQRRKKLQQKVDELNKEIQKEMDQRDAITKMKDVYLKNPQMGDPASLDHKLAEVSQNIEKLRVETQKFEAWLAEVEGRLPARSEQARRQSGLYDSQNPPTVNNCAQDRESPDGSYTEEQSQESEMKVLATDFDDEFDDEEPLPAIGTCKALYTFEGQNEGTISVVEGETLYVIEEDKGDGWTRIRRNEDEEGYVPTSYVEVCLDKNAKGAKTYI

SEQ ID NO: 46604 - protein, 617 aa, Homo sapiens
IRWTDELWDQFDNLEKHTQWGIDILEKYIKFVKERTEIELSYAKQLRNLSKKYQPKKNSKEEEEYKYTSCKAFISNLNEMNDYAGQHEVISENMASQIIVDLARYVQELKQERKSNFHDGRKAQQHIETCWKQLESSKRRFERDCKEADRAQQYFEKMDADINVTKADVEKARQQAQIRHQMAEDSKADYSSILQKFNHEQHEYYHTHIPNIFQKIQEMEERRIVRMGESMKTYAEVDRQVIPIIGKCLDGIVKAAESIDQKNDSQLVIEAYKSGFEPPGDIEFEDYTQPMKRTVSDNSLSNSRGEGKPDLKFGGKSKGKLWPFIKKNKLMSLLTSPHQPPPPPPASASPSAVPNGPQSPKQQKEPLSHRFNEFMTSKPKIHCFRSLKRGPSFKQGATPEDFSNLPPEQRRKKLQQKVDELNKEIQKEMDQRDAITKMKDVYLKNPQMGDPASLDHKLAEVSQNIEKLRVETQKFEAWLAEVEGRLPARSEQARRQSGLYDSQNPPTVNNCAQDRESPDGSYTEEQSQESEMKVLATDFDDEFDDEEPLPAIGTCKALYTFEGQNEGTISVVEGETLYVIEEDKGDGWTRIRRNEDEEGYVPTSYVEVCLDKNAKDS

SEQ ID NO: 46605 - protein, 617 aa, Homo sapiens
MSWGTELWDQFDNLEKHTQWGIDILEKYIKFVKERTEIELSYAKQLRNLSKKYQPKKNSKEEEEYKYTSCKAFISNLNEMNDYAGQHEVISENMASQIIVDLARYVQELKQERKSNFHDGRKAQQHIETCWKQLESSKRRFERDCKEADRAQQYFEKMDADINVTKADVEKARQQAQIRHQMAEDSKADYSSILQKFNHEQHEYYHTHIPNIFQKIQEMEERRIVRMGESMKTYAEVDRQVIPIIGKCLDGIVKAAESIDQKNDSQLVIEAYKSGFEPPGDIEFEDYTQPMKRTVSDNSLSNSRGEGKPDLKFGGKSKGKLWPFIKKNKLMSLLTSPHQPPPPPPASASPSAVPNGPQSPKQQKEPLSHRFNEFMTSKPKIHCFRSLKRGHSLLKGATPEDFSNLPPEQRRKKLQQKVDELNKEIQKEMDQRDAITKMKDVYLKNPQMGDPASLDHKLAEVSQNIEKLRVETQKFEAWLAEVEGRLPARSEQARRQSGLYDSQNPPTVNNCAQDRESPDGSYTEEQSQESEMKVLATDFDDEFDDEEPLPAIGTCKALYTFEGQNEGTISVVEGETLYVIEEDKGDGWTRIRRNEDEEGYVPTSYVEVCLDKNAKDS

SEQ ID NO: 46606 - protein, 608 aa, Homo sapiens
MSWGTELWDQFDNLEKHTQWGIDILEKYIKFVKERTEIELSYAKQLRNLSKKYQPKKNSKEEEEYKYTSCKAFISNLNEMNDYAGQHEVISENMASQIIVDLARYVQELKQERKSNFHDGRKAQQHIETCWKQLESSKRRFERDCKEADRAQQYFEKMDADINVTKADVEKARQQAQIRHQMAEDSKADYSSILQKFNHEQHEYYHTHIPNIFQKIQEMEERRIVRMGESMKTYAEVDRQVIPIIGKCLDGIVKAAESIDQKNDSQLVIEAYKSGFEPPGDIEFEDYTQPMKRTVSDNSLSNSRGEGKPDLKFGGKSKGKLWPFIKKNKPPPPPPASASPSAVPNGPQSPKQQKEPLSHRFNEFMTSKPKIHCFRSLKRGHSLTLQGATPEDFSNLPPEQRRKKLQQKVDELNKEIQKEMDQRDAITKMKDVYLKNPQMGDPASLDHKLAEVSQNIEKLRVETQKFEAWLAEVEGRLPARSEQARRQSGLYDSQNPPTVNNCAQDRESPDGSYTEEQSQESEMKVLATDFDDEFDDEEPLPAIGTCKALYTFEGQNEGTISVVEGETLYVIEEDKGDGWTRIRRNEDEEGYVPTSYVEVCLDKNAKDS

SEQ ID NO: 46607 - protein, 245 aa, Homo sapiens
MKRTIGKPTYAFEARDYVLSLKLGATPEDFSNLPPEQRRKKLQQKVDELNKEIQKEMDQRDAITKMKDVYLKNPQMGDPASLDHKLAEVSQNIEKLRVETQKFEAWLAEVEGRLPARSEQARRQSGLYDSQNPPTVNNCAQDRESPDGSYTEEQSQESEMKVLATDFDDEFDDEEPLPAIGTCKALYTFEGQNEGTISVVEGETLYVIEEDKGDGWTRIRRNEDEEGYVPTSYVEVCLDKNAKDS

SEQ ID NO: 46608 - protein, 617 aa, Homo sapiens
MSWGTELWDQFDNLEKHTQWGIDILEKYIKFVKERTEIELSYAKQLRNLSKKYQPKKNSKEEEEYKYTSCKAFISNLNEMNDYAGQHEVISENMASQIIVDLARYVQELKQERKSNFHDGRKAQQHIETCWKQLESSKRRFERDCKEADRAQQYFEKMDADINVTKADVEKARQQAQIRHQMAEDSKADYSSILQKFNHEQHEYYHTHIPNIFQKIQEMEERRIVRMGESMKTYAEVDRQVIPIIGKCLDGIVKAAESIDQKNDSQLVIEAYKSGFEPPGDIEFEDYTQPMKRTVSDNSLSNSRGEGKPDLKFGGKSKGKLWPFIKKNKLMSLLTSPHQPPPPPPASASPSAVPNGPQSPKQQKEPLSHRFNEFMTSKPKIHCFRSLKRGLSLKLGATPEDFSNLPPEQRRKKLQQKVDELNKEIQKEMDQRDAITKMKDVYLKNPQMGDPASLDHKLAEVSQNIEKLRVETQKFEAWLAEVEGRLPARSEQARRQSGLYDSQNPPTVNNCAQDRESPDGSYTEEQSQESEMKVLATDFDDEFDDEEPLPAIGTCKALYTFEGQNEGTISVVEGETLYVIEEDKGDGWTRIRRNEDEEGYVPTSYVEVCLDKNAKDS

SEQ ID NO: 46609 - protein, 573 aa, Homo sapiens
  VARIANT 1: note = MOD_RES - Any amino acid
XLSYAKQLRNLSKKYQPKKNSKEEEEYKYTSCKAFISNLNEMNDYAGQHEVISENMASQIIVDLARYVQELKQERKSNFHDGRKAQQHIETCWKQLESSKRRFERDCKEADRAQQYFEKMDADINVTKADVEKARQQAQIRHQMAEDSKADYSSILQKFNHEQHEYYHTHIPNIFQKIQEMEERRIVRMGESMKTYAEVDRQVIPIIGKCLDGIVKAAESIDQKNDSQLVIEAYKSGFEPPGDIEFEDYTQPMKRTVSDNSLSNSRGEGKPDLKFGGKSKGKLWPFIKKNKPPPPPPASASPSAVPNGPQSPKQQKEPLSHRFNEFMTSKPKIHCFRSLKRGHSLLKGATPEDFSNLPPEQRRKKLQQKVDELNKEIQKEMDQRDAITKMKDVYLKNPQMGDPASLDHKLAEVSQNIEKLRVETQKFEAWLAEVEGRLPARSEQARRQSGLYDSQNPPTVNNCAQDRESPDGSYTEEQSQESEMKVLATDFDDEFDDEEPLPAIGTCKALYTFEGQNEGTISVVEGETLYVIEEDKGDGWTRIRRNEDEEGYVPTSYVEVCLDKNAKGAKTYI

SEQ ID NO: 46610 - protein, 1164 aa, Homo sapiens
MAGGEDRGDGEPVSVVTVRVQYLEDTDPFACANFPEPRRAPTCSLDGALPLGAQIPAVHRLLGAPLKLEDCALQVSPSGYYLDTELSLEEQREMLEGFYEEISKGRKPTLILRTQLSVRVNAILEKLYSSSGPELRRSLFSLKQIFQEDKDLVPEFVHSEGLSCLIRVGAAADHNYQSYILRALGQLMLFVDGMLGVVAHSDTIQWLYTLCASLSRLVVKTALKLLLVFVEYSENNAPLFIRAVNSVASTTGAPPWANLVSILEEKNGADPELLVYTVTLINKTLAALPDQDSFYDVTDALEQQGMEALVQRHLGTAGTDVDLRTQLVLYENALKLEDGDIEEAPGAGGRRERRKPSSEEGKRSRRSLEGGGCPARAPEPGPTGPASPVGPTSSTGPALLTGPASSPVGPPSGLQASVNLFPTISVAPSADTSSERSIYKARFLENVAAAETEKQVALAQGRAETLAGAMPNEAGGHPDARQLWDSPETAPAARTPQSPAPCVLLRAQRSLAPEPKEPLIPASPKAEPIWELPTRAPRLSIGDLDFSDLGEDEDQDMLNVESVEAGKDIPAPSPPLPLLSGVPPPPPLPPPPPIKGPFPPPPPLPLAAPLPHSVPDSSALPTKRKTVKLFWRELKLAGGHGVSASRFGPCATLWASLDPVSVDTARLEHLFESRAKEVLPSKKAGEGRRTMTTVLDPKRSNAINIGLTTLPPVHVIKAALLNFDEFAVSKDGIEKLLTMMPTEEERQKIEEAQLANPDIPLGPAENFLMTLASIGGLAARLQLWAFKLDYDSMEREIAEPLFDLKVGMEQLVQNATFRCILATLLAVGNFLNGSQSSGFELSYLEKVSEVKDTVRRQSLLHHLCSLVLQTRPESSDLYSEIPALTRCAKVDFEQLTENLGQLERRSRAAEESLRSLAKHELAPALRARLTHFLDQCARRVAMLRIVHRRVCNRFHAFLLYLGYTPQAAREVRIMQFCHTLREFALEYRTCRERVLQQQQKQATYRERNKTRGRMITETEKFSGVAGEAPSNPSVPVAVSSGPGRGDADSHASMKSLLTSRPEDTTHNRRSRGMVQSSSPIMPTVGPSTASPEEPPGSSLPSDTSDEIMDLLVQSVTKSSPRALAARERKRSRGNRKSLRRTLKSGLGDDLVQALGLSKGPGLEV

SEQ ID NO: 46611 - protein, 1439 aa, Homo sapiens
MATLACRVQFLDDTDPFNSTNFPEPSRPPLFTFREDLALGTQLAGVHRLLQAPHKLDDCTLQLSHNGAYLDLEATLAEQRDELEGFQDDAGRGKKHSIILRTQLSVRVHACIEKLYNSSGRDLRRALFSLKQIFQDDKDLVHEFVVAEGLTCLIKVGAEADQNYQNYILRALGQIMLYVDGMNGVINRNETIQWLYTLIGSKFRLVVKTALKLLLVFVEYSESNAPLLIQAVTAVDTKRGVKPWSNIMEILEEKDGVDTELLVYAMTLVNKTLSGLPDQDTFYDVVDCLEELGIAAVSQRHLNKKGTDLDLVEQLNIYEVALRHEDGDETTEPPPSGCRDRRRASVCSSGGGEHRGLDRRRSRRHSVQSIKSTLSAPTSPCSQSAPSFKPNQVRDLREKYSNFGNNSYHSSRPSSGSSVPTTPTSSVSPPQEARLERSSPSGLLTSSFRQHQESLAAERERRRQEREERLQRIEREERNKFSRDYLDKREEQRQAREERYKYLEQLAAEEHEKELRSRSVSRGRADLSLDLTSPAAPACLAPLSHSPSSSDSQEALTVSASSPGTPHHPQASAGDPEPESEAEPEAEAGAGQVADEAGQDIASAHEGAETEVEQALEQEPEERASLSEKERQNEGVNERDNCSASSVSSSSSTLEREEKEDKLSRDRTTGLWPAGVQDAGVNGQCGDILTNKRFMLDMLYAHNRKSPDDEEKGDGEAGRTQQEAEAVASLATRISTLQANSQTQDESVRRVDVGCLDNRGSVKAFAEKFNSGDLGRGSISPDAEPNDKVPETAPVQPKTESDYIWDQLMANPRELRIQDMDFTDLGEEDDIDVLDVDLGHREAPGPPPPPPPTFLGLPPPPPPPLLDSIPPPPVPGNLLVPPPPVFNAPQGLGWSQVPRGQPTFTKKKKTIRLFWNEVRPFDWPCKNNRRCREFLWSKLEPIKVDTSRLEHLFESKSKELSVSKKTAADGKRQEIIVLDSKRSNAINIGLTVLPPPRTIKIAILNFDEYALNKEGIEKILTMIPTDEEKQKIQEAQLANPEIPLGSAEQFLLTLSSISELSARLHLWAFKMDYETTEKEVAEPLLDLKEGIDQLENNKTLGFILSTLLAIGNFLNGTNAKAFELSYLEKVPEVKDTVHKQSLLHHVCTMVVENFPDSSDLYSEIGAITRSAKVDFDQLQDNLCQMERRCKASWDHLKAIAKHEMKPVLKQRMSEFLKDCAERIIILKIVHRRIINRFHSFLLFMGHPPYAIREVNINKFCRIISEFALEYRTTRERVLQQKQKRANHRERNKTRGKMITDSGKFSGSSPAPPSQPQGLSYAEDAAEHENMKAVLKTSSPSVEDATPALGVRTRSRASRGSTSSWTMGTDDSPNVTDDAADEIMDRIVKSATQVPSQRVVPRERKRSRANRKSLRRTLKSGLTPEEARALGLVGTSELQL

SEQ ID NO: 46612 - protein, 1422 aa, Homo sapiens
MATLACRVQFLDDTDPFNSTNFPEPSRPPLFTFREDLALGTQLAGVHRLLQAPHKLDDCTLQLSHNGAYLDLEATLAEQRDELEGFQDDAGRGKKHSIILRTQLSVRVHACIEKLYNSSGRDLRRALFSLKQIFQDDKDLVHEFVVAEGLTCLIKVGAEADQNYQNYILRALGQIMLYVDGMNGVINRNETIQWLYTLIGSKFRLVVKTALKLLLVFVEYSESNAPLLIQAVTAVDTKRGVKPWSNIMEILEEKDGVDTELLVYAMTLVNKTLSGLPDQDTFYDVVDCLEELGIAAVSQRHLNKKGTDLDLVEQLNIYEVALRHEDGDETTEPPPSGCRDRRRASVCSSGGGEHRGLDRRRSRRHSVQSIKSTLSAPTSPCSQSAPSFKPNQVRDLREKYSNFGNNSYHSSRPSSGSSVPTTPTSSVSPPQEARLERSSPSGLLTSSFRQHQESLAAERERRRQEREERLQRIEREERNKFRYKYLEQLAAEEHEKELRSRSVSRGRADLSLDLTSPAAPACLAPLSHSPSSSDSQEALTVSASSPGTPHHPQASAGDPEPESEAEPEAEAGAGQVADEAGQDIASAHEGAETEVEQALEQEPEERASLSEKERQNEGVNERDNCSASSVSSSSSTLEREEKEDKLSRDRTTGLWPAGVQDAGVNGQCGDILTNKRFMLDMLYAHNRKSPDDEEKGDGEAGRTQQEAEAVASLATRISTLQANSQTQDESVRRVDVGCLDNRGSVKAFAEKFNSGDLGRGSISPDAEPNDKVPETAPVQPKTESDYIWDQLMANPRELRIQDMDFTDLGEEDDIDVLDVDLGHREAPGPPPPPPPTFLGLPPPPPPPLLDSIPPPPVPGNLLVPPPPVFNAPQGLGWSQVPRGQPTFTKKKKTIRLFWNEVRPFDWPCKNNRRCREFLWSKLEPIKVDTSRLEHLFESKSKELSVSKKTAADGKRQEIIVLDSKRSNAINIGLTVLPPPRTIKIAILNFDEYALNKEGIEKILTMIPTDEEKQKIQEAQLANPEIPLGSAEQFLLTLSSISELSARLHLWAFKMDYETTEKEVAEPLLDLKEGIDQLENNKTLGFILSTLLAIGNFLNGTNAKAFELSYLEKVPEVKDTVHKQSLLHHVCTMVVENFPDSSDLYSEIGAITRSAKVDFDQLQDNLCQMERRCKASWDHLKAIAKHEMKPVLKQRMSEFLKDCAERIIILKIVHRRIINRFHSFLLFMGHPPYAIREVNINKFCRIISEFALEYRTTRERVLQQKQKRANHRERNKTRGKMITDSGKFSGSSPAPPSQPQGLSYAEDAAEHENMKAVLKTSSPSVEDATPALGVRTRSRASRGSTSSWTMGTDDSPNVTDDAADEIMDRIVKSATQVPSQRVVPRERKRSRANRKSLRRTLKSGLTPEEARALGLVGTSELQL

SEQ ID NO: 46613 - protein, 1401 aa, Homo sapiens
MATLACRVQFLDDTDPFNSTNFPEPSRPPLFTFREDLALGTQLAGVHRLLQAPHKLDDCTLQLSHNGAYLDLEATLAEQRDELEGFQDDAGRGKKHSIILRTQLSVRVHACIEKLYNSSGRDLRRALFSLKQIFQDDKDLVHEFVVAEGLTCLIKVGAEADQNYQNYILRALGQIMLYVDGMNGVINRNETIQWLYTLIGSKFRLVVKTALKLLLVFVEYSESNAPLLIQAVTAVDTKRGVKPWSNIMEILEEKDGVDTELLVYAMTLVNKTLSGLPDQDTFYDVVDCLEELGIAAVSQRHLNKKGTDLDLVEQLNIYEVALRHEDGDETTEPPPSGCRDRRRASVCSSGGGEHRGLDRRRSRRHSVQSIKSTLSAPTSPCSQSAPSFKPNQVRDLREKSSPSGLLTSSFRQHQESLAAERERRRQEREERLQRIEREERNKFSRDYLDKREEQRQAREERYKYLEQLAAEEHEKELRSRSVSRGRADLSLDLTSPAAPACLAPLSHSPSSSDSQEALTVSASSPGTPHHPQASAGDPEPESEAEPEAEAGAGQVADEAGQDIASAHEGAETEVEQALEQEPEERASLSEKERQNEGVNERDNCSASSVSSSSSTLEREEKEDKLSRDRTTGLWPAGVQDAGVNGQCGDILTNKRFMLDMLYAHNRKSPDDEEKGDGEAGRTQQEAEAVASLATRISTLQANSQTQDESVRRVDVGCLDNRGSVKAFAEKFNSGDLGRGSISPDAEPNDKVPETAPVQPKTESDYIWDQLMANPRELRIQDMDFTDLGEEDDIDVLDVDLGHREAPGPPPPPPPTFLGLPPPPPPPLLDSIPPPPVPGNLLVPPPPVFNAPQGLGWSQVPRGQPTFTKKKKTIRLFWNEVRPFDWPCKNNRRCREFLWSKLEPIKVDTSRLEHLFESKSKELSVSKKTAADGKRQEIIVLDSKRSNAINIGLTVLPPPRTIKIAILNFDEYALNKEGIEKILTMIPTDEEKQKIQEAQLANPEIPLGSAEQFLLTLSSISELSARLHLWAFKMDYETTEKEVAEPLLDLKEGIDQLENNKTLGFILSTLLAIGNFLNGTNAKAFELSYLEKVPEVKDTVHKQSLLHHVCTMVVENFPDSSDLYSEIGAITRSAKVDFDQLQDNLCQMERRCKASWDHLKAIAKHEMKPVLKQRMSEFLKDCAERIIILKIVHRRIINRFHSFLLFMGHPPYAIREVNINKFCRIISEFALEYRTTRERVLQQKQKRANHRERNKTRGKMITDSGKFSGSSPAPPSQPQGLSYAEDAAEHENMKAVLKTSSPSVEDATPALGVRTRSRASRGSTSSWTMGTDDSPNVTDDAADEIMDRIVKSATQVPSQRVVPRERKRSRANRKSLRRTLKSGLTPEEARALGLVGTSELQL

SEQ ID NO: 46614 - protein, 350 aa, Homo sapiens
METNSSLPTNISGGTPAVSAGYLFLDIITYLVFAVTFVLGVLGNGLVIWVAGFRMTHTVTTISYLNLAVADFCFTSTLPFFMVRKAMGGHWPFGWFLCKFVFTIVDINLFGSVFLIALIALDRCVCVLHPVWTQNHRTVSLAKKVIIGPWVMALLLTLPVIIRVTTVPGKTGTVACTFNFSPWTNDPKERINVAVAMLTVRGIIRFIIGFSAPMSIVAVSYGLIATKIHKQGLIKSSRPLRVLSFVAAAFFLCWSPYQVVALIATVRIRELLQGMYKEIGIAVDVTSALAFFNSCLNPMLYVFMGQDFRERLIHALPASLERALTEDSTQTSDTATNSTLPSAEVELQAK

SEQ ID NO: 46615 - protein, 350 aa, Homo sapiens; identical to SEQ ID NO: 46614

SEQ ID NO: 46616 - protein, 351 aa, Homo sapiens
METNFSTPLNEYEEVSYESAGYTVLRILPLVVLGVTFVLGVLGNGLVIWVAGFRMTRTVTTICYLNLALADFSFTATLPFLIVSMAMGEKWPFGWFLCKLIHIVVDINLFGSVFLIGFIALDRCICVLHPVWAQNHRTVSLAMKVIVGPWILALVLTLPVFLFLTTVTIPNGDTYCTFNFASWGGTPEERLKVAITMLTARGIIRFVIGFSLPMSIVAICYGLIAAKIHKKGMIKSSRPLRVLTAVVASFFICWFPFQLVALLGTVWLKEMLFYGKYKIIDILVNPTSSLAFFNSCLNPMLYVFVGQDFRERLIHSLPTSLERALSEDSAPTNDTAANSASPPAETELQAM

SEQ ID NO: 46617 - protein, 351 aa, Homo sapiens; identical to SEQ ID NO: 46616

SEQ ID NO: 46618 - protein, 353 aa, Homo sapiens
METNFSIPLNETEEVLPEPAGHTVLWIFSLLVHGVTFVFGVLGNGLVIWVAGFRMTRTVNTICYLNLALADFSFSAILPFRMVSVAMREKWPFGSFLCKLVHVMIDINLFVSVYLITIIALDRCICVLHPAWAQNHRTMSLAKRVMTGLWIFTIVLTLPNFIFWTTISTTNGDTYCIFNFAFWGDTAVERLNVFITMAKVFLILHFIIGFSVPMSIITVCYGIIAAKIHRNHMIKSSRPLRVFAAVVASFFICWFPYELIGILMAVWLKEMLLNGKYKIILVLINPTSSLAFFNSCLNPILYVFMGRNFQERLIRSLPTSLERALTEVPDSAQTSNTDTTSASPPEETELQAM

SEQ ID NO: 46619 - protein, 271 aa, Homo sapiens
MFRDFGEPGPSSGNGGGYGGPAQPPAAAQAAQQKFHLVPSINTMSGSQELQWMVQPHFLGPSSYPRPLTYPQYSPPQPRPGVIRALGPPPGVRRRPCEQISPEEEERRRVRRERNKLAAAKCRNRRKELTDFLQAETDKLEDEKSGLQREIEELQKQKERLELVLEAHRPICKIPEGAKEGDTGSTSGTSSPPAPCRPVPCISLSPGPVLEPEALHTPTLMTTPSLTPFTPSLVFTYPSTPEPCASAHRKSSSSSGDPSSDPLGSPTLLAL

SEQ ID NO: 46620 - protein, 169 aa, Homo sapiens
MFRDFGEPGPSSGNGGGYGGPAQPPAAAQAAQQETDKLEDEKSGLQREIEELQKQKERLELVLEAHRPICKIPEGAKEGDTGSTSGTSSPPAPCRPVPCISLSPGPVLEPEALHTPTLMTTPSLTPFTPSLVFTYPSTPEPCASAHRKSSSSSGDPSSDPLGSPTLLAL

SEQ ID NO: 46621 - protein, 116 aa, Homo sapiens
MFRDFGEPGPSSGNGGGYGGPAQPPAAAQAAQQKFHLVPSINTMSGSQELQWMVQPHFLGPSSYPRPLTYPQYSPPQPRPGVIRALGPPPGVRRRPCEQISPEEEESWQPRDFVDP

SEQ ID NO: 46622 - protein, 326 aa, Homo sapiens
MYQDYPGNFDTSSRGSSGSPAHAESYSSGGGGQQKFRVDMPGSGSAFIPTINAITTSQDLQWMVQPTVITSMSNPYPRSHPYSPLPGLASVPGHMALPRPGVIKTIGTTVGRRRRDEQLSPEEEEKRRIRRERNKLAAAKCRNRRRELTEKLQAETEELEEEKSGLQKEIAELQKEKEKLEFMLVAHGPVCKISPEERRSPPAPGLQPMRSGGGSVGAVVVKQEPLEEDSPSSSSAGLDKAQRSVIKPISIAGGFYGEEPLHTPIVVTSTPAVTPGTSNLVFTYPSVLEQESPASPSESCSKAHRRSSSSGDQSSDSLNSPTLLAL

SEQ ID NO: 46623 - protein, 287 aa, Homo sapiens
MPGSGSAFIPTINAITTSQDLQWMVQPTVITSMSNPYPRSHPYSPLPGLASVPGHMALPRPGVIKTIGTTVGRRRRDEQLSPEEEEKRRIRRERNKLAAAKCRNRRRELTEKLQAETEELEEEKSGLQKEIAELQKEKEKLEFMLVAHGPVCKISPEERRSPPAPGLQPMRSGGGSVGAVVVKQEPLEEDSPSSSSAGLDKAQRSVIKPISIAGGFYGEEPLHTPIVVTSTPAVTPGTSNLVFTYPSVLEQESPASPSESCSKAHRRSSSSGDQSSDSLNSPTLLAL

SEQ ID NO: 46624 - protein, 323 aa, Homo sapiens
MAEKFDCHYCRDPLQGKKYVQKDGHHCCLKCFDKFCANTCVECRKPIGADSKEVHYKNRFWHDTCFRCAKCLHPLANETFVAKDNKILCNKCTTREDSPKCKGCFKAIVAGDQNVEYKGTVWHKDCFTCSNCKQVIGTGSFFPKGEDFYCVTCHETKFAKHCVKCNKAITSGGITYQDQPWHADCFVCVTCSKKLAGQRFTAVEDQYYCVDCYKNFVAKKCAGCKNPITGKRTVSRVSHPVSKARKPPVCHGKRLPLTLFPSANLRGRHPGGERTCPSWVVVLYRKNRSLAAPRGPGLVKAPVWWPMKDNPGTTTASTAKNAP

SEQ ID NO: 46625 - protein, 257 aa, Homo sapiens
MAEKFDCHYCRDPLQGKKYVQKDGHHCCLKCFDKFCANTCVECRKPIGADSKEVHYKNRFWHDTCFRCAKCLHPLANETFVAKDNKILCNKCTTREDSPKCKGCFKAIVAGDQNVEYKGTVWHKDCFTCSNCKQVIGTGSFFPKGEDFYCVTCHETKFAKHCVKCNKAITSGGITYQDQPWHADCFVCVTCSKKLAGQRFTAVEDQYYCVDCYKNFVAKKCAGCKNPITGFGKGSSVVAYEGQSWHDYCFHCKKCSV

SEQ ID NO: 46626 - protein, 210 aa, Homo sapiens
MASHRHSGPSSYKVGTMAEKFDCHYCRDPLQGKKYVQKDGHHCCLKCFDKFCANTCVECRKPIGADSKEVHYKNRFWHDTCFRCAKCLHPLANETFVAKDNKILCNKCTTREDSPKCKGCFKAIVAGDQNVEYKGTVWHKDCFTCSNCKQVIGTGSFFPKGEDFYCVTCHETKFAKHCVKCNKGLVKAPVWWPMKDNPGTTTASTAKNAP

SEQ ID NO: 46627 - protein, 296 aa, Homo sapiens
MASHRHSGPSSYKVGTMAEKFDCHYCRDPLQGKKYVQKDGHHCCLKCFDKFCANTCVECRKPIGADSKEVHYKNRFWHDTCFRCAKCLHPLANETFVAKDNKILCNKCTTREDSPKCKGCFKAIVAGDQNVEYKGTVWHKDCFTCSNCKQVIGTGSFFPKGEDFYCVTCHETKFAKHCVKCNKAITSGGITYQDQPWHADCFVCVTCSKKLAGQRFTAVEDQYYCVDCYKNFVAKKCAGCKNPITGFGKGSSVVAYEGQSWHDYCFHCKKCSVNLANKRFVFHQEQVYCPDCAKKL

SEQ ID NO: 46628 - protein, 280 aa, Homo sapiens
MAEKFDCHYCRDPLQGKKYVQKDGHHCCLKCFDKFCANTCVECRKPIGADSKEVHYKNRFWHDTCFRCAKCLHPLANETFVAKDNKILCNKCTTREDSPKCKGCFKAIVAGDQNVEYKGTVWHKDCFTCSNCKQVIGTGSFFPKGEDFYCVTCHETKFAKHCVKCNKAITSGGITYQDQPWHADCFVCVTCSKKLAGQRFTAVEDQYYCVDCYKNFVAKKCAGCKNPITGFGKGSSVVAYEGQSWHDYCFHCKKCSVNLANKRFVFHQEQVYCPDCAKKL

SEQ ID NO: 46629 - protein, 280 aa, Homo sapiens; identical to SEQ ID NO: 46628

SEQ ID NO: 46630 - protein, 323 aa, Homo sapiens; identical to SEQ ID NO: 46624

SEQ ID NO: 46631 - protein, 204 aa, Homo sapiens
MAEKFDCHYCRDPLQGKKYVQKDGHHCCLKCFDKFCANTCVECRKPIGADSKEVHYKNRFWHDTCFRCAKCLHPLANETFVAKDNKILCNKCTTREDSPKCKGCFKAIVAGDQNVEYKGTVWHKDCFTCSNCKQVIGTGSFFPKGEDFYCVTCHETKFAKHCVKCNKAITSGGITYQDQPWHADCFVCVTCSKKLAGQRFTAVE

SEQ ID NO: 46632 - protein, 207 aa, Homo sapiens
MAEKFDCHYCRDPLQGKKYVQKDGHHCCLKCFDKFCANTCVECRKPIGADSKEVHYKNRFWHDTCFRCAKCLHPLANETFVAKDNKILCNKCTTREDSPKCKGCFKAIVAGDQNVEYKGTVWHKDCFTCSNCKQVIGTGSFFPKGEDFYCVTCHETKFAKHCVKCNKAITSGGITYQDQPWHADCFVCVTCSKKLAGQRFTAVEDQY

SEQ ID NO: 46633 - protein, 141 aa, Homo sapiens
MAEKFDCHYCRDPLQGKKYVQKDGHHCCLKCFDKFCANTCVECRKPIGADSKEVHYKNRFWHDTCFRCAKCLHPLANETFVAKDNKILCNKCTTREDSPKCKGCFKAIVAGDQNVEYKGTVWHKDCFTCSNCKQVIGTGSF

SEQ ID NO: 46634 - protein, 207 aa, Homo sapiens; identical to SEQ ID NO: 46632

SEQ ID NO: 46635 - protein, 320 aa, Homo sapiens
MSHFILRHLGSCFQPYPAFAEYILSATHPASGPSSYKVGTMAEKFDCHYCRDPLQGKKYVQKDGHHCCLKCFDKFCANTCVECRKPIGADSKEVHYKNRFWHDTCFRCAKCLHPLANETFVAKDNKILCNKCTTREDSPKCKGCFKAIVAGDQNVEYKGTVWHKDCFTCSNCKQVIGTGSFFPKGEDFYCVTCHETKFAKHCVKCNKAITSGGITYQDQPWHADCFVCVTCSKKLAGQRFTAVEDQYYCVDCYKNFVAKKCAGCKNPITGFGKGSSVVAYEGQSWHDYCFHCKKCSVNLANKRFVFHQEQVYCPDCAKKL

SEQ ID NO: 46636 - protein, 205 aa, Homo sapiens
MAEKFDCHYCRDPLQGKKYVQKDGHHCCLKCFDKFCANTCVECRKPIGADSKEVHYKNRFWHDTCFRCAKCLHPLANETFVAKDNKILCNKCTTREDSPKCKGCFKAIVAGDQNVEYKGTVWHKDCFTCSNCKQVIGTGSFFPKGEDFYCVTCHETKFAKHCVKCNKAITSGGITYQDQPWHADCFVCVTCSKKLAGQRFTAVED

SEQ ID NO: 46637 - protein, 155 aa, Homo sapiens
MAEKFDCHYCRDPLQGKKYVQKDGHHCCLKCFDKFCANTCVECRKPIGADSKEVHYKNRFWHDTCFRCAKCLHPLANETFVAKDNKILCNKCTTREDSPKCKGCFKAIVAGDQNVEYKGTVWHKDCFTCSNCKQVIGTGSFFPKGEDFYCVTCHE

SEQ ID NO: 46638 - protein, 280 aa, Homo sapiens; identical to SEQ ID NO: 46628

SEQ ID NO: 46639 - protein, 260 aa, Homo sapiens [sequence omitted]

SEQ ID NO: 46640 - protein, 309 aa, Homo sapiens
MTFYVASLALELIWMLSSPAGPSSYKVGTMAEKFDCHYCRDPLQGKKYVQKDGHHCCLKCFDKFCANTCVECRKPIGADSKEVHYKNRFWHDTCFRCAKCLHPLANETFVAKDNKILCNKCTTREDSPKCKGCFKAIVAGDQNVEYKGTVWHKDCFTCSNCKQVIGTGSFFPKGEDFYCVTCHETKFAKHCVKCNKAITSGGITYQDQPWHADCFVCVTCSKKLAGQRFTAVEDQYYCVDCYKNFVAKKCAGCKNPITGFGKGSSVVAYEGQSWHDYCFHCKKCSVNLANKRFVFHQEQVYCPDCAKKL

SEQ ID NO: 46641 - protein, 275 aa, Homo sapiens
MASHRHSGPSSYKVGTMAEKFDCHYCRDPLQGKKYVQKDGHHCCLKCFDKFCANTCVECRKPIGADSKEVHYKNRFWHDTCFRCAKCTTREDSPKCKGCFKAIVAGDQNVEYKGTVWHKDCFTCSNCKQVIGTGSFFPKGEDFYCVTCHETKFAKHCVKCNKAITSGGITYQDQPWHADCFVCVTCSKKLAGQRFTAVEDQYYCVDCYKNFVAKKCAGCKNPITGFGKGSSVVAYEGQSWHDYCFHCKKCSVNLANKRFVFHQEQVYCPDCAKKL

SEQ ID NO: 46642 - protein, 280 aa, Homo sapiens; identical to SEQ ID NO: 46628

SEQ ID NO: 46643 - protein, 279 aa, Homo sapiens
MTERFDCHHCNESLFGKKYILREESPYCVVCFETLFANTCEECGKPIGCDCKDLSYKDRHWHEACFHCSQCRNSLVDKPFAAKEDQLLCTDCYSNEYSSKCQECKKTIMPGTRKMEYKGSSWHETCFICHRCQQPIGTKSFIPKDNQNFCVPCYEKQHAMQCVQCKKPITTGGVTYREQPWHKECFVCTACRKQLSGQRFTARDDFAYCLNCFCDLYAKKCAGCTNPISGLGGTKYISFEERQWHNDCFNCKKCSLSLVGRGFLTERDDILCPDCGKDI

SEQ ID NO: 46644 - protein, 151 aa, Homo sapiens
MTERFDCHHCNESLFGKKYILREESPYCVVCFETLFANTCEECGKPIGCDCKVPARWSTRAAAGMRPASSATAASSQLEPRVSSPKTIRISVCPAMRNNMPCSAFSAKSPSPREGSLTGSSPGTRSASCAPPAGSSCLGSASQLAMTLPTA

SEQ ID NO: 46645 - protein, 389 aa, Homo sapiens
MTRRGFSRAGAAQRSTRPAAEPQPPAARALQPRPGVPGPLRCREYLQPPAPRREAEGLSHQGSEVGAESGARPKERGAEPELGRLWLRTVSSWRLGWHFDFGVAEKPGVKMTERFDCHHCNESLFGKKYILREESPYCVVCFETLFANTCEECGKPIGCDCKDLSYKDRHWHEACFHCSQCRNSLVDKPFAAKEDQLLCTDCYSNEYSSKCQECKKTIMPGTRKMEYKGSSWHETCFICHRCQQPIGTKSFIPKDNQNFCVPCYEKQHAMQCVQCKKPITTGGVTYREQPWHKECFVCTACRKQLSGQRFTARDDFAYCLNCFCDLYAKKCAGCTNPISGLGGTKYISFEERQWHNDCFNCKKCSLSLVGRGFLTERDDILCPDCGKDI

SEQ ID NO: 46646 - protein, 279 aa, Homo sapiens; identical to SEQ ID NO: 46643

SEQ ID NO: 46647 - protein, 279 aa, Homo sapiens; identical to SEQ ID NO: 46643

SEQ ID NO: 46648 - protein, 279 aa, Homo sapiens; identical to SEQ ID NO: 46643

SEQ ID NO: 46649 - protein, 279 aa, Homo sapiens; identical to SEQ ID NO: 46643

SEQ ID NO: 46650 - protein, 279 aa, Homo sapiens; identical to SEQ ID NO: 46643

SEQ ID NO: 46651 - protein, 279 aa, Homo sapiens; identical to SEQ ID NO: 46643

SEQ ID NO: 46652 - protein, 19 aa, Homo sapiens
MTERFDCHHCNESLFGKKY

SEQ ID NO: 46653 - protein, 144 aa, Homo sapiens
MTRRGFSRAGAAQRSTRPAAEPQPPAARALQPRPGVPGPLRCREYLQPPAPRREAEGLSHQGSEVGAESGARPKERGAEPELGRLWLRTVSSWRLGWHFDFGTESRFVAQAGVQWHDLSSLQALPLGSRHSPAPASQVAGTTGC

SEQ ID NO: 46654 - protein, 280 aa, Homo sapiens
MSESFDCAKCNESLYGRKYIQTDSGPYCVPCYDNTFANTCAECQQLIGHDSRELFYEDRHFHEGCFRCCRCQRSLADEPFTCQDSELLCNDCYCSAFSSQCSACGETVMPGSRKLEYGGQTWHEHCFLCSGCEQPLGSRSFVPDKGAHYCVPCYENKFAPRCARCSKTLTQGGVTYRDQPWHRECLVCTGCQTPLAGQQFTSRDEDPYCVACFGELFAPKCSSCKRPIVGLGGGKYVSFEDRHWHHNCFSCARCSTSLVGQGFVPDGDQVLCQGCSQAGP

SEQ ID NO: 46655 - protein, 284 aa, Homo sapiens
MTTAHFYCQYCTASLLGKKYVLKDDSPYCVTCYDRVFSNYCEECKKPIESDSKDLCYKDRHWHEGCFKCTKCNHSLVEKPFAAKDERLLCTECYSNECSSKCFHCKRTIMPGSRKMEFKGNYWHETCFVCENCRQPIGTKPLISKESGNYCVPCFEKEFAHYCNFCKKVITSGGITFCDQLWHKECFLCSGCRKDLCEEQFMSRDDYPFCVDCYNHLYANKCVACSKPISGLTGAKFICFQDSQWHSECFNCGKCSVSLVGKGFLTQNKEIFCQKCGSGMDTDI

SEQ ID NO: 46656 - protein, 210 aa, Homo sapiens
MTTAHFYCQYCTASLLGKKYVLKDDSPYCVTCYDRVFSNYCEECKKPIESDSKDLCYKDRHWHEGCFKCTKCNHSLVEKPFAAKDERLLCTECYSNECSSKCFHCKRTIMPGSRKMEFKGNYWHETCFVCENCRQPIGTKPLISKESGNYCVPCFEKEFAHYCNFCKKVITSGGITFCDQLWHKECFLCSGCRKDLCEEQFMSRDDYPFC

SEQ ID NO: 46657 - protein, 284 aa, Homo sapiens; identical to SEQ ID NO: 46655

SEQ ID NO: 46658 - protein, 437 aa, Homo sapiens
MGRRMRGAAATAGLWLLALGSLLALWGGLLPPRTELPASRPPEDRLPRRPARSGGPAPAPRFPLPPPLAWDARGGSLKTFRALLTLAAGADGPPRQSRSEPRWHVSARQPRPEESAAVHGGVFWSRGLEEQVPPGFSEAQAAAWLEAARGARMVALERGGCGRSSNRLARFADGTRACVRYGINPEQIQGEALSYYLARLLGLQRHVPPLALARVEARGAQWAQVQEELRAAHWTEGSVVSLTRWLPNLTDVVVPAPWRSEDGRLRPLRDAGGELANLSQAELVDLVQWTDLILFDYLTANFDRLVSNLFSLQWDPRVMQRATSNLHRGPGGALVFLDNEAGLVHGYRVAGMWDKYNEPLLQSVCVFRERTARRVLELHRGQDAAARLLRLYRRHEPRFPELAALADPHAQLLQRRLDFLAKHILHCKAKYGRRSGT

SEQ ID NO: 46659 - protein, 103 aa, Homo sapiens
MERQQQQQQQLRNLRDFLLVYNRMTELCFQRCVPSLHHRALDAEEEACLHSCAGKLIHSNHRLMAAYVQLMPALVQRRIADYEAASAVPGVAAEQPGVSPSGS

SEQ ID NO: 46660 - protein, 103 aa, Homo sapiens; identical to SEQ ID NO: 46659

SEQ ID NO: 46661 - protein, 103 aa, Homo sapiens; identical to SEQ ID NO: 46659

SEQ ID NO: 46662 - protein, 315 aa, Homo sapiens
MHGHGGYDSDFSDDERCGESSKRKKRTVEDDLLLQKPFQKEKHGKVAHKQVAAELLDREEARNRRFHLIAMDAYQRHTKFVNDYILYYGGKKEDFKRLGENDKTDLDVIRENHRFLWNEEDEMDMTWEKRLAKKYYDKLFKEYCIADLSKYKENKFGFRWRVEKEVISGKGQFFCGNKYCDKKEGLKSWEVNFGYIEHGEKRNALVKLRLCQECSIKLNFHHRRKEIKSKKRKDKTKKDCEESSHKKSRLSSAEEASKKKDKGHSSSKKSEDSLLRNSDEEESASESELWKGPLPETDEKSQEEEFDEYFQDLFL

SEQ ID NO: 46663 - protein, 315 aa, Homo sapiens
MHGHGGYDSDFSDDERCGESSKRKKRTVEDDLLLQKPFQKEKHGKVAHKQVAAELLDREEARNRRFHLIAMDAYQRHTKFVNDYILYYGGKKEDFKRLGENDKTDLDVIRENHRFLWNEEDEMDMTWEKRLAKKYYDKLFKEYCIADLSKYKENKFGFRWRVEKEVISGKGQFFCGNKYCDKKEGLKSWEVNFGYIEHGEKRNALVKLRLCQECSIKLNFHHRRKEIKSKKRKDKTKKDCEESSHKKSRLSSAEEASKKKDKGHSSSKKSEDSLLRRMLEELQMFTWEKSERMGGKRLIIIIGEELSANVTTFKM

SEQ ID NO: 46664 - protein, 313 aa, Homo sapiens
MHGHGGYDSDFSDDERCGESSKRKKRTVEDDLLLQKPFQKEKHGKVAHKQVAAELLDREEARNRRFHLIAMDAYQRHTKFVNDYILYYGGKKEDFKRLGENDKTDLDVIRENHRFLWNEEDEMDMTWEKRLAKKYYDKLFKEYCIADLSKYKENKFGFRWRVEKEVISGKGQFFCGNKYCDKKEGLKSWEVNFGYIEHGEKRNALVKLRLCQECSIKLNFHHRRKEIKSKKRKDKTKKDCEESSHKKSRLSSAEEASKKKDKGHSSSKKSEDSLLNGVMLFHPGWSAVARSQLTAAPASQVQTNNHYWRGVVC

SEQ ID NO: 46665 - protein, 292 aa, Homo sapiens
MHGHGGYDSDFSDDERCGESSKRKKRTVEDDLLLQKPFQKEKHGKVAHKQVAAELLDREEARNRRFHLIAMDAYQRHTKFVNDYILYYGGKKEDFKRLGENDKTDLDVIRENHRFLWNEEDEMDMTWEKRLAKKYYDKLFKEYCIADLSKYKENKFGFRWRVEKEVISGKGQFFCGNKYCDKKEGLKSWEVNFGYIEHGEKRNALVKLRLCQECSIKLNFHHRRKEIKSKKRKDKTKKDCEESSHKKSRLSSAEEASKKKDKGHSSSKKSEDSLLKTYFVGLLSESNEKTYM

SEQ ID NO: 46666 - protein, 276 aa, Homo sapiens
MHGHGGYDSDFSDDERCGESSKRKKRTVEDDLLLQKPFQKEKHGKVAHKQVAAELLDREEARNRRFHLIAMDAYQRHTKFVNDYILYYGGKKEDFKRLGENDKTDLDVIRENHRFLWNEEDEMDMTWEKRLAKKYYDKLFKEYCIADLSKYKENKFGFRWRVEKEVISGKGQFFCGNKYCDKKEGLKSWEVNFGYIEHGEKRNALVKLRLCQECSIKLNFHHRRKEIKSKKRKDKTKKDCEESSHKKSRLSSAEEASKKKDKGHSSSKKSEDSLLN

SEQ ID NO: 46667 - protein, 611 aa, Homo sapiens
MEELVVEVRGSNGAFYKAFVKDVHEDSITVAFENNWQPDRQIPFHDVRFPPPVGYNKDINESDEVEVYSRANEKEPCCWWLAKVRMIKGEFYVIEYAACDATYNEIVTIERLRSVNPNKPATKDTFHKIKLDVPEDLRQMCAKEAAHKDFKKAVGAFSVTYDPENYQLVILSINEVTSKRAHMLIDMHFRSLRTKLSLIMRNEEASKQLESSRQLASRFHEQFIVREDLMGLAIGTHGANIQQARKVPGVTAIDLDEDTCTFHIYGEDQDAVKKARSFLEFAEDVIQVPRNLVGKVIGKNGKLIQEIVDKSGVVRVRIEAENEKNVPQEEEIMPPNSLPSNNSRVGPNAPEEKKHLDIKENSTHFSQPNSTKVQRGMVPFVFVGTKDSIANATVLLDYHLNYLKEVDQLRLERLQIDEQLRQIGASSRPPPNRTDKEKSYVTDDGQGMGRGSRPYRNRGHGRRGPGYTSGTNSEASNASETESDHRDELSDWSLAPTEEERESFLRRGDGRRRGGGGRGQGGRGRGGGFKGNDDHSRTDNRPRNPREAKGRTTDGSLQIRVDCNNERSVHTKTLQNTSSEGSRLRTGKDRNQKKEKPDSVDGQQPLVNGVP

SEQ ID NO: 46668 - protein, 297 aa, Homo sapiens
MEELVVEVRGSNGAFYKAFVKDVHEDSITVAFENNWQPDRQIPFHDVRFPPPVGYNKDINESDEVEVYSRANEKEPCCWWLAKVRMIKGEFYVIEYAACDATYNEIVTIERLRSVNPNKPATKDTFHKIKLDVPEDLRQMCAKEAAHKDFKKAVGAFSVTYDPENYQLVILSINEVTSKRAHMLIDMHFRSLRTKLSLIMRNEEASKQLESSRQLASRFHEQFIVREDLMGLAIGTHGANIQQARKVPGVTAIDLDEDTCTFHIYGEDQDAVKKARSFLEFAEDVIQVPRNLVGLKI

SEQ ID NO: 46669 - protein, 590 aa, Homo sapiens
MEELVVEVRGSNGAFYKAFVKDVHEDSITVAFENNWQPDRQIPFHDVRFPPPVGYNKDINESDEVEVYSRANEKEPCCWWLAKVRMIKGEFYVIEYAACDATYNEIVTIERLRSVNPNKPATKDTFHKIKLDVPEDLRQMCAKEAAHKDFKKAVGAFSVTYDPENYQLVILSINEVTSKRAHMLIDMHFRSLRTKLSLIMRNEEASKQLESSRQLASRFHEQFIVREDLMGLAIGTHGANIQQARKVPGVTAIDLDEDTCTFHIYGEDQDAVKKARSFLEFAEDVIQVPRNLVGKVIGKNGKLIQEIVDKSGVVRVRIEAENEKNVPQEEEIMPPNSLPSNNSRVGPNAPEEKKHLDIKENSTHFSQPNSTKVQRVLVASSVVAGESQKPELKAWQGMVPFVFVGTKDSIANATVLLDYHLNYLKEVDQLRLERLQIDEQLRQIGASSRPPPNRTDKEKSYVTDDGQGMGRGSRPYRNRGHGRRGPGYTSAPTEEERESFLRRGDGRRRGGGGRGQGGRGRGGGFKGNDDHSRTDNRPRNPREAKGRTTDGSLQNTSSEGSRLRTGKDRNQKKEKPDSVDGQQPLVNGVP

SEQ ID NO: 46670 - protein, 537 aa, Homo sapiens
MEELVVEVRGSNGAFYKAFVKDVHEDSITVAFENNWQPDRQIPFHDVRFPPPVGYNKDINESDEVEVYSRANEKEPCCWWLAKVRMIKGEFYVIEYAACDATYNEIVTIERLRSVNPNKPATKDTFHKIKLDVPEDLRQMCAKEAAHKDFKKAVGAFSVTYDPENYQLVILSINEVTSKRAHMLIDMHFRSLRTKLSLIMRNEEASKQLESSRQLASRFHEQFIVREDLMGLAIGTHGANIQQARKVPGVTAIDLDEDTCTFHIYGEDQDAVKKARSFLEFAEDVIQVPRNLVGKVIGKNGKLIQEIVDKSGVVRVRIEAENEKNVPQEEEIMPPNSLPSNNSRVGPNAPEEKKHLDIKENSTHFSQPNSTKVQRVLVASSVVAGESQKPELKAWQGMVPFVFVGTKDSIANATVLLDYHLNYLKLQQRKRGRASCAEETDGGVEGEEEDKEEEDVEEASKETTITPEQIIVHVIQERLKEEQQMDPFRSELTAIMKGVSTLKHYRIPPVKVVGCARVKIVTRRKRSQTAWMVSNHS

SEQ ID NO: 46671 - protein, 632 aa, Homo sapiens [sequence omitted]

SEQ ID NO: 46672 - protein, 582 aa, Homo sapiens
MEELVVEVRGSNGAFYKAFVKDVHEDSITVAFENNWQPDRQIPFHDVRFPPPVGYNKDINESDEVEVYSRANEKEPCCWWLAKVRMIKGEFYVIEYAACDATYNEIVTIERLRSVNPNKPATKDTFHKIKLDVPEDLRQMCAKEAAHKDFKKAVGAFSVTYDPENYQLVILSINEVTSKRAHMLIDMHFRSLRTKLSLIMRNEEASKQLESSRQLASRFHEQFIVREDLMGLAIGTHGANIQQARKVPGVTAIDLDEDTCTFHIYGEDQDAVKKARSFLEFAEDVIQVPRNLVGKVIGKNGKLIQEIVDKSGVVRVRIEAENEKNVPQEEEIMPPNSLPSNNSRVGPNAPEEKKHLDIKENSTHFSQPNSTKVQRGMVPFVFVGTKDSIANATVLLDYHLNYLKEVDQLRLERLQIDEQLRQIGASSRPPPNRTDKEKSYVTDDGQGMGRGSRPYRNRGHGRRGPGYTSESDHRDELSDWSLAPTEEERESFLRRGDGRRRGGGGRGQGGRGRGGGFKGNDDHSRTDNRPRNPREAKGRTTDGSLQNTSSEGSRLRTGKDRNQKKEKPDSVDGQQPLVNGVP

SEQ ID NO: 46673 - protein, 592 aa, Homo sapiens
MEELVVEVRGSNGAFYKAFVKDVHEDSITVAFENNWQPDRQIPFHDVRFPPPVGYNKDINESDEVEVYSRANEKEPCCWWLAKVRMIKGEFYVIEYAACDATYNEIVTIERLRSVNPNKPATKDTFHKIKLDVPEDLRQMCAKEAAHKDFKKAVGAFSVTYDPENYQLVILSINEVTSKRAHMLIDMHFRSLRTKLSLIMRNEEASKQLESSRQLASRFHEQFIVREDLMGLAIGTHGANIQQARKVPGVTAIDLDEDTCTFHIYGEDQDAVKKARSFLEFAEDVIQVPRNLVVIGKNGKLIQEIVDKSGVVRVRIEAENEKNVPQEEEIMPPNSLPSNNSRVGPNAPEEKKHLDIKENSTHFSQPNSTKVQRGMVPFVFVGTKDSIANATVLLDYHLNYLKEVDQLRLERLQIDEQLRQIGASSRPPPNRTDKEKSYVTDDGQGMGRGSRPYRNRGHGRRGPGYTSGTNSEASNASETESDHRDELSDWSLAPTEEERESFLRRGDGRRRGGGGRGQGGRGRGGGFKGNDDHSRTDNRPRNPREAKGRTTDGSLQNTSSEGSRLRTGKDRNQKKEKPDSVDGQQPLVNGVP

SEQ ID NO: 46674 - protein, 262 aa, Homo sapiens
MPPNSLPSNNSRVGPNAPEEKKHLDIKENSTHFSQPNSTKVQRGMVPFVFVGTKDSIANATVLLDYHLNYLKEVDQLRLERLQIDEQLRQIGASSRPPPNRTDKEKSYVTDDGQGMGRGSRPYRNRGHGRRGPGYTSGTNSEASNASETESDHRDELSDWSLAPTEEERESFLRRGDGRRRGGGGRGQGGRGRGGGFKGNDDHSRTDNRPRNPREAKGRTTDGSLQNTSSEGSRLRTGKDRNQKKEKPDSVDGQQPLVNGVP

SEQ ID NO: 46675 - protein, 536 aa, Homo sapiens
MMKGEFYVIEYAACDATYNEIVTFERLRPVNQNKTVKKNTFFKCTVDVPEDLREACANENAHKDFKKAVGACRIFYHPETTQLMILSASEATVKRVNILSDMHLRSIRTKLMLMSRNEEATKHLECTKQLAAAFHEEFVVREDLMGLAIGTHGSNIQQARKVPGVTAIELDEDTGTFRIYGESADAVKKARGFLEFVEDFIQVPRNLVGKVIGKNGKVIQEIVDKSGVVRVRIEGDNENKLPREDGMVPFVFVGTKESIGNVQVLLEYHIAYLKEVEQLRMERLQIDEQLRQIGSRSYSGRGRGRRGPNYTSGYGTNSELSNPSETESERKDELSDWSLAGEDDRDSRHQRDSRRRPGGRGRSVSGGRGRGGPRGGKSSISSVLKDPDSNPYSLLDNTESDQTADTDASESHHSTNRRRRSRRRRTDEDAVLMDGMTESDTASVNENGLVTVADYISRAESQSRQRNLPRETLAKNKKEMAKDVIEEHGPSEKAINGPTSASGDDISKLQRTPGEEKINTLKEENTQEAAVLNGVS

SEQ ID NO: 46676 - protein, 621 aa, Homo sapiens
MAELTVEVRGSNGAFYKGFIKDVHEDSLTVVFENNWQPERQVPFNEVRLPPPPDIKKEISEGDEVEVYSRANDQEPCGWWLAKVRMMKGEFYVIEYAACDATYNEIVTFERLRPVNQNKTVKKNTFFKCTVDVPEDLREACANENAHKDFKKAVGACRIFYHPETTQLMILSASEATVKRVNILSDMHLRSIRTKLMLMSRNEEATKHLECTKQLAAAFHEEFVVREDLMGLAIGTHGSNIQQARKVPGVTAIELDEDTGTFRIYGESADAVKKARGFLEFVEDFIQVPRNLVGKVIGKNGKVIQEIVDKSGVVRVRIEGDNENKLPREDGMVPFVFVGTKESIGNVQVLLEYHIAYLKEVEQLRMERLQIDEQLRQIGSRSYSGRGRGRRGPNYTSGYGTNSELSNPSETESERKDELSDWSLAGEDDRDSRHQRDSRRRPGGRGRSVSGGRGRGGPRGGKSSISSVLKDPDSNPYSLLDNTESDQTADTDASESHHSTNRRRRSRRRRTDEDAVLMDGMTESDTASVNENGLVTVADYISRAESQSRQRNLPRETLAKNKKEMAKDVIEEHGPSEKAINGPTSASGDDISKLQRTPGEEKINTLKEENTQEAAVLNGVS

SEQ ID NO: 46677 - protein, 539 aa, Homo sapiens
MAELTVEVRGSNGAFYKGFIKDVHEDSLTVVFENNWQPERQVPFNEVRLPPPPDIKKEISEGDEVEVYSRANDQEPCGWWLAKVRMMKGEFYVIEYAACDATYNEIVTFERLRPVNQNKTVKKNTFFKCTVDVPEDLREACANENAHKDFKKAVGACRIFYHPETTQLMILSASEATVKRVNILSDMHLRSIRTKLMLMSRNEEATKHLECTKQLAAAFHEEFVVREDLMGLAIGTHGSNIQQARKVPGVTAIELDEDTGTFRIYGESADAVKKARGFLEFVEDFIQVPRNLVGKVIGKNGKVIQEIVDKSGVVRVRIEGDNENKLPREDGMVPFVFVGTKESIGNVQVLLEYHIAYLKEVEQLRMERLQIDEQLRQIGSRSYSGRGRGRRGPNYTSGYGTNSELSNPSETESERKDELSDWSLAGEDDRDSRHQRDSRRRPGGRGRSVSGGRGRGGPRGGKSSISSVLKDPDSNPYSLLDNTESDQTADTDASESHHSTNRRRRSRRRRTDEDAVLMDGMTESDTASVNENGLGKRCD

SEQ ID NO: 46678 - protein, 608 aa, Homo sapiens
MVTEGFIKDVHEDSLTVVFENNWQPERQVPFNEVRLPPPPDIKKEISEGDEVEVYSRANDQEPCGWWLAKVRMMKGEFYVIEYAACDATYNEIVTFERLRPVNQNKTVKKNTFFKCTVDVPEDLREACANENAHKDFKKAVGACRIFYHPETTQLMILSASEATVKRVNILSDMHLRSIRTKLMLMSRNEEATKHLECTKQLAAAFHEEFVVREDLMGLAIGTHGSNIQQARKVPGVTAIELDEDTGTFRIYGESADAVKKARGFLEFVEDFIQVPRNLVGKVIGKNGKVIQEIVDKSGVVRVRIEGDNENKLPREDGMVPFVFVGTKESIGNVQVLLEYHIAYLKEVEQLRMERLQIDEQLRQIGSRSYSGRGRGRRGPNYTSGYGTNSELSNPSETESERKDELSDWSLAGEDDRDSRHQRDSRRRPGGRGRSVSGGRGRGGPRGGKSSISSVLKDPDSNPYSLLDNTESDQTADTDASESHHSTNRRRRSRRRRTDEDAVLMDGMTESDTASVNENGLVTVADYISRAESQSRQRNLPRETLAKNKKEMAKDVIEEHGPSEKAINGPTSASGDDISKLQRTPGEEKINTLKEENTQEAAVLNGVS

SEQ ID NO: 46679 - protein, 673 aa, Homo sapiens
MGGLASGGDVEPGLPVEVRGSNGAFYKGFVKDVHEDSVTIFFENNWQSERQIPFGDVRLPPPADYNKEITEGDEVEVYSRANEQEPCGWWLARVRMMKGDFYVIEYAACDATYNEIVTLERLRPVNPNPLATKGSFFKVTMAVPEDLREACSNENVHKEFKKALGANCIFLNITNSELFILSTTEAPVKRASLLGDMHFRSLRTKLLLMSRNEEATKHLETSKQLAAAFQEEFTVREDLMGLAIGTHGANIQQARKVPGVTAIELGEETCTFRIYGETPEACRQARSYLEFSEDSVQVPRNLVGKVIGKNGKVIQEIVDKSGVVRVRVEGDNDKKNPREEGMVPFIFVGTRENISNAQALLEYHLSYLQEVEQLRLERLQIDEQLRQIGLGFRPPGSGRGSGGSDKAGYSTDESSSSSLHATRTYGGSYGGRGRGRRTGGPAYGPSSDVSTASETESEKREEPNRAGPGDRDPPTRGEESRRRPTGGRGRGPPPAPRPTSRYNSSSISSVLKDPDSNPYSLLDTSEPEPPVDSEPGEPPPASARRRRSRRRRTDEDRTVMDGGLESDGPNMTENGLEDESRPQRRNRSRRRRNRGNRTDGSISGDRQPVTVADYISRAESQSRQRPPLERTKPSEDSLSGQKGDSVSKLPKGPSENGELSAPLELGSMVNGVS

SEQ ID NO: 46680 - protein, 2179 aa, Homo sapiens
MNSLSWGAANAVLLLLLLAWASPTFISINRGVRVMKGHSAFLSGDDLKFAIPKEKDACKVEVVMNEPITQRVGKLTPQVFDCHFLPNEVKYVHNGCPILDEDTVKLRLYRFTERDTFIETFILWVYLLEPDCNIIHMSNNVLEVPEFNGLSQAIDKNLLRFDYDRMASLECTVSLDTARTRLPAHGQMVLGEPRPEEPRGDQPHSFFPESQLRAKLKCPGGSCTPGLKKIGSLKVSCEEFLLMGLRYQHLDPPSPNIDYISIQLDLTDTRSKIVYKSESAWLPVYIRAGIPNQIPKAAFMAVFILEVDQFILTSLTTSVLDCEEDETPKPLLVFNITKAPLQGYVTHLLDHTRPISSFTWKDLSDMQIAYQPPNSSHSERRHDEVELEVYDFFFERSAPMTVHISIRTADTNAPRVSWNTGLSLLEGQSRAITWEQFQVVDNDDIGAVRLVTVGGLQHGWLTLRGGKGFLFTVADLQAGVVRYHHDDSDSTKDFVVFRIFDGHHSIRHKFPINVLPKDDSPPFLITNVVIELEEGQTILIQGSMLRASDVDASDDYIFFNITKPPQAGEIMKKPGPGLIGYPVHGFLQRDLFNGIIYYRHFGGEIFEDSFQFVLWDSHEPPNLSVPQVATIHITPVDDQLPKEAPGVSRHLVVKETEVAYITKKQLHFIDSESYDRELVYTITTPPFFSFSHRHLDAGKLFMVDSIPKVVKNPTALELRSFTQHAVNYMKVAYMPPMQDIGPHCRDVQFTFSVSNQHGGTLHGICFNITILPVDNQVPEAFTNPLKVTEGGQSIISTEHILISDADTKLDNIDLSLRELPLHGRVELNGFPLNSGGTFSWGDLHTLKVRYQHDGTEVLQDDLLLEVTDGTNSAEFVLHVEVFPVNDEPPVLKADLMPVMNCSEGGEVVITSEYIFATDVDSDNLKLMFVIAREPQHGVVRRAGVTVDQFSQRDVISEAVTYKHTGGEIGLMPCFDTITLVVSDGEAGPFVNGCCYNGPNPSVPLHASFPVYDLNITVYPVDNQPPSIAIGPVFVVDEGCSTALTVNHLSATDPDTAADDLEFVLVSPPQFGYLENILPSVGFEKSNIGISIDSFQWKDMNAFHINYVQSRHLRIEPTADQFTVYVTDGKHHSLEIPFSIIINPTNDEAPDFVVQNITVCEGQMKELDSSIISAVDLDIPQDALLFSITQKPRHGLLIDRGFSKDFSENKQPANPHQKHAPVHSFSMELLKTGMRLTYMHDDSESLADDFTIQLSDGKHKILKTISVEVIPVNDEKPMLSKKAEIAMNMGETRIISSAILSAIDEDSPREKIYYVFERLPQNGQLQLKIGRDWVPLSPGMKCTQEEVDLNLLRYTHTGAMDSQNQDSFTFYLWDGNNRSPALDCQITIKDMEKGDIVILTKPLVVSKGDRGFLTTTTLLAVDGTDKPEELLYVITSPPRYGQIEYVHYPGVPITNFSQMDVVGQTVCYVHKSKVTVSSDRFRFIISNGLRTEHGVFEITLETVDRALPVVTRNKGLRLAQGAVGLLSPDLLQLTDPDTPAENLTFLLVQLPQHGQLYLWGTGLLQHNFTQQDVDSKNVAYRHSGGDSQTDCFTFMATDGTNQGFIVNGRVWEEPVLFTIQVDQLDKTAPRITLLHSPSQVGLLKNGCYGIYITSRVLKASDPDTEDDQIIFKILQGPKHGHLENTTTGEFIHEKFSQKDLNSKTILYIINPSLEVNSDTVEFQIMDPTGNSATPQILELKWSHIEWSQTEYEVCENVGLLPLEIIRRGYSMDSAFVGIKVNQVSAAVGKDFTVIPSKLIQFDPGMSTKMWNIAITYDGLEEDDEVFEVILNSPVNAVLGTKTKAAVKILDSKGGQCHPSYSSNQSKHSTWEKGIWHLLPPGSSSSTTSGSFHLERRPLPSSMQLAVIRGDTLRGFDSTDLSQRKLRTRGNGKTVRPSSVYRNGTDIIYNYHGIVSLKLEDDSFPTHKRKAKVSIISQPQKTIKVAELPQADKVESTTDSHFPRQDQLPSFPKNCTLELKGLFHFEEGIQKLYQCNGIAWKAWSPQTKDVEDKSCPAGWHQHSGYCHILITEQKGTWNAAAQACREQYLGNLVTVFSRQHMRWLWDIGGRKSFWIGLNDQVHAGHWEWIGGEPVAFTNGRRGPSQRSKLGKSCVLVQRQGKWQTKDCRRAKPHNYVCSRKL

SEQ ID NO: 46681 - protein, 2180 aa, Homo sapiens
MNSLSWGAANAVLLLLLLAWASPTFISINRGVRVMKGHSAFLSGDDLKFAIPKEKDACKVEVVMNEPITQRVGKLTPQVFDCHFLPNEVKYVHNGCPILDEDTVKLRLYRFTERDTFIETFILWVYLLEPDCNIIHMSNNVLEVPEFNGLSQAIDKNLLRFDYDRMASLECTVSLDTARTRLPAHGQMVLGEPRPEEPRGDQPHSFFPESQLRAKLKCPGGSCTPGLKKIGSLKVSCEEFLLMGLRYQHLDPPSPNIDYISIQLDLTDTRSKIVYKKSESAWLPVYIRAGIPNQIPKAAFMAVFILEVDQFILTSLTTSVLDCEEDETPKPLLVFNITKAPLQGYVTHLLDHTRPISSFTWKDLSDMQIAYQPPNSSHSERRHDEVELEVYDFFFERSAPMTVHISIRTADTNAPRVSWNTGLSLLEGQSRAITWEQFQVVDNDDIGAVRLVTVGGLQHGWLTLRGGKGFLFTVADLQAGVVRYHHDDSDSTKDFVVFRIFDGHHSIRHKFPINVLPKDDSPPFLITNVVIELEEGQTILIQGSMLRASDVDASDDYIFFNITKPPQAGEIMKKPGPGLIGYPVHGFLQRDLFNGIIYYRHFGGEIFEDSFQFVLWDSHEPPNLSVPQVATIHITPVDDQLPKEAPGVSRHLVVKETEVAYITKKQLHFIDSESYDRELVYTITTPPFFSFSHRHLDAGKLFMVDSIPKVVKNPTALELRSFTQHAVNYMKVAYMPPMQDIGPHCRDVQFTFSVSNQHGGTLHGICFNITILPVDNQVPEAFTNPLKVTEGGQSIISTEHILISDADTKLDNIDLSLRELPLHGRVELNGFPLNSGGTFSWGDLHTLKVRYQHDGTEVLQDDLLLEVTDGTNSAEFVLHVEVFPVNDEPPVLKADLMPVMNCSEGGEVVITSEYIFATDVDSDNLKLMFVIAREPQHGVVRRAGVTVDQFSQRDVISEAVTYKHTGGEIGLMPCFDTITLVVSDGEAGPFVNGCCYNGPNPSVPLHASFPVYDLNITVYPVDNQPPSIAIGPVFVVDEGCSTALTVNHLSATDPDTAADDLEFVLVSPPQFGYLENILPSVGFEKSNIGISIDSFQWKDMNAFHINYVQSRHLRIEPTADQFTVYVTDGKHHSLEIPFSIIINPTNDEAPDFVVQNITVCEGQMKELDSSIISAVDLDIPQDALLFSITQKPRHGLLIDRGFSKDFSENKQPANPHQKHAPVHSFSMELLKTGMRLTYMHDDSESLADDFTIQLSDGKHKILKTISVEVIPVNDEKPMLSKKAEIAMNMGETRIISSAILSAIDEDSPREKIYYVFERLPQNGQLQLKIGRDWVPLSPGMKCTQEEVDLNLLRYTHTGAMDSQNQDSFTFYLWDGNNRSPALDCQITIKDMEKGDIVILTKPLVVSKGDRGFLTTTTLLAVDGTDKPEELLYVITSPPRYGQIEYVHYPGVPITNFSQMDVVGQTVCYVHKSKVTVSSDRFRFIISNGLRTEHGVFEITLETVDRALPVVTRNKGLRLAQGAVGLLSPDLLQLTDPDTPAENLTFLLVQLPQHGQLYLWGTGLLQHNFTQQDVDSKNVAYRHSGGDSQTDCFTFMATDGTNQGFIVNGRVWEEPVLFTIQVDQLDKTAPRITLLHSPSQVGLLKNGCYGIYITSRVLKASDPDTEDDQIIFKILQGPKHGHLENTTTGEFIHEKFSQKDLNSKTILYIINPSLEVNSDTVEFQIMDPTGNSATPQILELKWSHIEWSQTEYEVCENVGLLPLEIIRRGYSMDSAFVGIKVNQVSAAVGKDFTVIPSKLIQFDPGMSTKMWNIAITYDGLEEDDEVFEVILNSPVNAVLGTKTKAAVKILDSKGGQCHPSYSSNQSKHSTWEKGIWHLLPPGSSSSTTSGSFHLERRPLPSSMQLAVIRGDTLRGFDSTDLSQRKLRTRGNGKTVRPSSVYRNGTDIIYNYHGIVSLKLEDDSFPTHKRKAKVSIISQPQKTIKVAELPQADKVESTTDSHFPRQDQLPSFPKNCTLELKGLFHFEEGIQKLYQCNGIAWKAWSPQTKDVEDKSCPAGWHQHSGYCHILITEQKGTWNAAAQACREQYLGNLVTVFSRQHMRWLWDIGGRKSFWIGLNDQVHAGHWEWIGGEPVAFTNGRRGPSQRSKLGKSCVLVQRQGKWQTKDCRRAKPHNYVCSRKL

SEQ ID NO: 46682 - protein, 215 aa, Homo sapiens
MLDESLAVRRSKKCKEMIMHWEKKEDIDIVNTVDQLDKTAPRITLLHSPSQVGLLKNGCYGIYITSRVLKASDPDTEDDQIIFKILQGPKHGHLENTTTGEFIHEKFSQKDLNSKTILYIINPSLEVNSDTVEFQIMDPTGNSATPQILELKWSHIEWSQTEYEVCENVGLLPLEIIRRGYSMDSAFVGIKVNQVSAAVGKDFTVIPSKLIQFDP

SEQ ID NO: 46683 - protein, 715 aa, Homo sapiens
MVTQESMLKAALPLFTRFIISNGLRTEHGVFEITLETVDRALPVVTRNKGLRLAQGAVGLLSPDLLQLTDPDTPAENLTFLLVQLPQHGQLYLWGTGLLQHNFTQQDVDSKNVAYRHSGGDSQTDCFTFMATDGTNQGFIVNGRVWEEPVLFTIQVDQLDKTAPRITLLHSPSQVGLLKNGCYGIYITSRVLKASDPDTEDDQIIFKILQGPKHGHLENTTTGEFIHEKFSQKDLNSKTILYIINPSLEVNSDTVEFQIMDPTGNSATPQILELKWSHIEWSQTEYEVCENVGLLPLEIIRRGYSMDSAFVGIKVNQVSAAVGKDFTVIPSKLIQFDPGMSTKMWNIAITYDGLEEDDEVFEVILNSPVNAVLGTKTKAAVKILDSKGGQCHPSYSSNQSKHSTWEKGIWHLLPPGSSSSTTSGSFHLERRPLPSSMQLAVIRGDTLRGFDSTDLSQRKLRTRGNGKTVRPSSVYRNGTDIIYNYHGIVSLKLEDDSFPTHKRKAKVSIISQPQKTIKVAELPQADKVESTTDSHFPRQDQLPSFPKNCTLELKGLFHFEEGIQKLYQCNGIAWKAWSPQTKDVEDKSCPAGWHQHSGYCHILITEQKGTWNAAAQACREQYLGNLVTVFSRQHMRWLWDIGGRKSFWIGLNDQVHAGHWEWIGGEPVAFTNGRRGPSQRSKLGKSCVLVQRQGKWQTKDCRRAKPHNYVCSRKL

SEQ ID NO: 46684 - protein, 2179 aa, Homo sapiens; identical to SEQ ID NO: 46680

SEQ ID NO: 46685 - protein, 3169 aa, Homo sapiens
MHSAGTPGLSSRRTGNSTSFQPGPPPPPRLLLLLLLLLSLVSRVPAQPAAFGRALLSPGLAGAAGVPAEEAIVLANRGLRVPFGREVWLDPLHDLVLQVQPGDRCAVSVLDNDALAQRPGRLSPKRFPCDFGPGEVRYSHLGARSPSRDRVRLQLRYDAPGGAVVLPLVLEVEVVFTQLEVVTRNLPLVVEELLGTSNALDARSLEFAFQPETEECRVGILSGLGALPRYGELLHYPQVPGGAREGGAPETLLMDCKAFQELGVRYRHTAASRSPNRDWIPMVVELRSRGAPVGSPALKREHFQVLVRIRGGAENTAPKPSFVAMMMMEVDQFVLTALTPDMLAAEDAESPSDLLIFNLTSPFQPGQGYLVSTDDRSLPLSSFTQRDLRLLKIAYQPPSEDSDQERLFELELEVVDLEGAASDPFAFMVVVKPMNTMAPVVTRNTGLILYEGQSRPLTGPAGSGPQNLVISDEDDLEAVRLEVVAGLRHGHLVILGASSGSSAPKSFTVAELAAGQVVYQHDDRDGSLSDNLVLRMVDGGGRHQVQFLFPITLVPVDDQPPVLNANTGLTLAEGETVPILPLSLSATDMDSDDSLLLFVLESPFLTTGHLLLRQTHPPHEKQELLRGLWRKEGAFYERTVTEWQQQDITEGRLFYRHSGPHSPGPVTDQFTFRVQDNHDPPNQSGLQRFVIRIHPVDRLPPELGSGCPLRMVVQESQLTPLRKKWLRYTDLDTDDRELRYTVTQSPTDTDENHLPAPLGTLVLTDNPSVVVTHFTQAQINHHKIAYRPPGQELGVATRVAQFQFQVEDRAGNVAPGTFTLYLHPVDNQPPEILNTGFTIQEKGHHILSETELHVNDVDTDVAHISFTLTQAPKHGHMRVSGQILHVGGLFHLEDIKQGRVSYAHNGDKSLTDSCSLEVSDRHHVVPITLRVNVRPVDDEVPILSHPTGTLESYLDVLENGATEITANVIKGTNEETDDLMLTFLLEDPPLYGEILVNGIPAEQFTQRDILEGSVVYTHTSGEIGLLPKADSFNLSLSDMSQEWRIGGNTIQGVTIWVTILPVDSQAPEIFVGEQLIVMEGDKSVITSVHISAEDVDSLNDDILCTIVIQPTSGYVENISPAPGSEKSRAGIAISAFNLKDLRQGHINYVQSVHKGVEPVEDRFVFRCSDGINFSERQFFPIVIIPTNDEQPEMFMREFMVMEGMSLVIDTPILNAADADVPLDDLTFTITQFPTHGHIMNQLINGTVLVESFTLDQIIESSSIIYEHDDSETQEDSFVIKLTDGKHSVEKTVLIIVIPVDDETPRMTINNGLEIEIGDTKIINNKILMATDLDSEDKSLVYIIRYGPGHGLLQRRKPTGAFENITLGMNFTQDEVDRNLIQYVHLGQEGIRDLIKFDVTDGINPLIDRYFYVSIGSIDIVFPDVISKGVSLKEGGKVTLTTDLLSTSDLNSPDENLVFTITRAPMRGHLECTDQPGVSITSFTQLQLAGNKIYYIHTADDEVKMDSFEFQVTDGRNPVFRTFRISISDVDNKKPVVTIHKLVVSESENKLITPFELTVEDRDTPDKLLKFTITQVPIHGHLLFNNTRPVMVFTKQDLNENLISYKHDGTESSEDSFSFTVTDGTHTDFYVFPDTVFETRRPQVMKIQVLAVDNSVPQIAVNKGASTLRTLATGHLGFMITSKILKVEDRDSLHISLRFIVTEAPQHGYLLNLDKGNHSITQFTQADIDDMKICYVLREGANATSDMFYFAVEDGGGNKLTYQNFRLNWAWISFEKEYYLVNEDSKFLDVVLKRRGYLGETSFISIGTRDRTAEKDKDFKGKAQKQVQFNPGQTRATWRVRILSDGEHEQSETFQVVLSEPVLAALEFPTVATVEIVDPGDEPTVFIPQSKYSVEEDVGELFIPIRRSGDVSQELMVVCYTQQGTATGTVPTSVLSYSDYISRPEDHTSVVRFDKDEREKLCRIVIIDDSLYEEEETFHVLLSMPMGGRIGSEFPGAQVTIVPDKDDEPIFYFGDVEYSVDESAGYVEVQVWRTGTDLSKSSSVTVRSRKTDPPSADAGTDYVGISRNLDFAPGVNMQPVRVVILDDLGQPALEGIEKFELVLRMPMNAALGEPSKATVSINDSVSDLPKMQFKERIYTGSESDGQIVTMIHRTGDVQYRSSVRCYTRQGSAQVMMDFEERPNTDTSIITFLPGETEKPCILELMDDVLYEEVEELRLVLGTPQSNSPFGAAVGEQNETLIRIRDDADKTVIKFGETKFSVTEPKEPGESVVIRIPVIRQGDTSKVSIVRVHTKDGSATSGEDYHPVSEEIEFKEGETQHVVEIEVTFDGVREMREAFTVHLKPDENMIAEMQLTKAIVYIEEMSSMADVTFPSVPQIVSLLMYDDTSKAKESAEPMSGYPVICITACNPKYSDYDKTGSICASENINDTLTRYRWLISAPAGPDGVTSPMREVDFDTFFTSSKMVTLDSIYFQPGSRVQCAARAVNTNGDEGLELMSPIVTISREEGLCQPRVPGVVGAEPFSAKLRYTGPEDADYTNLIKLTVTMPHIDGMLPVISTRELSNFELTLSPDGTRVGNHKCSNLLDYTEVKTHYGFLTDATKNPEIIGETYPYQYSLSIRGSTTLRFYRNLNLEACLWEFVSYYDMSELLADCGGTIGTDGQVLNLVQSYVTLRVPLYVSYVFHSPVGVGGWQHFDLKSELRLTFVYDTAILWNDGIGSPPEAELQGSLYPTSMRIGDEGRLAVHFKTEAQFHGLFVLSHPASFTSSVIMSADHPGLTFSLRLIRSEPTYNQPVQQWSFVSDFAVRDYSGTYTVKLVPCTAPSHQEYRLPVTCNPREPVTFDLDIRFQQVSDPVAAEFSLNTQMYLLSKKSLWLSDGSMGFGQESDVAFAEGDIIYGRVMVDPVQNLGDSFYCSIEKVFLCTGADGYVPKYSPMNAEYGCLADSPSLLYRFKIVDKAQPETQATSFGNVLFNAKLAVDDPEAILLVNQPGSDGFKVDSTPLFQVALGREWYIHTIYTVRSKDNANRGIGKRSVEYHSLVSQGKPQSTTKSRKKREIRSTPSLAWEIGAENSRGTNIQHIALDRTKRQIPHGRAPPDGILPWELNSPSSAVSLVTVVGGTTVGLLTICLTVIAVLMCRGKESFRGKDAPKGSSSSEPMVPPQSHHNDSSEV

SEQ ID NO: 46686 - protein, 4012 aa, Homo sapiens
MGVLKVWLGLALALAEFAVLPHHSEGACVYQDSLLADATIWKPDSCQSCRCHGDIVICKPAVCRNPQCAFEKGEVLQIAANQCCPECVLRTPGSCHHEKKIHEHGTEWASSPCSVCSCNHGEVRCTPQPCPPLSCGHQELAFIPEGSCCPVCVGLGKPCSYEGHVFQDGEDWRLSRCAKCLCRNGVAQCFTAQCQPLFCNQDETVVRVPGKCCPQCSARSCSAAGQVYEHGEQWSENACTTCICDRGEVRCHKQACLPLRCGKGQSRARRHGQCCEECVSPAGSCSYDGVVRYQDEMWKGSACEFCMCDHGQVTCQTGECAKVECARDEELIHLDGKCCPECISRNGYCVYEETGEFMSSNASEVKRIPEGEKWEDGPCKVCECRGAQVTCYEPSCPPCPVGTLALEVKGQCCPDCTSVHCHPDCLTCSQSPDHCDLCQDPTKLLQNGWCVHSCGLGFYQAGSLCLACQPQCSTCTSGLECSSCQPPLLMRHGQCVPTCGDGFYQDRHSCAVCHESCAGCWGPTEKHCLACRDPLHVLRDGGCESSCGKGFYNRQGTCSACDQSCDSCGPSSPRCLTCTEKTVLHDGKCMSECPGGYYADATGRCKVCHNSCASCSGPTPSHCTACSPPKALRQGHCLPRCGEGFYSDHGVCKACHSSCLACMGPAPSHCTGCKKPEEGLQVEQLSDVGIPSGECLAQCRAHFYLESTGICEACHQSCFRCAGKSPHNCTDCGPSHVLLDGQCLSQCPDGYFHQEGSCTECHPTCRQCHGPLESDCISCYPHISLTNGNCRTSCREEQFLNLVGYCADCHHLCQHCAADLHNTGSICLRCQNAHYLLLGDHCVPDCPSGYYAERGACKKCHSSCRTCQGRGPFSCSSCDTNLVLSHTGTCSTTCFPGHYLDDNHVCQPCNTHCGSCDSQASCTSCRDPNKVLLFGECQYESCAPQYYLDFSTNTCKECDWSCSACSGPLKTDCLQCMDGYVLQDGACVEQCLSSFYQDSGLCKNCDSYCLQCQGPHECTRCKGPFLLLEAQCVQECGKGYFADHAKHKCTACPQGCLQCSHRDRCHLCDHGFFLKSGLCVYNCVPGFSVHTSNETCSGKIHTPSLHVNGSLILPIGSIKPLDFSLLNVQDQEGRVEDLLFHVVSTPTNGQLVLSRNGKEVQLDKAGRFSWKDVNEKKVRFVHSKEKLRKGYLFLKISDQQFFSEPQLINIQAFSTQAPYVLRNEVLHISRGERATITTQMLDIRDDDNPQDVVIEIIDPPLHGQLLQTLQSPATPIYQFQLDELSRGLLHYAHDGSDSTSDVAVLQANDGHSFHNILFQVKTVPQNDRGLQLVANSMVWVPEGGMLQITNRILQAEAPGASAEEIIYKITQDYPQFGEVVLLVNMPADSPADEGQHLPDGRTATPTSTFTQQDINEGIVWYRHSGAPAQSDSFRFEVSSASNAQTRLESHMFNIAILPQTPEAPKVSLEASLHMTAREDGLTVIQPHSLSFINSEKPSGKIVYNITLPLHPNQGIIEHRDHPHSPIRYFTQEDINQGKVMYRPPPAAPHLQELMAFSFAGLPESVKFHFTVSDGEHTSPEMVLTIHLLPSDQQLPVFQVTAPRLAVSPGGSTSVGLQVVVRDAETAPKELFFELRRPPQHGVLLKHTAEFRRPMATGDTFTYEDVEKNALQYIHDGSSTREDSMEISVTDGLTVTMLEVRVEVSLSEDRGPRLAAGSSLSITVASKSTAIITRSHLAYVDDSSPDPEIWIQLNYLPSYGTLLRISGSEVEELSEVSNFTMEDINNKKIRYSAVFETDGHLVTDSFYFSVSDMDHNHLDNQIFTIMITPAENPPPVIAFADLITVDEGGRAPLSFHHFFATDDDDNLQRDAIIKLSALPKYGCIENTGTGDRFGPETASDLEASFPIQDVLENYIYYFQSVHESIEPTHDIFSFYVSDGTSRSEIHSINITIERKNDEPPRMTLQPLRVQLSSGVVISNSSLSLQDLDTPDNELIFVLTKKPDHGHVLWRQTASEPLENGRVLVQGSTFTYQDILAGLVGYVPSVPGMVVDEFQFSLTDGLHVDTGRMKIYTELPASDTPHLAINQGLQLSAGSVARITEQHLKVTDIDSDDHQVMYIMKEDPGAGRLQMMKHGNLEQISIKGPIRSFTQADISQGHVEYSHGTGEPGGSFAFKFDVVDGEGNRLIDKSFSISILEDKSPPVITTNKGLVLDENSVKKITTLQLSATDQDSGPTELIYRITRQPQLGHLEHAASPGIQISSFTQADLTSRNVQYVHSSEAEKHSDAFSFTLSDGVSEVTQTFHITLHPVDDSLPVVQNLGMRVQEGMRKTITEFELKAVDADTEAESVTFTIVQPPRHGTIERTSNGQHFHLTSTFTMKDIYQNRVSYSHDGSNSLKDRFTFTVSDGTNPFFIIEEGGKEIMTAAPQPFRVDILPVDDGTPRIVTNLGLQWLEYMDGKATNLITKKELLTMDPDTEDAQLVYEITTGPKHGFVENKLQPGRAAATFTQEDVNLGLIRYVLHKEKIREMMDSFQFLVKDSKPNVVSDNVFHIQWSLISFKYTSYNVSEKAGSVSVTVQRTGNLNQYAIVLCRTEQGTASSSSRVSSQPGQQDYVEYAGQVQFDEREDTKSCTIVINDDDVFENVESFTVELSMPAYALLGEFTQAKVIINDTEDEPTLEFDKKIYWVNESAGFLFAPIERKGDASSIVSAICYTVPKSAMGSSLYALESGSDFKSRGMSAASRVIFGPGVTMSTCDVMLIDDSEYEEEEEFEIALADASDNARIGRVATAKVLISGPNDASTVSLGNTAFTVSEDAGTVKIPVIRHGTDLSTFASVWCATRPSDPASATPGVDYVPSSRKVEFGPGVIEQYCTLTILDDTQYPVIEGLETFVVFLSSAQGAELTKPFQAVIAINDTFQDVPSMQFAKDLLLVKEKEGVLHVPITRSGDLSYESSVRCYTQSHSAQVMEDFEERQNADSSRITFLKGDKVKNCTVYIHDDSMFEPEEQFRVYLGLPLGNHWSGARIGKNNMATITISNDEDAPTIEFEEAAYQVREPAGPDAIAILNIKVIRRGDQNRTSKVRCSTRDGSAQSGVDYYPKSRVLKFSPGVDHIFFKVEILSNEDREWHESFSLVLGPDDPVEAVLGDVTTATVTILDQEAAGSLILPAPPIVVTLADYDHVEEVTKEGVKKSPSPGYPLVCVTPCDPHFPRYAVMKERCSEAGINQTSVQFSWEVAAPTDGNGARSPFETITDNTPFTSVNHMVLDSIYFSRRFHVRCVAKAVDKVGHVGTPLRSNIVTIGTDSAICHTPVVAGTSRGFQAQSFIATLKYLDVKHKEHPNRIHISVQIPHQDGMLPLISTMPLHNLHFLLSESIYRHQHVCSNLVTTYDLRGISEAGFLDDVVYDSTALGPGYDRPFQFDPSVREPKTIQLYKHLNLKSCVWTFDAYYDMTELIDVCGGSVTADFQVRDSAQSFLTVHVPLYVSYIYVTAPRGWASLEHHTEMEFSFFYDTVLWRTGIQTDSVLSARLQIIRIYIREDGRLVIEFKTHAKFRGQFVMEHHTLPEVKSFVLTPDHLGGIEFDLQLLWSAQTFDSPHQLWRATSSYNRKDYSGEYTIYLIPCTVQPTQPWVDPGEKPLACTAHAPERFLIPIAFQQTNRPVPVVYSLNTEFQLCNNEKVFLMDPNTSDMSLAEMDYKGAFSKGQILYGRVLWNPEQNLNSAYKLQLEKVYLCTGKDGYVPFFDPTGTIYNEGPQYGCIQPNKHLKHRFLLLDRNQPEVTDKYFHDVPFEAHFASELPDFHVVSNMPGVDGFTLKVDALYKVEAGHQWYLQVIYIIGPDTISGPRVQRSLTAPLRRNRRDLVEPDGQLILDDSLIYDNEGDQVKNGTNMKSLNLEMQELAVAASLSQTGASIGSALAAIMLLLLVFLVACFINRKCQKQRKKKPAEDILEEYPLNTKVEVPKRHPDRVEKNVNRHYCTVRNVNILSEPEAAYTFKGAKVKRLNLEVRVHNNLQDGTEV

SEQ ID NO: 46687 - protein, 737 aa, Homo sapiens
MGVLKVWLGLALALAEFAVLPHHSEGACVYQDSLLADATIWKPDSCQSCRCHGDIVICKPAVCRNPQCAFEKGEVLQIAANQCCPECVLRTPGSCHHEKKIHEHGTEWASSPCSVCSCNHGEVRCTPQPCPPLSCGHQELAFIPEGSCCPVCVGLGKPCSYEGHVFQDGEDWRLSRCAKCLCRNGVAQCFTAQCQPLFCNQDETVVRVPGKCCPQCSARSCSAAGQVYEHGEQWSENACTTCICDRGEVRCHKQACLPLRCGKGQSRARRHGQCCEECVSPAGSCSYDGVVRYQDEMWKGSACEFCMCDHGQVTCQTGECAKVECARDEELIHLDGKCCPECISRNGYCVYEETGEFMSSNASEVKRIPEGEKWEDGPCKVCECRGAQVTCYEPSCPPCPVGTLALEVKGQCCPDCTSVHCHPDCLTCSQSPDHCDLCQDPTKLLQNGWCVHSCGLGFYQAGSLCLACQPQCSTCTSGLECSSCQPPLLMRHGQCVPTCGDGFYQDRHSCAVCHESCAGCWGPTEKHCLACRDPLHVLRDGGCESSCGKGFYNRQGTCSACDQSCDSCGPSSPRCLTCTEKTVLHDGKCMSECPGGYYADATGRCKVCHNSCASCSGPTPSHCTACSPPKALRQGHCLPRCGEGFYSDHGVCKACHSSCLACMGPAPSHCTGCKKPEEGLQVEQLSDVGIPSGECLAQCRAHFYLESTGICEGQNLDFCQNLEVISAVCLGISSTEN

SEQ ID NO: 46688 - protein, 317 aa, Homo sapiens
MGVLKVWLGLALALAEFAVLPHHSEGACVYQDSLLADATIWKPDSCQSCRCHGDIVICKPAVCRNPQCAFEKGEVLQIAANQCCPECVLRTPGSCHHEKKIHEHGTEWASSPCSVCSCNHGEVRCTPQPCPPLSCGHQELAFIPEGSCCPVCVGLGKPCSYEGHVFQDGEDWRLSRCAKCLCRNGVAQCFTAQCQPLFCNQDETVVRVPGKCCPQCSARSCSAAGQVYEHGEQWSENACTTCICDRGEVRCHKQACLPLRCGKGQSRARRHGQCCEECVSPALASQSVGITGMSHHAQSLLGPFLTQIKKPHFSCLE

SEQ ID NO: 46689 - protein, 2241 aa, Homo sapiens
  VARIANT 1: note = MOD_RES - Any amino acid
XSEVSNFTMEDINNKKIRYSAVFETDGHLVTDSFYFSVSDMDHNHLDNQIFTIMITPAENPPPVIAFADLITVDEGGRAPLSFHHFFATDDDDNLQRDAIIKLSALPKYGCIENTGTGDRFGPETASDLEASFPIQDVLENYIYYFQSVHESIEPTHDIFSFYVSDGTSRSEIHSINITIERKNDEPPRMTLQPLRVQLSSGVVISNSSLSLQDLDTPDNELIFVLTKKPDHGHVLWRQTASEPLENGRVLVQGSTFTYQDILAGLVGYVPSVPGMVVDEFQFSLTDGLHVDTGRMKIYTELPASDTPHLAINQGLQLSAGSVARITEQHLKVTDIDSDDHQVMYIMKEDPGAGRLQMMKHGNLEQISIKGPIRSFTQADISQGHVEYSHGTGEPGGSFAFKFDVVDGEGNRLIDKSFSISILEDKSPPVITTNKGLVLDENSVKKITTLQLSATDQDSGPTELIYRITRQPQLGHLEHAASPGIQISSFTQADLTSRNVQYVHSSEAEKHSDAFSFTLSDGVSEVTQTFHITLHPVDDSLPVVQNLGMRVQEGMRKTITEFELKAVDADTEAESVTFTIVQPPRHGTIERTSNGQHFHLTSTFTMKDIYQNRVSYSHDGSNSLKDRFTFTVSDGTNPFFIIEEGGKEIMTAAPQPFRVDILPVDDGTPRIVTNLGLQWLEYMDGKATNLITKKELLTMDPDTEDAQLVYEITTGPKHGFVENKLQPGRAAATFTQEDVNLGLIRYVLHKEKIREMMDSFQFLVKDSKPNVVSDNVFHIQWSLISFKYTSYNVSEKAGSVSVTVQRTGNLNQYAIVLCRTEQGTASSSSRVSSQPGQQDYVEYAGQVQFDEREDTKSCTIVINDDDVFENVESFTVELSMPAYALLGEFTQAKVIINDTEDEPTLEFDKKIYWVNESAGFLFAPIERKGDASSIVSAICYTVPKSAMGSSLYALESGSDFKSRGMSAASRVIFGPGVTMSTCDVMLIDDSEYEEEEEFEIALADASDNARIGRVATAKVLISGPNDASTVSLGNTAFTVSEDAGTVKIPVIRHGTDLSTFASVWCATRPSDPASATPGVDYVPSSRKVEFGPGVIEQYCTLTILDDTQYPVIEGLETFVVFLSSAQGAELTKPFQAVIAINDTFQDVPSMQFAKDLLLVKEKEGVLHVPITRSGDLSYESSVRCYTQSHSAQVMEDFEERQNADSSRITFLKGDKVKNCTVYIHDDSMFEPEEQFRVYLGLPLGNHWSGARIGKNNMATITISNDEDAPTIEFEEAAYQVREPAGPDAIAILNIKVIRRGDQNRTSKVRCSTRDGSAQSGVDYYPKSRVLKFSPGVDHIFFKVEILSNEDREWHESFSLVLGPDDPVEAVLGDVTTATVTILDQEAAGSLILPAPPIVVTLADYDHVEEVTKEGVKKSPSPGYPLVCVTPCDPHFPRYAVMKERCSEAGINQTSVQFSWEVAAPTDGNGARSPFETITDNTPFTSVNHMVLDSIYFSRRFHVRCVAKAVDKVGHVGTPLRSNIVTIGTDSAICHTPVVAGTSRGFQAQSFIATLKYLDVKHKEHPNRIHISVQIPHQDGMLPLISTMPLHNLHFLLSESIYRHQHVCSNLVTTYDLRGISEAGFLDDVVYDSTALGPGYDRPFQFDPSVREPKTIQLYKHLNLKSCVWTFDAYYDMTELIDVCGGSVTADFQVRDSAQSFLTVHVPLYVSYIYVTAPRGWASLEHHTEMEFSFFYDTVLWRTGIQTDSVLSARLQIIRIYIREDGRLVIEFKTHAKFRGQFVMEHHTLPEVKSFVLTPDHLGGIEFDLQLLWSAQTFDSPHQLWRATSSYNRKDYSGEYTIYLIPCTVQPTQPWVDPGEKPLACTAHAPERFLIPIAFQQTNRPVPVVYSLNTEFQLCNNEKVFLMDPNTSDMSLAEMDYKGAFSKGQILYGRVLWNPEQNLNSAYKLQLEKVYLCTGKDGYVPFFDPTGTIYNEGPQYGCIQPNKHLKHRFLLLDRNQPEVTDKYFHDVPFEAHFASELPDFHVVSNMPGVDGFTLKVDALYKVEAGHQWYLQVIYIIGPDTISGPRVQRSLTAPLRRNRRDLVEPDGQLILDDSLIYDNEGDQVKNGTNMKSLNLEMQELAVAASLSQTGASIGSALAAIMLLLLVFLVACFINRKCQKQRKKKPAEDILEEYPLNTKVEVPKRHPDRVEKNVNRHYCTVRNVNILSEPEAAYTFKGAKVKRLNLEVRVHNNLQDGTEV

SEQ ID NO: 46690 - protein, 255 aa, Homo sapiens
ERQGQSRARRHGQCCEECVSPAGSCSYDGVVRYQDEMWKGSACEFCMCDHGQVTCQTGECAKVECARDEELIHLDGKCCPECISRNGYCVYEETGEFMSSNASEVKRIPEGEKWEDGPCKVCECRGAQVTCYEPSCPPCPVGTLALEVKGQCCPDCTSVHCHPDCLTCSQSPDHCDLCQDPTKLLQNGWCVHSCGLGFYQAGSLCLDDGFSLPAPVLHVYQWAGVLILPASPADAARAVCAYLWGRLLPRSPFLC

SEQ ID NO: 46691 - protein, 279 aa, Homo sapiens
MVLTIHLLPSDQQLPVFQVTAPRLAVSPGGSTSVGLQVVVRDAETAPKELFFELRRPPQHGVLLKHTAEFRRPMATGDTFTYEDVEKNALQYIHDGSSTREDSMEISVTDGLTVTMLEVRVEVSLSEDRGPRLAAGSSLSITVASKSTAIITRSHLAYVDDSSPDPEIWIQLNYLPSYGTLLRISGSEVEELSEVSNFTMEDINNKKIRYSAVFETDGHLVTDSFYFSVSDMDHNHLDNQIFTIMITPAENPPPVIAFADLITVDEGGRAPLSFHHFCY

SEQ ID NO: 46692 - protein, 1976 aa, Homo sapiens
MGVLKVWLGLALALAEFAVLPHHSEGACVYQDSLLADATIWKPDSCQSCRCHGDIVICKPAVCRNPQCAFEKGEVLQIAANQCCPECVLRTPGSCHHEKKIHEHGTEWASSPCSVCSCNHGEVRCTPQPCPPLSCGHQELAFIPEGSCCPVCVGLGKPCSYEGHVFQDGEDWRLSRCAKCLCRNGVAQCFTAQCQPLFCNQDETVVRVPGKCCPQCSARSCSAAGQVYEHGEQWSENACTTCICDRGEVRCHKQACLPLRCGKGQSRARRHGQCCEECVSPAGSCSYDGVVRYQDEMWKGSACEFCMCDHGQVTCQTGECAKVECARDEELIHLDGKCCPECISRNGYCVYEETGEFMSSNASEVKRIPEGEKWEDGPCKVCECRGAQVTCYEPSCPPCPVGTLALEVKGQCCPDCTSVHCHPDCLTCSQSPDHCDLCQDPTKLLQNGWCVHSCGLGFYQAGSLCLACQPQCSTCTSGLECSSCQPPLLMRHGQCVPTCGDGFYQDRHSCAVCHESCAGCWGPTEKHCLACRDPLHVLRDGGCESSCGKGFYNRQGTCSACDQSCDSCGPSSPRCLTCTEKTVLHDGKCMSECPGGYYADATGRCKVCHNSCASCSGPTPSHCTACSPPKALRQGHCLPRCGEGFYSDHGVCKACHSSCLACMGPAPSHCTGCKKPEEGLQVEQLSDVGIPSGECLAQCRAHFYLESTGICEACHQSCFRCAGKSPHNCTDCGPSHVLLDGQCLSQCPDGYFHQEGSCTECHPTCRQCHGPLESDCISCYPHISLTNGNCRTSCREEQFLNLVGYCADCHHLCQHCAADLHNTGSICLRCQNAHYLLLGDHCVPDCPSGYYAERGACKKCHSSCRTCQGRGPFSCSSCDTNLVLSHTGTCSTTCFPGHYLDDNHVCQPCNTHCGSCDSQASCTSCRDPNKVLLFGECQYESCAPQYYLDFSTNTCKECDWSCSACSGPLKTDCLQCMDGYVLQDGACVEQCLSSFYQDSGLCKNCDSYCLQCQGPHECTRCKGPFLLLEAQCVQECGKGYFADHAKHKCTACPQGCLQCSHRDRCHLCDHGFFLKSGLCVYNCVPGFSVHTSNETCSGKIHTPSLHVNGSLILPIGSIKPLDFSLLNVQDQEGRVEDLLFHVVSTPTNGQLVLSRNGKEVQLDKAGRFSWKDVNEKKVRFVHSKEKLRKGYLFLKISDQQFFSEPQLINIQAFSTQAPYVLRNEVLHISRGERATITTQMLDIRDDDNPQDVVIEIIDPPLHGQLLQTLQSPATPIYQFQLDELSRGLLHYAHDGSDSTSDVAVLQANDGHSFHNILFQVKTVPQNDRGLQLVANSMVWVPEGGMLQITNRILQAEAPGASAEEIIYKITQDYPQFGEVVLLVNMPADSPADEGQHLPDGRTATPTSTFTQQDINEGIVWYRHSGAPAQSDSFRFEVSSASNAQTRLESHMFNIAILPQTPEAPKVSLEASLHMTAREDGLTVIQPHSLSFINSEKPSGKIVYNITLPLHPNQGIIEHRDHPHSPIRYFTQEDINQGKVMYRPPPAAPHLQELMAFSFAGLPESVKFHFTVSDGEHTSPEMVLTIHLLPSDQQLPVFQVTAPRLAVSPGGSTSVGLQVVVRDAETAPKELFFELRRPPQHGVLLKHTAEFRRPMATGDTFTYEDVEKNALQYIHDGSSTREDSMEISVTDGLTVTMLEVRVEVSLSEDRGPRLAAGSSLSITVASKSTAIITRSHLAYVDDSSPDPEIWIQLNYLPSYGTLLRISGSEVEELSEVSNFTMEDINNKKIRYSAVFETDGHLVTDSFYFSVSDMDHNHLDNQIFTIMITPAENPPPVIAFADLITVDEGGRAPLSFHHFFATDDDDNLQRDAIIKLSALPKYGCIENTGTGDRFGPETASDLEASFPIQDVLENYIYYFQSVHESIEPTHDIFSFYVSDGTSRSEIHSINITIEVKTLEVGKVEPLTTIFHTIRELSL

SEQ ID NO: 46693 - protein, 210 aa, Homo sapiens
MWTLGRRAVAGLLASPSPAQAQTLTRVPRPAELAPLCGRRGLRTDIDATCTPRRASSNQRGLNQIWNVKKQSVYLMNLRKSGTLGHPGSLDETTYERLAEETLDSLAEFFEDLADKPYTFEDYDVSFGSGVLTVKLGGDLGTYVINKQTPNKQIWLSSPSSGPKRYDWTGKNWVYSHDGVSLHELLAAELTKALKTKLDLSSLAYSGKDA

SEQ ID NO: 46694 - protein, 171 aa, Homo sapiens
MWTLGRRAVAGLLASPSPAQAQTLTRVPRPAELAPLCGRRGLRTDIDATCTPRRASSNQRGLNQIWNVKKQSVYLMNLRKSGTLGHPGSLDETTYERLAEETLDSLAEFFEDLADKPYTFEDYDVSFGSGVLTVKLGGDLGTYVINKQTPNKQIWLSSPSRLTWLLWLFHP

SEQ ID NO: 46695 - protein, 196 aa, Homo sapiens
MWTLGRRAVAGLLASPSPAQAQTLTRVPRPAELAPLCGRRGLRTDIDATCTPRRASSNQRGLNQIWNVKKQSVYLMNLRKSGTLGHPGSLDETTYERLAEETLDSLAEFFEDLADKPYTFEDYDVSFGSGVLTVKLGGDLGTYVINKQTPNKQIWLSSPSRYVVDLSVMTGLGKTGCTPTTACPSMSCWPQSSLKP

SEQ ID NO: 46696 - protein, 233 aa, Homo sapiens
MPCRREEEEEAGEEAEGEEEEDDSFLLLQQSVTLGSSGEVDRLVAQIGETLQLDAAQDSPASPCAPPGVPLRAPGPLAAAVPADKARPPAVPLLLPPASAETVGPAPSGALRCALGDRGRVRGRAAPYCVAEVAAGPSALPGPCRRGWLRDAVTSRRLQQRRWTQAGARAGDDDPHRLLQQLVLSGNLIKEAVRRLQRAVAAVAATGPASAPGPGGGRSGPDRIALQPSGSLL

SEQ ID NO: 46697 - protein, 386 aa, Homo sapiens
MEGGLAGERARESPVDCSVSKCSKLVGGGESNPMNYNSYMDEKNGPPPPNMTTNERRVIVPADPTLWTQEHVRQWLEWAIKEYSLMEIDTSFFQNMDGKELCKMNKEDFLRATTLYNTEVLLSHLSYLRESSLLAYNTTSHTDQSSRLSVKEDPSYDSVRRGAWGNNMNSGLNKSPPLGGAQTISKNTEQRPQPDPYQILGPTSSRLANPGSGQIQLWQFLLELLSDSANASCITWEGTNGEFKMTDPDEVARRWGERKSKPNMNYDKLSRALRYYYDKNIMTKVHGKRYAYKFDFHGIAQALQPHPTESSMYKYPSDISYMPSYHAHQQKVNFVPPHPSSMPVTSSSFFGAASQYWTSPTGGIYPNPNVPRHPNTHVPSHLGSYY

SEQ ID NO: 46698 - protein, 419 aa, Homo sapiens
MTASGSPDYGQPHKINPLPPQQEWINQPVRVNVKREYDHMNGSRESPVDCSVSKCSKLVGGGESNPMNYNSYMDEKNGPPPPNMTTNERRVIVPADPTLWTQEHVRQWLEWAIKEYSLMEIDTSFFQNMDGKELCKMNKEDFLRATTLYNTEVLLSHLSYLRESSLLAYNTTSHTDQSSRLSVKEDPSYDSVRRGAWGNNMNSGLNKSPPLGGAQTISKNTEQRPQPDPYQILGPTSSRLANPGSGQIQLWQFLLELLSDSANASCITWEGTNGEFKMTDPDEVARRWGERKSKPNMNYDKLSRALRYYYDKNIMTKVHGKRYAYKFDFHGIAQALQPHPTESSMYKYPSDISYMPSYHAHQQKVNFVPPHPSSMPVTSSSFFGAASQYWTSPTGGIYPNPNVPRHPNTHVPSHLGSYY

SEQ ID NO: 46699 - protein, 452 aa, Homo sapiens
MDGTIKEALSVVSDDQSLFDSAYGAAAHLPKADMTASGSPDYGQPHKINPLPPQQEWINQPVRVNVKREYDHMNGSRESPVDCSVSKCSKLVGGGESNPMNYNSYMDEKNGPPPPNMTTNERRVIVPADPTLWTQEHVRQWLEWAIKEYSLMEIDTSFFQNMDGKELCKMNKEDFLRATTLYNTEVLLSHLSYLRESSLLAYNTTSHTDQSSRLSVKEDPSYDSVRRGAWGNNMNSGLNKSPPLGGAQTISKNTEQRPQPDPYQILGPTSSRLANPGSGQIQLWQFLLELLSDSANASCITWEGTNGEFKMTDPDEVARRWGERKSKPNMNYDKLSRALRYYYDKNIMTKVHGKRYAYKFDFHGIAQALQPHPTESSMYKYPSDISYMPSYHAHQQKVNFVPPHPSSMPVTSSSFFGAASQYWTSPTGGIYPNPNVPRHPNTHVPSHLGSYY

SEQ ID NO: 46700 - protein, 259 aa, Homo sapiens
MDPGSLLAYNTTSHTDQSSRLSVKEDPSYDSVRRGAWGNNMNSGLNKSPPLGGAQTISKNTEQRPQPDPYQILGPTSSRLANPGSGQIQLWQFLLELLSDSANASCITWEGTNGEFKMTDPDEVARRWGERKSKPNMNYDKLSRALRYYYDKNIMTKVHGKRYAYKFDFHGIAQALQPHPTESSMYKYPSDISYMPSYHAHQQKVNFVPPHPSSMPVTSSSFFGAASQYWTSPTGGIYPNPNVPRHPNTHVPSHLGSYY

SEQ ID NO: 46701 - protein, 647 aa, Homo sapiens
MAEEEAPKKSRAAGGGASWELCAGALSARLAEEGSGDAGGRRRPPVDPRRLARQLLLLLWLLEAPLLLGVRAQAAGQGPGQGPGPGQQPPPPPQQQQSGQQYNGERGISVPDHGYCQPISIPLCTDIAYNQTIMPNLLGHTNQEDAGLEVHQFYPLVKVQCSAELKFFLCSMYAPVCTVLEQALPPCRSLCERARQGCEALMNKFGFQWPDTLKCEKFPVHGAGELCVGQNTSDKGTPTPSLLPEFWTSNPQHGGGGHRGGFPGGAGASERGKFSCPRALKVPSYLNYHFLGEKDCGAPCEPTKVYGLMYFGPEELRFSRTWIGIWSVLCCASTLFTVLTYLVDMRRFSYPERPIIFLSGCYTAVAVAYIAGFLLEDRVVCNDKFAEDGARTVAQGTKKEGCTILFMMLYFFSMASSIWWVILSLTWFLAAGMKWGHEAIEANSQYFHLAAWAVPAIKTITILALGQVDGDVLSGVCFVGLNNVDALRGFVLAPLFVYLFIGTSFLLAGFVSLFRIRTIMKHDGTKTEKLEKLMVRIGVFSVLYTVPATIVIACYFYEQAFRDQWERSWVAQSCKSYAIPCPHLQAGGGAPPHPPMSPDFTVFMIKYLMTLIVGITSGFWIWSGKTLNSWRKFYTRLTNSKQGETTV

SEQ ID NO: 46702 - protein, 581 aa, Homo sapiens
MQRPGPRLWLVLQVMGSCAAISSMDMERPGDGKCQPIEIPMCKDIGYNMTRMPNLMGHENQREAAIQLHEFAPLVEYGCHGHLRFFLCSLYAPMCTEQVSTPIPACRVMCEQARLKCSPIMEQFNFKWPDSLDCRKLPNKNDPNYLCMEAPNNGSDEPTRGSGLFPPLFRPQRPHSAQEHPLKDGGPGRGGCDNPGKFHHVEKSASCAPLCTPGVDVYWSREDKRFAVVWLAIWAVLCFFSSAFTVLTFLIDPARFRYPERPIIFLSMCYCVYSVGYLIRLFAGAESIACDRDSGQLYVIQEGLESTGCTLVFLVLYYFGMASSLWWVVLTLTWFLAAGKKWGHEAIEANSSYFHLAAWAIPAVKTILILVMRRVAGDELTGVCYVGSMDVNALTGFVLIPLACYLVIGTSFILSGFVALFHIRRVMKTGGENTDKLEKLMVRIGLFSVLYTVPATCVIACYFYERLNMDYWKILAAQHKCKMNNQTKTLDCLMAASIPAVEIFMVKIFMLLVVGITSGMWIWTSKTLQSWQQVCSRRLKKKSRRKPASVITSGGIYKKAQHPQKTHHGKYEIPAQSPTCV

SEQ ID NO: 46703 - protein, 454 aa, Homo sapiens
MPAHRDPDVQGHRLQHDSYAQPDGPREPARGSHPVARVRAAGGVRLPRPPPLLPVLAVRADVHRAGLYPHPRLPGHVRAGPAQVLPDYGAVQLQVARLPGLPETPQQERPQLPVHGGAQQRLGRAHPGLGPVPAAVPAAAAPQRAGAPAEGRGPRARRLRQPGQVPPRGEERVVRAALHARRGRVLEPRGQALRSGLAGHLGGAVLLLQRLHRAHLPHRPGPLPLPRAPHHLPLHVLLRLLRGLPHPPLRRRREHRLRPGQRPALCHPGGTGEHRLHAGLPGPLLLRHGQLAVVGGPHAHLVPGRRQEVGPRGHRSQQQLLPPGSLGHPGGEDHPDPGHAQGGGGRAHRGLLRGQHGRQRAHRLRAHSPGLLPGHRHVLHPLGLRGPVPHPEGDEDGRREHGQAGEAHGAYRALLCAVHRAGHLCDRLLLLRTPQHGLLEDPGGAAQVQNEQPD

SEQ ID NO: 46704 - protein, 565 aa, Homo sapiens
MRPRSALPRLLLPLLLLPAAGPAQFHGEKGISIPDHGFCQPISIPLCTDIAYNQTIMPNLLGHTNQEDAGLEVHQFYPLVKVQCSPELRFFLCSMYAPVCTVLEQAIPPCRSICERARQGCEALMNKFGFQWPERLRCEHFPRHGAEQICVGQNHSEDGAPALLTTAPPPGLQPGAGGTPGGPGGGGAPPRYATLEHPFHCPRVLKVPSYLSYKFLGERDCAAPCEPARPDGSMFFSQEETRFARLWILTWSVLCCASTFFTVTTYLVDMQRFRYPERPIIFLSGCYTMVSVAYIAGFVLQERVVCNERFSEDGYRTVVQGTKKEGCTILFMMLYFFSMASSIWWVILSLTWFLAAGMKWGHEAIEANSQYFHLAAWAVPAVKTITILAMGQIDGDLLSGVCFVGLNSLDPLRGFVLAPLFVYLFIGTSFLLAGFVSLFRIRTIMKHDGTKTEKLERLMVRIGVFSVLYTVPATIVIACYFYEQAFREHWERSWVSQHCKSLAIPCPAHYTPRMSPDFTVYMIKYLMTLIVGITSGFWIWSGKTLHSWRKFYTRLTNSRHGETTV

SEQ ID NO: 46705 - protein, 641 aa, Homo sapiens
ARGVSGCSVRPRQASGQAHRPLPRPASPTLRPRVKFAKRRGRRQPQRGGGGEEAQSPGWGRGRGGRQGAGWGAAASMRPRSALPRLLLPLLLLPAAGPAQFHGEKGISIPDHGFCQPISIPLCTDIAYNQTIMPNLLGHTNQEDAGLEVHQFYPLVKVQCSPELRFFLCSMYAPVCTVLEQAIPPCRSICERARQGCEALMNKFGFQWPERLRCEHFPRHGAEQICVGQNHSEDGAPALLTTAPPPGLQPGAGGTPGGPGGGGAPPRYATLEHPFHCPRVLKVPSYLSYKFLGERDCAAPCEPARPDGSMFFSQEETRFARLWILTWSVLCCASTFFTVTTYLVDMQRFRYPERPIIFLSGCYTMVSVAYIAGFVLQERVVCNERFSEDGYRTVVQGTKKEGCTILFMMLYFFSMASSIWWVILSLTWFLAAGMKWGHEAIEANSQYFHLAAWAVPAVKTITILAMGQIDGDLLSGVCFVGLNSLDPLRGFVLAPLFVYLFIGTSFLLAGFVSLFRIRTIMKHDGTKTEKLERLMVRIGVFSVLYTVPATIVIACYFYEQAFREHWERSWVSQHCKSLAIPCPAHYTPRMSPDFTVYMIKYLMTLIVGITSGFWIWSGKTLHSWRKFYTRLTNSRHGETTV

SEQ ID NO: 46706 - protein, 666 aa, Homo sapiens
MAMTWIVFSLWPLTVFMGHIGGHSLFSCEPITLRMCQDLPYNTTFMPNLLNHYDQQTAALAMEPFHPMVNLDCSRDFRPFLCALYAPICMEYGRVTLPCRRLCQRAYSECSKLMEMFGVPWPEDMECSRFPDCDEPYPRLVDLNLAGEPTEGAPVAVQRDYGFWCPRELKIDPDLGYSFLHVRDCSPPCPNMYFRREELSFARYFIGLISIICLSATLFTFLTFLIDVTRFRYPERPIIFYAVCYMMVSLIFFIGFLLEDRVACNASIPAQYKASTVTQGSHNKACTMLFMILYFFTMAGSVWWVILTITWFLAAVPKWGSEAIEKKALLFHASAWGIPGTLTIILLAMNKIEGDNISGVCFVGLYDVDALRYFVLAPLCLYVVVGVSLLLAGIISLNRVRIEIPLEKENQDKLVKFMIRIGVFSILYLVPLLVVIGCYFYEQAYRGIWETTWIQERCREYHIPCPYQVTQMSRPDLILFLMKYLMALIVGIPSVFWVGSKKTCFEWASFFHGRRKKEIVNESRQVLQEPDFAQSLLRDPNTPIIRKSRGTSTQGTSTHASSTQLAMVDDQRSKAGSIHSKVSSYHGSLHRSRDGRYTPCSYRGMEERLPHGSMSRLTDHSRHSSSHRLNEQSRHSSIRDLSNNPMTHITHGTSMNRVIEEDGTSA

SEQ ID NO: 46707 - protein, 35 aa, Homo sapiens
MAMTWIVFSLWPLTVFMGHIGGHSLFSCEPITLRM

SEQ ID NO: 46708 - protein, 666 aa, Homo sapiens; identical to SEQ ID NO: 46706

SEQ ID NO: 46709 - protein, 537 aa, Homo sapiens
MAWRGAGPSVPGAPGGVGLSLGLLLQLLLLLGPARGFGDEEERRCDPIRISMCQNLGYNVTKMPNLVGHELQTDAELQLTTFTPLIQYGCSSQLQFFLCSVYVPMCTEKINIPIGPCGGMCLSVKRRCEPVLKEFGFAWPESLNCSKFPPQNDHNHMCMEGPGDEEVPLPHKTPIQPGEECHSVGTNSDQYIWVKRSLNCVLKCGYDAGLYSRSAKEFTDIWMAVWASLCFISTAFTVLTFLIDSSRFSYPERPIIFLSMCYNIYSIAYIVRLTVGRERISCDFEEAAEPVLIQEGLKNTGCAIIFLLMYFFGMASSIWWVILTLTWFLAAGLKWGHEAIEMHSSYFHIAAWAIPAVKTIVILIMRLVDADELTGLCYVGNQNLDALTGFVVAPLFTYLVIGTLFIAAGLVALFKIRSNLQKDGTKTDKLERLMVKIGVFSVLYTVPATCVIACYFYEISNWALFRYSADDSNMAVEMLKIFMSLLVGITSGMWIWSAKTLHTWQKCSNRLVNSGKVKREKRGNGWVKPGKGSETVV

SEQ ID NO: 46710 - protein, 706 aa, Homo sapiens
MEMFTFLLTCIFLPLLRGHSLFTCEPITVPRCMKMAYNMTFFPNLMGHYDQSIAAVEMEHFLPLANLECSPNIETFLCKAFVPTCIEQIHVVPPCRKLCEKVYSDCKKLIDTFGIRWPEELECDRLQYCDETVPVTFDPHTEFLGPQKKTEQVQRDIGFWCPRHLKTSGGQGYKFLGIDQCAPPCPNMYFKSDELEFAKSFIGTVSIFCLCATLFTFLTFLIDVRRFRYPERPIIYYSVCYSIVSLMYFIGFLLGDSTACNKADEKLELGDTVVLGSQNKACTVLFMLLYFFTMAGTVWWVILTITWFLAAGRKWSCEAIEQKAVWFHAVAWGTPGFLTVMLLAMNKVEGDNISGVCFVGLYDLDASRYFVLLPLCLCVFVGLSLLLAGIISLNHVRQVIQHDGRNQEKLKKFMIRIGVFSGLYLVPLVTLLGCYVYEQVNRITWEITWVSDHCRQYHIPCPYQAKAKARPELALFMIKYLMTLIVGISAVFWVGSKKTCTEWAGFFKRNRKRDPISESRRVLQESCEFFLKHNSKVKHKKKHYKPSSHKLKVISKSMGTSTGATANHGTSAVAITSHDYLGQETLTEIQTSPETSMREVKADGASTPRLREQDCGEPASPAASISRLSGEQVDGKGQAGSVSESARSEGRISPKSDITDTGLAQSNNLQVPSSSEPSSLKGSTSLLVHPVSGVRKEQGGGCHSDT

SEQ ID NO: 46711 - protein, 706 aa, Homo sapiens; identical to SEQ ID NO: 46710

SEQ ID NO: 46712 - protein, 674 aa, Homo sapiens
MKMAYNMTFFPNLMGHYDQSIAAVEMEHFLPLANLECSPNIETFLCKAFVPTCIEQIHVVPPCRKLCEKVYSDCKKLIDTFGIRWPEELECDRLQYCDETVPVTFDPHTEFLGPQKKTEQVQRDIGFWCPRHLKTSGGQGYKFLGIDQCAPPCPNMYFKSDELEFAKSFIGTVSIFCLCATLFTFLTFLIDVRRFRYPERPIIYYSVCYSIVSLMYFIGFLLGDSTACNKADEKLELGDTVVLGSQNKACTVLFMLLYFFTMAGTVWWVILTITWFLAAGRKWSCEAIEQKAVWFHAVAWGTPGFLTVMLLAMNKVEGDNISGVCFVGLYDLDASRYFVLLPLCLCVFVGLSLLLAGIISLNHVRQVIQHDGRNQEKLKKFMIRIGVFSGLYLVPLVTLLGCYVYEQVNRITWEITWVSDHCRQYHIPCPYQAKAKARPELALFMIKYLMTLIVGISAVFWVGSKKTCTEWAGFFKRNRKRDPISESRRVLQESCEFFLKHNSKVKHKKKHYKPSSHKLKVISKSMGTSTGATANHGTSAVAITSHDYLGQETLTEIQTSPETSMREVKADGASTPRLREQDCGEPASPAASISRLSGEQVDGKGQAGSVSESARSEGRISPKSDITDTGLAQSNNLQVPSSSEPSSLKGSTSLLVHPVSGVRKEQGGGCHSDT

SEQ ID NO: 46713 - protein, 651 aa, Homo sapiens
MLAQHFLPLANLECSPNIETFLCKAFVPTCIEQIHVVPPCRKLCEKVYSDCKKLIDTFGIRWPEELECDRLQYCDETVPVTFDPHTEFLGPQKKTEQVQRDIGFWCPRHLKTSGGQGYKFLGIDQCAPPCPNMYFKSDELEFAKSFIGTVSIFCLCATLFTFLTFLIDVRRFRYPERPIIYYSVCYSIVSLMYFIGFLLGDSTACNKADEKLELGDTVVLGSQNKACTVLFMLLYFFTMAGTVWWVILTITWFLAAGRKWSCEAIEQKAVWFHAVAWGTPGFLTVMLLAMNKVEGDNISGVCFVGLYDLDASRYFVLLPLCLCVFVGLSLLLAGIISLNHVRQVIQHDGRNQEKLKKFMIRIGVFSGLYLVPLVTLLGCYVYEQVNRITWEITWVSDHCRQYHIPCPYQAKAKARPELALFMIKYLMTLIVGISAVFWVGSKKTCTEWAGFFKRNRKRDPISESRRVLQESCEFFLKHNSKVKHKKKHYKPSSHKLKVISKSMGTSTGATANHGTSAVAITSHDYLGQETLTEIQTSPETSMREVKADGASTPRLREQDCGEPASPAASISRLSGEQVDGKGQAGSVSESARSEGRISPKSDITDTGLAQSNNLQVPSSSEPSSLKGSTSLLVHPVSGVRKEQGGGCHSDT

SEQ ID NO: 46714 - protein, 401 aa, Homo sapiens
MTRVLPRWKWSCEAIEQKAVWFHAVAWGTPGFLTVMLLAMNKVEGDNISGVCFVGLYDLDASRYFVLLPLCLCVFVGLSLLLAGIISLNHVRQVIQHDGRNQEKLKKFMIRIGVFSGLYLVPLVTLLGCYVYEQVNRITWEITWVSDHCRQYHIPCPYQAKAKARPELALFMIKYLMTLIVGISAVFWVGSKKTCTEWAGFFKRNRKRDPISESRRVLQESCEFFLKHNSKVKHKKKHYKPSSHKLKVISKSMGTSTGATANHGTSAVAITSHDYLGQETLTEIQTSPETSMREVKADGASTPRLREQDCGEPASPAASISRLSGEQVDGKGQAGSVSESARSEGRISPKSDITDTGLAQSNNLQVPSSSEPSSLKGSTSLLVHPVSGVRKEQGGGCHSDT

SEQ ID NO: 46715 - protein, 694 aa, Homo sapiens
MEWGYLLEVTSLLAALALLQRSSGAAAASAKELACQEITVPLCKGIGYNYTYMPNQFNHDTQDEAGLEVHQFWPLVEIQCSPDLKFFLCSMYTPICLEDYKKPLPPCRSVCERAKAGCAPLMRQYGFAWPDRMRCDRLPEQGNPDTLCMDYNRTDLTTAAPSPPRRLPPPPPGEQPPSGSGHGRPPGARPPHRGGGRGGGGGDAAAPPARGGGGGGKARPPGGGAAPCEPGCQCRAPMVSVSSERHPLYNRVKTGQIANCALPCHNPFFSQDERAFTVFWIGLWSVLCFVSTFATVSTFLIDMERFKYPERPIIFLSACYLFVSVGYLVRLVAGHEKVACSGGAPGAGGAGGAGGAAAGAGAAGAGAGGPGGRGEYEELGAVEQHVRYETTGPALCTVVFLLVYFFGMASSIWWVILSLTWFLAAGMKWGNEAIAGYSQYFHLAAWLVPSVKSIAVLALSSVDGDPVAGICYVGNQSLDNLRGFVLAPLVIYLFIGTMFLLAGFVSLFRIRSVIKQQDGPTKTHKLEKLMIRLGLFTVLYTVPAAVVVACLFYEQHNRPRWEATHNCPCLRDLQPDQARRPDYAVFMLKYFMCLVVGITSGVWVWSGKTLESWRSLCTRCCWASKGAAVGGGAGATAAGGGGGPGGGGGGGPGGGGGPGGGGGSLYSDVSTGLTWRSGTASSVSYPKQMPLSQV

SEQ ID NO: 46716 - protein, 591 aa, Homo sapiens
MAVAPLRGALLLWQLLAAGGAALEIGRFDPERGRGAAPCQAVEIPMCRGIGYNLTRMPNLLGHTSQGEAAAELAEFAPLVQYGCHSHLRFFLCSLYAPMCTDQVSTPIPACRPMCEQARLRCAPIMEQFNFGWPDSLDCARLPTRNDPHALCMEAPENATAGPAEPHKGLGMLPVAPRPARPPGDLGPGAGGSGTCENPEKFQYVEKSRSCAPRCGPGVEVFWSRRDKDFALVWMAVWSALCFFSTAFTVLTFLLEPHRFQYPERPIIFLSMCYNVYSLAFLIRAVAGAQSVACDQEAGALYVIQEGLENTGCTLVFLLLYYFGMASSLWWVVLTLTWFLAAGKKWGHEAIEAHGSYFHMAAWGLPALKTIVILTLRKVAGDELTGLCYVASTDAAALTGFVLVPLSGYLVLGSSFLLTGFVALFHIRKIMKTGGTNTEKLEKLMVKIGVFSILYTVPATCVIVCYVYERLNMDFWRLRATEQPCAAAAGPGGRRDCSLPGGSVPTVAVFMLKIFMSLVVGITSGVWVWSSKTFQTWQSLCYRKIAAGRARAKACRAPGSYGRGTHCHYKAPTVVLHMTKTDPSLENPTHL

SEQ ID NO: 46717 - protein, 325 aa, Homo sapiens
MVCGSPGGMLLLRAGLLALAALCLLRVPGARAAACEPVRIPLCKSLPWNMTKMPNHLHHSTQANAILAIEQFEGLLGTHCSPDLLFFLCAMYAPICTIDFQHEPIKPCKSVCERARQGCEPILIKYRHSWPENLACEELPVYDRGVCISPEAIVTADGADFPMDSSNGNCRGASSERCKCKPIRATQKTYFRNNYNYVIRAKVKEIKTKCHDVTAVVEVKEILKSSLVNIPRDTVNLYTSSGCLCPPLNVNEEYIIMGYEDEERSRLLLVEGSIAEKWKDRLGKKVKRWDMKLRHLGLSKSDSSNSDSTQSQKSGRNSNPRQARN

SEQ ID NO: 46718 - protein, 309 aa, Homo sapiens
MEELLRRELGCSSVRATGHSGGGCISQGRSYDTDQGRVFVKVNPKAEARRMFEGEMASLTAILKTNTVKVPKPIKVLDAPGGGSVLVMEHMDMRHLSSHAAKLGAQLADLHLDNKKLGEMRLKEAGTVGRGGGQEERPFVARFGFDVVTCCGYLPQVNDWQEDWVVFYARQRIQPQMDMVEKESGDREALQLWSALQLKIPDLFRDLEIIPALLHGDLWGGNVAEDSSGPVIFDPASFYGHSEYELAIAGMFGGFSSSFYSAYHGKIPKAPGFEKRLQLYQLFHYLNHWNHFGSGYRGSSLNIMRNLVK

SEQ ID NO: 46719 - protein, 259 aa, Homo sapiens [sequence omitted]

SEQ ID NO: 46720 - protein, 338 aa, Homo sapiens [sequence omitted]

SEQ ID NO: 46721 - protein, 151 aa, Homo sapiens
MLKSSFATCVLVSEEDKHAIIVEPEKRGKYVVCFDPLDGSSNIDCLVSVGTIFGIYRKKSTDEPSEKDALQPGRNLVAAGYALYGSATMLVLAMDCGVNCFMLDPAIGEFILVDKDVKIKKKGKIYSLNEGYARDFDPAVTEYIQRKKFPP

SEQ ID NO: 46722 - protein, 338 aa, Homo sapiens [sequence omitted]

SEQ ID NO: 46723 - protein, 339 aa, Homo sapiens
MTDRSPFETDMLTLTRYVMEKGRQAKGTGELTQLLNSMLTAIKAISSAVRKAGLAHLYGIAGSVNVTGDEVKKLDVLSNSLVINMVQSSYSTCVLVSEENKDAIITAKEKRGKYVVCFDPLDGSSNIDCLASIGTIFAIYRKTSEDEPSEKDALQCGRNIVAAGYALYGSATLVALSTGQGVDLFMLDPALGEFVLVEKDVKIKKKGKIYSLNEGYAKYFDAATTEYVQKKKFPEDGSAPYGARYVGSMVADVHRTLVYGGIFLYPANQKSPKGKLRLLYECNPVAYIIEQAGGLATTGTQPVLDVKPEAIHQRVPLILGSPEDVQEYLTCVQKNQAGS

SEQ ID NO: 46724 - protein, 278 aa, Homo sapiens
MGKGNEDSDLHCSSIQCSTDQPPFQQISFTEKGSDEKKPFKEKGKTAFSHSSEKHIQRQGSEPNPNKENSEETKLKAGNSTAGSEPESSSYRENCRKRKMSSKDSCQDTAGNCPEKECSLSLNKKSRSSTAVHNSEIQETCDAHHRGHSRACTGHSKRHRSRALGVQTPSIRKSLVTSVRAMSEAVYQDLAQVWAQQIHSPLTCEQLTLLTRLRGPLCAQVQTLYSMATQAAYVFPAESWLVPATLPGPGESALDREAHPFPGQEITETVSGSDEAKL

SEQ ID NO: 46725 - protein, 327 aa, Homo sapiens
MGRTSKDKRDVYYRLAKENGWRARSAFKLLQLDKEFQLFQGVTRAVDLCAAPGSWSQVLSQKIGGQGSGHVVAVDLQAMAPLPGVVQIQGDITQLSTAKEIIQHFKGCPADLVVCDGAPDVTGLHDVDEYMQAQLLLAALNIATHVLKPGGCFVAKIFRGRDVTLLYSQLQVFFSSVLCAKPRSSRNSSIEAFAVCQGYDPPEGFIPDLSKPLLDHSYDFNQLDGPTRIIVPFVTCGDLSSYDSDRSYPLDLEGGSEYKYTPPTQPPISPPYQEACTLKRKGQLAKEIRPQDCPISRVDTFPQPLAAPQCHTLLAPEMEDNEMSCSP

SEQ ID NO: 46726 - protein, 329 aa, Homo sapiens
MGRTSKDKRDVYYRLAKENGWRARSAFKLLQLDKEFQLFQGVTRAVDLCAAPGSWSQVLSQKIGGQGSGHVVAVDLQAMAPLPGVVQIQGDITQLSTAKEIIQHFKGCPADLVVCDGAPDVTGLHDVDEYMQAQLLLAALNIATHVLKPGGCFVAKIFRGRDVTLLYSQLQVFFSSVLCAKPRSSRNSSIEAFAVCQGYDPPEGFIPDLSKPLLDHSYDPDFNQLDGPTRIIVPFVTCGDLSSYDSDRSYPLDLEGGSEYKYTPPTQPPISPPYQEACTLKRKGQLAKEIRPQDCPISRVDTFPQPLAAPQCHTLLAPEMEDNEMSCSP

SEQ ID NO: 46727 - protein, 192 aa, Homo sapiens
MALNIATHVLKPGGCFVAKIFRGRDVTLLYSQLQVFFSSVLCAKPRSSRNSSIEAFAVCQGYDPPEGFIPDLSKPLLDHSYDPDFNQLDGPTRIIVPFVTCGDLSSYDSDRSYPLDLEGGSEYKYTPPTQPPISPPYQEACTLKRKGQLAKEIRPQDCPISRVDTFPQPLAAPQCHTLLAPEMEDNEMSCSP

SEQ ID NO: 46728 - protein, 327 aa, Homo sapiens; identical to SEQ ID NO: 46725

SEQ ID NO: 46729 - protein, 246 aa, Homo sapiens
MAGYLKLVCVSFQRQGFHTVGSRCKNRTGAEHLWLTRHLRDPFVKAAKVESYRCRSAFKLLEVNERHQILRPGLRVLDCGAAPGAWSQVAVQKVNAAGTDPSSPVGFVLGVDLLHIFPLEGATFLCPADVTDPRTSQRILEVLPGRRADVILSDMAPNATGFRDLDHDRLISLCLTLLSVTPDILQPGGTFLCKTWAGSQSRRLQRRLTEEFQNVRIIKPEASRKESSEVYFLATQYHGRKGTVKQ

SEQ ID NO: 46730 - protein, 145 aa, Homo sapiens
MAGYLKLVCVSFQRQGFHTVGSRCKNRTGAEHLWLTRHLRDPFVKAAKVESYRCRSAFKLLEVNERHQILRPGLRVLDCGAAPGAWSQVAVQKVNAAGTDGVSLLPRLQCNGVISAHCNLCLPGSSDSPASASQIPALLLASCLG

SEQ ID NO: 46731 - protein, 255 aa, Homo sapiens
MPELYDLVNSYKPDLIWSDGEWECPDTYWNSTNFLSWLYNDSPVKDEVVVNDRWGQNCSCHHGGYYNCEDKFKPQSLPDHKWEMCTSIDKFSWGYRRDMALSDVTEESEIISELVQTVSLGGNYLLNIGPTKDGLIVPIFQERLLAVGKWLSINGEAIYASKPWRVQWEKNTTSVWYTSKGSAVYAIFLHWPENGVLNLESPITTSTTKITMLGIQGDLKWSTDPDKGLFISLPQLPPSAVPAEFAWTIKLTGVK

SEQ ID NO: 46732 - protein, 466 aa, Homo sapiens
MRAPGMRSRPAGPALLLLLLFLGAAESVRRAQPPRRYTPDWPSLDSRPLPAWFDEAKFGVFIHWGVFSVPAWGSEWFWWHWQGEGRPQYQRFMRDNYPPGFSYADFGPQFTARFFHPEEWADLFQAAGAKYVVLTTKHHEGFTNWPSPVSWNWNSKDVGPHRDLVGELGTALRKRNIRYGLYHSLLEWFHPLYLLDKKNGFKTQHFVSAKTMPELYDLVNSYKPDLIWSDGEWECPDTYWNSTNFLSWLYNDSPVKDEVVVNDRWGQNCSCHHGGYYNCEDKFKPQSLPDHKWEMCTSIDKFSWGYRRDMALSDVTEESEIISELVQTVSLGGNYLLNIGPTKDGLIVPIFQERLLAVGKWLSINGEAIYASKPWRVQWEKNTTSVWYTSKGSAVYAIFLHWPENGVLNLESPITTSTTKITMLGIQGDLKWSTDPDKGLFISLPQLPPSAVPAEFAWTIKLTGVK

SEQ ID NO: 46733 - protein, 467 aa, Homo sapiens
MRPQELPRLAFPLLLLLLLLLPPPPCPAHSATRFDPTWESLDARQLPAWFDQAKFGIFIHWGVFSVPSFGSEWFWWYWQKEKIPKYVEFMKDNYPPSFKYEDFGPLFTAKFFNANQWADIFQASGAKYIVLTSKHHEGFTLWGSEYSWNWNAIDEGPKRDIVKELEVAIRNRTDLRFGLYYSLFEWFHPLFLEDESSSFHKRQFPVSKTLPELYELVNNYQPEVLWSDGDGGAPDQYWNSTGFLAWLYNESPVRGTVVTNDRWGAGSICKHGGFYTCSDRYNPGHLLPHKWENCMTIDKLSWGYRREAGISDYLTIEELVKQLVETVSCGGNLLMNIGPTLDGTISVVFEERLRQMGSWLKVNGEAIYETHTWRSQNDTVTPDVWYTSKPKEKLVYAIFLKWPTSGQLFLGHPKAILGATEVKLLGHGQPLNWISLEQNGIMVELPQLTIHQMPCKWGWALALTNVI

SEQ ID NO: 46734 - protein, 165 aa, Homo sapiens
MRPQELPRLAFPLLLLLLLLLPPPPCPAHSATRFDPTWESLDARQLPAWFDQAKFGIFIHWGVFSVPSFGSEWFWWYWQKEKIPKYVEFMKDNYPPSFKYEDFGPLFTAKFFNANQWADIFQASGAKYIVLTSKHHEATCRDSFMWRKSFDEYWAHTRWHHFCSF

SEQ ID NO: 46735 - protein, 165 aa, Homo sapiens; identical to SEQ ID NO: 46734

SEQ ID NO: 46736 - protein, 109 aa, Homo sapiens
QLVETVSCGGNLLMNIGPTLDGTISVVFEERLRQMGSWLKVNGEAIYETHTWRSQNDTVTPDVWYTSKPKEKLVYAIFLKWPTSGQLFLGHPKAILGATEVRGNFTLFL

SEQ ID NO: 46737 - protein, 365 aa, Homo sapiens
MWLRSHRQLCLAFLLVCVLSVIFFLHIHQDSFPHGLGLSILCPDRRLVTPPVAIFCLPGTAMGPNASSSCPQHPASLSGTWTVYPNGRFGNQMGQYATLLALAQLNGRRAFILPAMHAALAPVFRITLPVLAPEVDSRTPWRELQLHDWMSEEYADLRDPFLKLSGFPCSWTFFHHLREQIRREFTLHDHLREEAQSVLGQLRLGRTGDRPRTFVGVHVRRGDYLQVMPQRWKGVVGDSAYLRQAMDWFRARHEAPVFVVTSNGMEWCKENIDTSQGDVTFAGDGQEATPWKDFALLTQCNHTIMTIGTFGFWAAYLAGGDTVYLANFTLPDSEFLKIFKPEAAFLPEWVGINADLSPLWTLAKP

SEQ ID NO: 46738 - protein, 355 aa, Homo sapiens
MWLRSHRQLCLAFLLVCVLSVIFFLHIHQDSFPHGLGLSILCPDRRLVTPPVAIFCLPGTAMGPNASSSCPQHPASLSGTWTVYPNGRFGNQMGQYATLLALAQLNGRRAFILPAMHAALAPPEVDSRTPWRELQLHDWMSEEYADLRDPFLKLSGFPCSWTFFHHLREQIRREFTLHDHLREEAQSVLGQLRLGRTGDRPRTFVGVHVRRGDYLQVMPQRWKGVVGDSAYLRQAMDWFRARHEAPVFVVTSNGMEWCKENIDTSQGDVTFAGDGQEATPWKDFALLTQCNHTIMTIGTFGFWAAYLAGGDTVYLANFTLPDSEFLKIFKPEAAFLPEWVGINADLSPLWTLAKP

SEQ ID NO: 46739 - protein, 343 aa, Homo sapiens
MLVVQMPFSFPMAHFILFVFTVSTIFHVQQRLAKIQAMWELPVQIPVLASTSKALGPSQLRGMWTINAIGRLGNQMGEYATLYALAKMNGRPAFIPAQMHSTLAPIFRITLPVLHSATASRIPWQNYHLNDWMEEEYRHIPGEYVRFTGYPCSWTFYHHLRQEILQEFTLHDHVREEAQKFLRGLQVNGSRPGTFVGVHVRRGDYVHVMPKVWKGVVADRRYLQQALDWFRARYSSLIFVVTSNGMAWCRENIDTSHGDVVFAGDGIEGSPAKDFALLTQCNHTIMTIGTFGIWAAYLTGGDTIYLANYTLPDSPFLKIFKPEAAFLPEWTGIAADLSPLLKH

SEQ ID NO: 46740 - protein, 343 aa, Homo sapiens; identical to SEQ ID NO: 46739

SEQ ID NO: 46741 - protein, 220 aa, Homo sapiens
MLVVQMPFSFPMAHFILFVFTVSTIFHVQQRLAKIQAMWELPVQIPVLASTSKALGPSQLRGMWTINAIGRLGNQMGEYATLYALAKMNGRPAFIPAQMHSTLAPIFRITLPVLHSATASRIPWQNYHLNDWMEEEYRHIPGEYVRFTGYPCSWTFYHHLRQEILQEFTLHDHVREEAQKFLRGLQVNGSRPGTFVGVHVRRGDYVHVMPKVWKGVVADR

SEQ ID NO: 46742 - protein, 361 aa, Homo sapiens
MDPLGAAKPQWPWRRCLAALLFQLLVAVCFFSYLRVSRDDATGSPRAPSGSSRQDTTPTRPTLLILLRTWPFHIPVALSRCSEMVPGTADCHITADRKVYPQADMVIVHHWDIMSNPKSRLPPSPRPQGQRWIWFNLEPPPNCQHLEALDRYFNLTMSYRSDSDIFTPYGWLEPWSGQPAHPPLNLSAKTELVAWAVSNWKPDSARVRYYQSLQAHLKVDVYGRSHKPLPKGTMMETLSRYKFYLAFENSLHPDYITEKLWRNALEAWAVPVVLGPSRSNYERFLPPDAFIHVDDFQSPKDLARYLQELDKDHARYLSYFRWRETLRPRSFSWALDFCKACWKLQQESRYQTVRSIAAWFT

SEQ ID NO: 46743 - protein, 361 aa, Homo sapiens; identical to SEQ ID NO: 46742

SEQ ID NO: 46744 - protein, 361 aa, Homo sapiens; identical to SEQ ID NO: 46742

SEQ ID NO: 46745 - protein, 361 aa, Homo sapiens; identical to SEQ ID NO: 46742

SEQ ID NO: 46746 - protein, 530 aa, Homo sapiens
MRRLWGAARKPSGAGWEKEWAEAPQEAPGAWSGRLGPGRSGRKGRAVPGWASWPAHLALAARPARHLGGAGQGPRPLHSGTAPFHSRASGERQRRLEPQLQHESRCRSSTPADAWRAEAALPVRAMGAPWGSPTAAAGGRRGWRRGRGLPWTVCVLAAAGLTCTALITYACWGQLPPLPWASPTPSRPVGVLLWWEPFGGRDSAPRPPPDCRLRFNISGCRLLTDRASYGEAQAVLFHHRDLVKGPPDWPPPWGIQAHTAEEVDLRVLDYEEAAAAAEALATSSPRPPGQRWVWMNFESPSHSPGLRSLASNLFNWTLSYRADSDVFVPYGYLYPRSHPGDPPSGLAPPLSRKQGLVAWVVSHWDERQARVRYYHQLSQHVTVDVFGRGGPGQPVPEIGLLHTVARYKFYLAFENSQHLDYITEKLWRNALLAGAVPVVLGPDRANYERFVPRGAFIHVDDFPSASSLASYLLFLDRNPAVYRRYFHWRRSYAVHITSFWDEPWCRVCQAVQRAGDRPKSIRNLASWFER

SEQ ID NO: 46747 - protein, 374 aa, Homo sapiens
MDPLGPAKPQWLWRRCLAGLLFQLLVAVCFFSYLRVSRDDATGSPRPGLMAVEPVTGAPNGSRCQDSMATPAHPTLLILLWTWPFNTPVALPRCSEMVPGAADCNITADSSVYPQADAVIVHHWDIMYNPSANLPPPTRPQGQRWIWFSMESPSNCRHLEALDGYFNLTMSYRSDSDIFTPYGWLEPWSGQPAHPPLNLSAKTELVAWAVSNWKPDSARVRYYQSLQAHLKVDVYGRSHKPLPKGTMMETLSRYKFYLAFENSLHPDYITEKLWRNALEAWAVPVVLGPSRSNYERFLPPDAFIHVDDFQSPKDLARYLQELDKDHARYLSYFHWRETLRPRSFSWALAFCKACWKLQQESRYQTVRSIAAWFT

SEQ ID NO: 46748 - protein, 374 aa, Homo sapiens; identical to SEQ ID NO: 46747

SEQ ID NO: 46749 - protein, 359 aa, Homo sapiens
MDPLGPAKPQWSWRCCLTTLLFQLLMAVCFFSYLRVSQDDPTVYPNGSRFPDSTGTPAHSIPLILLWTWPFNKPIALPRCSEMVPGTADCNITADRKVYPQADAVIVHHREVMYNPSAQLPRSPRRQGQRWIWFSMESPSHCWQLKAMDGYFNLTMSYRSDSDIFTPYGWLEPWSGQPAHPPLNLSAKTELVAWAVSNWGPNSARVRYYQSLQAHLKVDVYGRSHKPLPQGTMMETLSRYKFYLAFENSLHPDYITEKLWRNALEAWAVPVVLGPSRSNYERFLPPDAFIHVDDFQSPKDLARYLQELDKDHARYLSYFRWRETLRPRSFSWALAFCKACWKLQEESRYQTRGIAAWFT

SEQ ID NO: 46750 - protein, 359 aa, Homo sapiens; identical to SEQ ID NO: 46749

SEQ ID NO: 46751 - protein, 365 aa, Homo sapiens
MDPLGPAKPQWSWRCCLTTLLFQLLMAVCFFSYLRVSQDDPTVYPNGSRFPDSTGTPAHSIPLILLWTWPFNKPIALPRCSEMVPGTADCNITADRKVYPQADAVIVHHREVMYNPSAQLPRSPRRQGQRWIWFSMESPSHCWQLKAMDGYFNLTMSYRSDSDIFTPYGWLEPWSGQPAHPPLNLSAKTELVAWAVSNWGPNSARVRYYQSLQAHLKVDVYGRSHKPLPQGTMMETLSRYKFYLAFENSLHPDYITEKLWRNALEAWAVPVVLGPSRSNYERFLPPDAFIHVDDFQSPKDLARYLQELDKDHARYLSYFRWRETLRPRSFSWALAFCKACWKLQEESRSGGLIYLRTRLPEASPA

SEQ ID NO: 46752 - protein, 359 aa, Homo sapiens; identical to SEQ ID NO: 46749

SEQ ID NO: 46753 - protein, 359 aa, Homo sapiens; identical to SEQ ID NO: 46749

SEQ ID NO: 46754 - protein, 30 aa, Homo sapiens
MDPLGPAKPQWSWRCCLTTLLFQLLMAVCF

SEQ ID NO: 46755 - protein, 137 aa, Homo sapiens
MDPLGPAKPQWSWRCCLTTLLFQLLMAVCFFSYLRVSQDDPTVYPNGSRFPDSTGTPAHSIPLILLWTWPFNKPIALPRCSEMVPGTADCNITADRKVYPQADAVIVHHREVMYNPSAQLPRSPRRQGQRWIWFSME

SEQ ID NO: 46756 - protein, 69 aa, Homo sapiens
MDPLGPAKPQWSWRCCLTTLLFQLLMAVCFFSYLRVSQDDPTVYPNGSRFPDSTGTPAHSIPLILLWTW

SEQ ID NO: 46757 - protein, 66 aa, Homo sapiens
MDPLGPAKPQWSWRCCLTTLLFQLLMAVCFFSYLRVSQDDPTVYPNGSRFPDSTGTPAHSIPLILL

SEQ ID NO: 46758 - protein, 45 aa, Homo sapiens
MDPLGPAKPQWSWRCCLTTLLFQLLMAVCFFSYLRVSQDDPTVYP

SEQ ID NO: 46759 - protein, 342 aa, Homo sapiens
MNNAGHGPTRRLRGLGVLAGVALLAALWLLWLLGSAPRGTPAPQPTITILVWHWPFTDQPPELPSDTCTRYGIARCHLSANRSLLASADAVVFHHRELQTRRSHLPLAQRPRGQPWVWASMESPSHTHGLSHLRGIFNWVLSYRRDSDIFVPYGRLEPHWGPSPPLPAKSRVAAWVVSNFQERQLRARLYRQLAPHLRVDVFGRANGRPLCASCLVPTVAQYRFYLSFENSQHRDYITEKFWRNALVAGTVPVVLGPPRATYEAFVPADAFVHVDDFGSARELAAFLTGMNESRYQRFFAWRDRLRVRLFTDWRERFCAICDRYPHLPRSQVYEDLEGWFQA

SEQ ID NO: 46760 - protein, 575 aa, Homo sapiens
MRPWTGSWRWIMLILFAWGTLLFYIGGHLVRDNDHPDHSSRELSKILAKLERLKQQNEDLRRMAESLRIPEGPIDQGPAIGRVRVLEEQLVKAKEQIENYKKQTRNGLGKDHEILRRRIENGAKELWFFLQSELKKLKNLEGNELQRHADEFLLDLGHHERSIMTDLYYLSQTDGAGDWREKEAKDLTELVQRRITYLQNPKDCSKAKKLVCNINKGCGYGCQLHHVVYCFMIAYGTQRTLILESQNWRYATGGWETVFRPVSETCTDRSGISTGHWSGEVKDKNVQVVELPIVDSLHPRPPYLPLAVPEDLADRLVRVHGDPAVWWVSQFVKYLIRPQPWLEKEIEEATKKLGFKHPVIGVHVRRTDKVGTEAAFHPIEEYMVHVEEHFQLLARRMQVDKKRVYLATDDPSLLKEAKTKYPNYEFISDNSISWSAGLHNRYTENSLRGVILDIHFLSQADFLVCTFSSQVCRVAYEIMQTLHPDASANFHSLDDIYYFGGQNAHNQIAIYAHQPRTADEIPMEPGDIIGVAGNHWDGYSKGVNRKLGRTGLYPSYKVREKIETVKYPTYPEAEK

SEQ ID NO: 46761 - protein, 575 aa, Homo sapiens; identical to SEQ ID NO: 46760

SEQ ID NO: 46762 - protein, 575 aa, Homo sapiens; identical to SEQ ID NO: 46760

SEQ ID NO: 46763 - protein, 169 aa, Homo sapiens
MHRQIWHLHWTLVRYPNYEFISDNSISWSAGLHNRYTENSLRGVILDIHFLSQADFLVCTFSSQVCRVAYEIMQTLHPDASANFHSLDDIYYFGGQNAHNQIAIYAHQPRTADEIPMEPGDIIGVAGNHWDGYSKGVNRKLGRTGLYPSYKVREKIETVKYPTYPEAEK

SEQ ID NO: 46764 - protein, 15 aa, Homo sapiens
MRPWTGSWRWIMLIL

SEQ ID NO: 46765 - protein, 44 aa, Homo sapiens
MRPWTGSWRWIMLILFAWGTLLFYIGGHLVRDNDHPDHSSRELS

SEQ ID NO: 46766 - protein, 46 aa, Homo sapiens
MRPWTGSWRWIMLILFAWGTLLFYIGGHLVRDNDHPDHSSRELSKI

SEQ ID NO: 46767 - protein, 41 aa, Homo sapiens
MRPWTGSWRWIMLILFAWGTLLFYIGGHLVRDNDHPDHSSR

SEQ ID NO: 46768 - protein, 30 aa, Homo sapiens
MRPWTGSWRWIMLILFAWGTLLFYIGGHLV

SEQ ID NO: 46769 - protein, 412 aa, Homo sapiens
MTDLYYLSQTDGAGDWREKEAKDLTELVQRRITYLQNPKDCSKAKKLVCNINKGCGYGCQLHHVVYCFMIAYGTQRTLILESQNWRYATGGWETVFRPVSETCTDRSGISTGHWSGEVKDKNVQVVELPIVDSLHPRPPYLPLAVPEDLADRLVRVHGDPAVWWVSQFVKYLIRPQPWLEKEIEEATKKLGFKHPVIGVHVRRTDKVGTEAAFHPIEEYMVHVEEHFQLLARRMQVDKKRVYLATDDPSLLKEAKTKYPNYEFISDNSISWSAGLHNRYTENSLRGVILDIHFLSQADFLVCTFSSQVCRVAYEIMQTLHPDASANFHSLDDIYYFGGQNAHNQIAIYAHQPRTADEIPMEPGDIIGVAGNHWDGYSKGVNRKLGRTGLYPSYKVREKIETVKYPTYPEAEK

SEQ ID NO: 46770 - protein, 50 aa, Homo sapiens
MRPWTGSWRWIMLILFAWGTLLFYIGGHLVRDNDHPDHSSRELSKILAKL

SEQ ID NO: 46771 - protein, 359 aa, Homo sapiens
MTSTSKGILRPFLIVCIILGCFMACLLIYIKPTNSWIFSPMESASSVLKMKNFFSTKTDYFNETTILVWVWPFGQTFDLTSCQAMFNIQGCHLTTDRSLYNKSHAVLIHHRDISWDLTNLPQQARPPFQKWIWMNLESPTHTPQKSGIEHLFNLTLTYRRDSDIQVPYGFLTVSTNPFVFEVPSKEKLVCWVVSNWNPEHARVKYYNELSKSIEIHTYGQAFGEYVNDKNLIPTISTCKFYLSFENSIHKDYITEKLYNAFLAGSVPVVLGPSRENYENYIPADSFIHVEDYNSPSELAKYLKEVDKNNKLYLSYFNWRKDFTVNLPRFWESHACLACDHVKRHQEYKSVGNLEKWFWN

SEQ ID NO: 46772 - protein, 461 aa, Homo sapiens
MSRINKNVVLALLTLTSSAFLLFQLYYYKHYLSTKNGAGLSKSKGSRIGFDSTQWRAVKKFIMLTSNQNVPVFLIDPLILELINKNFEQVKNTSHGSTSQCKFFCVPRDFTAFALQYHLWKNEEGWFRIAENMGFQCLKIESKDPRLDGIDSLSGTEIPLHYICKLATHAIHLVVFHERSGNYLWHGHLRLKEHIDRKFVPFRKLQFGRYPGAFDRPELQQVTVDGLEVLIPKDPMHFVEEVPHSRFIECRYKEARAFFQQYLDDNTVEAVAFRKSAKELLQLAAKTLNKLGVPFWLSSGTCLGWYRQCNIIPYSKDVDLGIFIQDYKSDIILAFQDAGLPLKHKFGKVEDSLELSFQGKDDVKLDVFFFYEETDHMWNGGTQAKTGKKFKYLFPKFTLCWTEFVDMKVHVPCETLEYIEANYGKTWKIPVKTWDWKRSPPNVQPNGIWPISEWDEVIQLY

SEQ ID NO: 46773 - protein, 430 aa, Homo sapiens
MSRINKNVVLALLTLTSSAFLLFQLYYYKHYLSTKNGAGLSKSKGSRIGFDSTQWRAVKKFIMLTSNQNVPVFLIDPLILELINKNFEQVKNTSHGSTSQCKFFCVPRDFTAFALQYHLWKNEEGWFRIAENMGFQCLKIESKDPRLDGIDSLSGTEIPLHYICKLATHAIHLVVFHERSGNYLWHGHLRLKEHIDRKFVPFRKLQFGRYPGAFDRPELQQVTVDGLEVLIPKDPMHFVEEVPHSRFIECRYKEARAFFQQYLDDNTVEAVAFRKSAKELLQLAAKTLNKLGVPFWLSSGTCLGWYRQCNIIPYSKDVDLGIFIQDYKSDIILAFQDAGLPLKHKFGKVEDSLELSFQGKDDVKLDVFFFYEETDHMWNGGTQAKTGKKFKYLFPKFTLCWTEFVDMKVHVPCETLEYIEANYGKNQQGA

SEQ ID NO: 46774 - protein, 235 aa, Homo sapiens
MILEVGENNGFFSKSLLPRYASKKLKSSLPHSRAVKKFIMLTSNQNVPVFLIDPLILELINKNFEQVKNTSHGSTSQCKFFCVPRDFTAFALQYHLWKNEEGWFRIAENMGFQCLKIESKDPRLDGIDSLSGTEIPLHYICKLATHAIHLVVFHERSGNYLWHGHLRLKEHIDRKFVPFRKLQFGRYPGAFDRPELQQVTVDGLEVLIPKDPMHFVEEVPHSRFIECRYKEARAF

SEQ ID NO: 46775 - protein, 183 aa, Homo sapiens
MSRINKNVVLALLTLTSSAFLLFQLYYYKHYLSTKNGAGLSKSKGSRIGFDSTQWRAVKKFIMLTSNQNVPVFLIDPLILELINKNFEQVKNTSHGSTSQCKFFCVPRDFTAFALQYHLWKNEEGWFRIAENMGFQCLKIESKDPRLDGIDSLSGTEIPLHYICKLATHAIHLVVFHERSGNY

SEQ ID NO: 46776 - protein, 160 aa, Homo sapiens
  VARIANT 1: note = MOD_RES - Any amino acid
XWYRQCNIIPYSKDVDLGIFIQDYKSDIILAFQDAGLPLKHKFGKVEDSLELSFQGKDDVKLDVFFFYEETDHMWNGGTQAKTGKKFKYLFPKFTLCWTEFVDMKVHVPCETLEYIEANYGKEAESYILSMLFRTTFWSLADFPLTPENNSSLKNGNLNV

SEQ ID NO: 46777 - protein, 271 aa, Homo sapiens
MSRINKNVVLALLTLTSSAFLLFQLYYYKHYLSTKNGAGLSKSKGSRIGFDSTQWRAVKKFIMLTSNQNVPVFLIDPLILELINKNFEQVKNTSHGSTSQCKFFCVPRDFTAFALQYHLWKNEEGWFRIAENMGFQCLKIESKDPRLDGIDSLSGTEIPLHYICKLATHAIHLVVFHERSGNYLWHGHLRLKEHIDRKFVPFRKLQFGRYPGAFDRPELQQVTVDGLEVLIPKDPMHFVEEVPHSRFIECRYKEARAFFQIPVSEVYTVLD

SEQ ID NO: 46778 - protein, 495 aa, Homo sapiens
MRLTRCQAALAAAITLNLLVLFYVSWLQHQPRNSRARGPRRASAAGPRVTVLVREFEAFDNAVPELVDSFLQQDPAQPVVVAADTLPYPPLALPRIPNVRLALLQPALDRPAAASRPETYVATEFVALVPDGARAEAPGLLERMVEALRAGSARLVAAPVATANPARCLALNVSLREWTARYGAAPAAPRCDALDGDAVVLLRARDLFNLSAPLARPVGTSLFLQTALRGWAVQLLDLTFAAARQPPLATAHARWKAEREGRARRAALLRALGIRLVSWEGGRLEWFGCNKETTRCFGTVVGDTPAYLYEERWTPPCCLRALRETARYVVGVLEAAGVRYWLEGGSLLGAARHGDIIPWDYDVDLGIYLEDVGNCEQLRGAEAGSVVDERGFVWEKAVEGDFFRVQYSESNHLHVDLWPFYPRNGVMTKDTWLDHRQDVEFPEHFLQPLVPLPFAGFVAQAPNNYRRFLELKFGPGVIENPQYPNPALLSLTGSG

SEQ ID NO: 46779 - protein, 495 aa, Homo sapiens; identical to SEQ ID NO: 46778

SEQ ID NO: 46780 - protein, 794 aa, Homo sapiens
MELRPWLLWVVAATGTLVLLAADAQGQKVFTNTWAVRIPGGPAVANSVARKHGFLNLGQIFGDYYHFWHRGVTKRSLSPHRPRHSRLQREPQVQWLEQQVAKRRTKRDVYQEPTDPKFPQQWYLSGVTQRDLNVKAAWAQGYTGHGIVVSILDDGIEKNHPDLAGNYDPGASFDVNDQDPDPQPRYTQMNDNRHGTRCAGEVAAVANNGVCGVGVAYNARIGGVRMLDGEVTDAVEARSLGLNPNHIHIYSASWGPEDDGKTVDGPARLAEEAFFRGVSQGRGGLGSIFVWASGNGGREHDSCNCDGYTNSIYTLSISSATQFGNVPWYSEACSSTLATTYSSGNQNEKQIVTTDLRQKCTESHTGTSASAPLAAGIIALTLEANKNLTWRDMQHLVVQTSKPAHLNANDWATNGVGRKVSHSYGYGLLDAGAMVALAQNWTTVAPQRKCIIDILTEPKDIGKRLEVRKTVTACLGEPNHITRLEHAQARLTLSYNRRGDLAIHLVSPMGTRSTLLAARPHDYSADGFNDWAFMTTHSWDEDPSGEWVLEIENTSEANNYGTLTKFTLVLYGTAPEGLPVPPESSGCKTLTSSQACVVCEEGFSLHQKSCVQHCPPGFAPQVLDTHYSTENDVETIRASVCAPCHASCATCQGPALTDCLSCPSHASLDPVEQTCSRQSQSSRESPPQQQPPRLPPEVEAGQRLRAGLLPSHLPEVVAGLSCAFIVLVFVTVFLVLQLRSGFSFRGVKVYTMDRGLISYKGLPPEAWQEECPSDSEEDEGRGERTAFIKDQSAL

SEQ ID NO: 46781 - protein, 69 aa, Homo sapiens
KPAHLNANDWATNGVGRKVSHSYGYGLWTQAPWWPWPRIGPQWPPSGSASSTSSPSPKTSGNGSRCGRP

SEQ ID NO: 46782 - protein, 69 aa, Homo sapiens
MELRPWLLWVVAATGTLVLLAADAQGQKVFTNTWAVRIPGGPAVANSVARKHGFLNLGQIFGDYYHFWH

SEQ ID NO: 46783 - protein, 526 aa, Homo sapiens
MASNDYTQQATQSYGAYPTQPGQGYSQQSSQPYGQQSYSGYSQSTDTSGYGQSSYSSYGQSQNTGYGTQSTPQGYGSTGGYGSSQSSQSSYGQQSSYPGYGQQPAPSSTSGSYGSSSQSSSYGQPQSGSYSQQPSYGGQQQSYGQQQSYNPPQGYGQQNQYNSSSGGGGGGGGGGNYGQDQSSMSSGGGSGGGYGNQDQSGGGGSGGYGQQDRGGRGRGGSGGGGGGGGGGYNRSSGGYEPRGRGGGRGGRGGMGGSDRGGFNKFGGPRDQGSRHDSEQDNSDNNTIFVQGLGENVTIESVADYFKQIGIIKTNKKTGQPMINLYTDRETGKLKGEATVSFDDPPSAKAAIDWFDGKEFSGNPIKVSFATRRADFNRGGGNGRGGRGRGGPMGRGGYGGGGSGGGGRGGFPSGGGGGGGQQRAGDWKCPNPTCENMNFSWRNECNQCKAPKPDGPGGGPGGSHMGGNYGDDRRGGRGGYDRGGYRGRGGDRGGFRGGRGGGDRGGFGPGKMDSRGEHRQDRRERPY

SEQ ID NO: 46784 - protein, 151 aa, Homo sapiens
MNPEVVEVAVEAEVAWAEVTVVASINLVALGTKDHVMTPTNKKTGQPMINLYTDRETGKLKGEATVSFDDPPSAKAAIDWFDGKEFSGNPIKVSFATRRADFNRGGGNGRGGRGRGGPMGRGGYGGGGSGGGGRGGFPSGGGGGGGQQRAG

SEQ ID NO: 46785 - protein, 429 aa, Homo sapiens
MASNDYTQQATQSYGAYPTQPGQGYSQQSSQPYGQQSYSGYSQSTDTSGYGQSSYSSYGQSQNTGYGTQSTPQGYGSTGGYGSSQSSQSSYGQQSSYPGYGQQPAPSSTSGSYGSSSQSSSYGQPQSGSYSQQPSYGGQQQSYGQQQSYNPPQGYGQQNQYNSSSGGYEPRGRGGGRGGRGGMGGSDRGGFNKFGGPRDQGSRHDSEQDNSDNNTIFVQGLGENVTIESVADYFKQIGIIKTNKKTGQPMINLYTDRETGKLKGEATVSFDDPPSAKAAIDWFDGKEFSGNPIKVSFATRRADFNRGGGNGRGGRGRGGPMGRGGYGGGGSGGGGRGGFPSGGGGGGGQQRAGDWKCPNPTCENMNFSWRNECNQCKAPKPDGPGGGPGGSHMGGNYGDDRRGGDRGGFGPGKMDSRGEHRQDRRERPY

SEQ ID NO: 46786 - protein, 418 aa, Homo sapiens
MGEEGTGGTVHLLCLAASSGVPLFCRSSRGGAPARQQLPFSVIGSLNGVHMFGQNLEVQLSSARTENTTVVWKSFHDSITLIVLSSEVGISELRLERLLQMVFGAMVLLVGLEELTNIRNVERLKKDLRASYCLIDSFLGDSELIGDLTQCVDCVIPPEGSLLQEALSGFAEAAGTTFVSLVVSGRVVAATEGWWRLGTPEAVLLPWLVGSLPPQTARDYPVYLPHGSPTVPHRLLTLTLLPSLELCLLCGPSPPLSQLYPQLLERWWQPLLDPLRACLPLGPRALPSGFPLHTDILGLLLLHLELKRCLFTVEPLGDKEPSPEQRRRLLRNFYTLVTSTHFPPEPGPPEKTEDEVYQAQLPRACYLVLGTEEPGTGVRLVALQLGLRRLLLLLSPQSPTHGLRSLATHTLHALTPLL

SEQ ID NO: 46787 - protein, 236 aa, Homo sapiens
MGEEGTGGTVHLLCLAASSGVPLFCRSSRGGAPARQQLPFSVIGSLNGVHMFGQNLEVQLSSARTENTTVVWKSFHDSITLIVLSSEVGISELRLERLLQMVFGAMVLLVGLEELTNIRNVERLKKDLRASYCLIDSFLGDSELIGDLTQCVDCVIPPEGSLLQVLGMLWKLLHLFCWPWLSPHPLSSGPLSQPPPILSASSPIPTWSQKNLFSFFFSFLSLSFLFSFLSLFLFET

SEQ ID NO: 46788 - protein, 387 aa, Homo sapiens
MGEEGTGGTVHLLCLAASSGVPLFCRSSRGGAPARQQLPFSVIGSLNGVHMFGQNLEVQLSSARTENTTVVWKSFHDSITLIVLSSEVGISELRLERLLQMVFGAMVLLVGLEELTNIRNVERLKKDLRASYCLIDSFLGDSELIGDLTQCVDCVIPPEGSLLQEALSGFAEAAGTTFVSLVVSGRVVAATEGWWRLGTPEAVLLPWLVGSLPPQTARDYPVYLPHGSPTVPHRLLTLTLLPSLELCLLCGPSPPLSQLYPQLLERWWQPLLDPLRACLPLGPRALPSGFPLHTDILGLLLLHLELKRCLFTVEPLGDKEPSPEQRRRLLRNFYTLVTSTHFPPEPGPPEKTEDEVYQAQLPRACYLVMGDGHRHGAVSVSLFIRSQ

SEQ ID NO: 46789 - protein, 382 aa, Homo sapiens
MGEEGTGGTVHLLCLAASSGVPLFCRSSRGGAPARQQLPFSVIGSLNGVHMFGQNLEVQLSSARTENTTVVLLVGLEELTNIRNVERLKKDLRASYCLIDSFLGDSELIGDLTQCVDCVIPPEGSLLQEALSGFAEAAGTTFVSLVVSGRVVAATEGWWRLGTPEAVLLPWLVGSLPPQTARDYPVYLPHGSPTVPHRLLTLTLLPSLELCLLCGPSPPLSQLYPQLLERWWQPLLDPLRACLPLGPRALPSGFPLHTDILGLLLLHLELKRCLFTVEPLGDKEPSPEQRRRLLRNFYTLVTSTHFPPEPGPPEKTEDEVYQAQLPRACYLVLGTEEPGTGVRLVALQLGLRRLLLLLSPQSPTHGLRSLATHTLHALTPLL

SEQ ID NO: 46790 - protein, 92 aa, Homo sapiens
MASLGHILVFCVGLLTMAKAESPKEHDPFTYDYQSLQIGGLVIAGILFILGILIVLSRRCRCKFNQQQRTGEPDEEEGTFRSSIRRLSTRRR

SEQ ID NO: 46791 - protein, 92 aa, Homo sapiens; identical to SEQ ID NO: 46790

SEQ ID NO: 46792 - protein, 64 aa, Homo sapiens
MDRWYLGGSPKGDVDPFYYDYETVRNGGLIFAGLAFIVGLLILLSRRFRCGGNKKRRQINEDEP

SEQ ID NO: 46793 - protein, 66 aa, Homo sapiens
MTGLSMDGGGSPKGDVDPFYYDYETVRNGGLIFAGLAFIVGLLILLSRRFRCGGNKKRRQINEDEP

SEQ ID NO: 46794 - protein, 64 aa, Homo sapiens; identical to SEQ ID NO: 46792

SEQ ID NO: 46795 - protein, 87 aa, Homo sapiens
MQKVTLGLLVFLAGFPVLDANDLEDKNSPFYYDWHSLQVGGLICAGVLCAMGIIIVMSAKCKCKFGQKSGHHPGETPPLITPGSAQS

SEQ ID NO: 46796 - protein, 113 aa, Homo sapiens
MQKVTLGLLVFLAGFPVLDANDLEDKNSPFYYDWHSLQVGGLICAGVLCAMGIIIVMSEWRSSGEQAGRGWGSPPLTTQLSPTGAKCKCKFGQKSGHHPGETPPLITPGSAQS

SEQ ID NO: 46797 - protein, 96 aa, Homo sapiens
MQKVTLGLLVFLAGFPVLDANDLEDKNSPFYYDWHSLQVGGLICAGVLCAMGIIIVMSEWRSSGEQAGRGWGSPPLTTQLSPTGAKCKCKFGQKSG

SEQ ID NO: 46798 - protein, 87 aa, Homo sapiens; identical to SEQ ID NO: 46795

SEQ ID NO: 46799 - protein, 144 aa, Homo sapiens
MGRGYSGALQARGGLEEPLERGLRGPSFTQSPLHGAAAAYLSAQRDASLPVPGQRSDMQKVTLGLLVFLAGFPVLDANDLEDKNSPFYYDWHSLQVGGLICAGVLCAMGIIIVMSAKCKCKFGQKSGHHPGETPPLITPGSAQS

SEQ ID NO: 46800 - protein, 61 aa, Homo sapiens
MQKVTLGLLVFLAGFPVLDANDLEDKNSPFYYGESPCPLSPPHNPTYCLVPRVPIQGWGLT

SEQ ID NO: 46801 - protein, 144 aa, Homo sapiens; identical to SEQ ID NO: 46799

SEQ ID NO: 46802 - protein, 95 aa, Homo sapiens
MELVLVFLCSLLAPMVLASAAEKEKEMDPFHYDYQTLRIGGLVFAVVLFSVGILLILSRRCKCSFNQKPRAPGDEEAQVENLITANATEPQKAEN

SEQ ID NO: 46803 - protein, 95 aa, Homo sapiens; identical to SEQ ID NO: 46802

SEQ ID NO: 46804 - protein, 95 aa, Homo sapiens; identical to SEQ ID NO: 46802

SEQ ID NO: 46805 - protein, 95 aa, Homo sapiens; identical to SEQ ID NO: 46802

SEQ ID NO: 46806 - protein, 95 aa, Homo sapiens; identical to SEQ ID NO: 46802

SEQ ID NO: 46807 - protein, 95 aa, Homo sapiens; identical to SEQ ID NO: 46802

SEQ ID NO: 46808 - protein, 80 aa, Homo sapiens
MATPTQTPTKAPEEPDPFYYDYNTVQTVGMTLATILFLLGILIVISKKVKCRKADSRSESPTCKSCKSELPSSAPGGGGV

SEQ ID NO: 46809 - protein, 133 aa, Homo sapiens
MVSVGFGDRAGLGSSCRCSQITPDMASAVATRYVLGHWPRDHICGCGSHQLSSWRAEPDGGVGMPHTLSEPPSGLTGIWAGALVSPEKQMKENLRSNDSEPRLPGFESCLIHSLAVWPWASNFASLGPSVNKG

SEQ ID NO: 46810 - protein, 485 aa, Homo sapiens
MGCVQCKDKEATKLTEERDGSLNQSSGYRYGTDPTPQHYPSFGVTSIPNYNNFHAAGGQGLTVFGGVNSSSHTGTLRTRGGTGVTLFVALYDYEARTEEWYFGKLGRKDAERQLLSFGNPRGTFLIRESETTKGAYSLSIRDWDDMKGDHVKHYKIRKLDNGGYYITTRAQFETLQQLVQHYSEKADGLCFNLTVIASSCTPQTSGLAKDAWEVARRSLCLEKKLGQGCFAEVWLGTWNGNTKVAIKTLKPGTMSPESFLEEAQIMKKLKHDKLVQLYAVVSEEPIYIVTEYMNKGSLLDFLKDGEGRALKLPNLVDMAAQVAAGMAYIERMNYIHRDLRSANILVGNGLICKIADFGLARLIEDNEYTARQGAKFPIKWTAPEAALYGRFTIKSDVWSFGILLTELVTKGRVPYPGMNNREVLEQVERGYRMPCPQDCPISLHELMIHCWKKDPEERPTFEYLQSFLEDYFTATEPQYQPGENL

SEQ ID NO: 46811 - protein, 482 aa, Homo sapiens
MGCVQCKDKEATKLTEERDGSLNQSSGYRYGTDPTPQHYPSFGVTSIPNYNNFHAAGGQGLTVFGGVNSSSHTGTLRTRGGTGVTLFVALYDYEARTEDDLSFHKGEKFQILNSSEGDWWEARSLTTGETGYIPSNYVAPVDSIQAEEWYFGKLGRKDAERQLLSFGNPRGTFLIRESETTKGAYSLSIRDWDDMKGDHVKHYKIRKLDNGGYYITTRAQFETLQQLVQHYSGTWNGNTKVAIKTLKPGTMSPESFLEEAQIMKKLKHDKLVQLYAVVSEEPIYIVTEYMNKGSLLDFLKDGEGRALKLPNLVDMAAQVAAGMAYIERMNYIHRDLRSANILVGNGLICKIADFGLARLIEDNEYTARQGAKFPIKWTAPEAALYGRFTIKSDVWSFGILLTELVTKGRVPYPGMNNREVLEQVERGYRMPCPQDCPISLHELMIHCWKKDPEERPTFEYLQSFLEDYFTATEPQYQPGENL

SEQ ID NO: 46812 - protein, 537 aa, Homo sapiens
MGCVQCKDKEATKLTEERDGSLNQSSGYRYGTDPTPQHYPSFGVTSIPNYNNFHAAGGQGLTVFGGVNSSSHTGTLRTRGGTGVTLFVALYDYEARTEDDLSFHKGEKFQILNSSEGDWWEARSLTTGETGYIPSNYVAPVDSIQAEEWYFGKLGRKDAERQLLSFGNPRGTFLIRESETTKGAYSLSIRDWDDMKGDHVKHYKIRKLDNGGYYITTRAQFETLQQLVQHYSERAAGLCCRLVVPCHKGMPRLTDLSVKTKDVWEIPRESLQLIKRLGNGQFGEVWMGTWNGNTKVAIKTLKPGTMSPESFLEEAQIMKKLKHDKLVQLYAVVSEEPIYIVTEYMNKGSLLDFLKDGEGRALKLPNLVDMAAQVAAGMAYIERMNYIHRDLRSANILVGNGLICKIADFGLARLIEDNEYTARQGAKFPIKWTAPEAALYGRFTIKSDVWSFGILLTELVTKGRVPYPGMNNREVLEQVERGYRMPCPQDCPISLHELMIHCWKKDPEERPTFEYLQSFLEDYFTATEPQYQPGENL

SEQ ID NO: 46813 - protein, 482 aa, Homo sapiens; identical to SEQ ID NO: 46811

SEQ ID NO: 46814 - protein, 537 aa, Homo sapiens; identical to SEQ ID NO: 46812

SEQ ID NO: 46815 - protein, 534 aa, Homo sapiens
MGCVQCKDKEATKLTEERDGSLNQSSGYRYGTDPTPQHYPSFGVTSIPNYNNFHAAGGQGLTVFGGVNSSSHTGTLRTRGGTGVTLFVALYDYEARTEDDLSFHKGEKFQILNSSEGDWWEARSLTTGETGYIPSNYVAPVDSIQAEEWYFGKLGRKDAERQLLSFGNPRGTFLIRESETTKGAYSLSIRDWDDMKGDHVKHYKIRKLDNGGYYITTRAQFETLQQLVQHYSEKADGLCFNLTVIASSCTPQTSGLAKDAWEVARRSLCLEKKLGQGCFAEVWLGTWNGNTKVAIKTLKPGTMSPESFLEEAQIMKKLKHDKLVQLYAVVSEEPIYIVTEYMNKGSLLDFLKDGEGRALKLPNLVDMAAQVAAGMAYIERMNYIHRDLRSANILVGNGLICKIADFGLARLIEDNEYTARQGAKFPIKWTAPEAALYGRFTIKSDVWSFGILLTELVTKGRVPYPGMNNREVLEQVERGYRMPCPQDCPISLHELMIHCWKKDPEERPTFEYLQSFLEDYFTATEPQYQPGENL

SEQ ID NO: 46816 - protein, 534 aa, Homo sapiens; identical to SEQ ID NO: 46815

SEQ ID NO: 46817 - protein, 120 aa, Homo sapiens
MGCVQCKDKEATKLTEERDGSLNQSSGYRYGTDPTPQHYPSFGVTSIPNYNNFHAAGGQGLTVFGGVNSSSHTGTLRTRGGTGVTLFVALYDYEARTEDDLSFHKGEKFQILNSSEGDWW

SEQ ID NO: 46818 - protein, 232 aa, Homo sapiens
MGCVQCKDKEATKLTEERDGSLNQSSGYRYGTDPTPQHYPSFGVTSIPNYNNFHAAGGQGLTVFGGVNSSSHTGTLRTRGGTGVTLFVALYDYEARTEDDLSFHKGEKFQILNSSEGDWWEARSLTTGETGYIPSNYVAPVDSIQAEEWYFGKLGRKDAERQLLSFGNPRGTFLIRESETTKGAYSLSIRDWDDMKGDHVKHYKIRKLDNGGYYITTRAQFETLQQLVQHYS

SEQ ID NO: 46819 - protein, 106 aa, Homo sapiens
MGCVQCKDKEATKLTEERDGSLNQSSGYRYGTDPTPQHYPSFGVTSIPNYNNFHAAGGQGLTVFGGVNSSSHTGTLRTRGGTGVTLFVALYDYEARTEDDLSFHKG

SEQ ID NO: 46820 - protein, 65 aa, Homo sapiens
MGCVQCKDKEATKLTEERDGSLNQSSGYRYGTDPTPQHYPSFGVTSIPNYNNFHAAGGQGLTVFG

SEQ ID NO: 46821 - protein, 175 aa, Homo sapiens
MGCVQCKDKEATKLTEERDGSLNQSSGYRYGTDPTPQHYPSFGVTSIPNYNNFHAAGGQGLTVFGGVNSSSHTGTLRTRGGTGVTLFVALYDYEARTEDDLSFHKGEKFQILNSSEGDWWEARSLTTGETGYIPSNYVAPVDSIQAEEWYFGKLGRKDAERQLLSFGNPRGTFLI

SEQ ID NO: 46822 - protein, 153 aa, Homo sapiens
MGCVQCKDKEATKLTEERDGSLNQSSGYRYGTDPTPQHYPSFGVTSIPNYNNFHAAGGQGLTVFGGVNSSSHTGTLRTRGGTGVTLFVALYDYEARTEDDLSFHKGEKFQILNSSEGDWWEARSLTTGETGYIPSNYVAPVDSIQAEEWYFGK

SEQ ID NO: 46823 - protein, 118 aa, Homo sapiens
MGCVQCKDKEATKLTEERDGSLNQSSGYRYGTDPTPQHYPSFGVTSIPNYNNFHAAGGQGLTVFGGVNSSSHTGTLRTRGGTGVTLFVALYDYEARTEDDLSFHKGEKFQILNSSEGD

SEQ ID NO: 46824 - protein, 186 aa, Homo sapiens
MGCVQCKDKEATKLTEERDGSLNQSSGYRYGTDPTPQHYPSFGVTSIPNYNNFHAAGGQGLTVFGGVNSSSHTGTLRTRGGTGVTLFVALYDYEARTEDDLSFHKGEKFQILNSSEGDWWEARSLTTGETGYIPSNYVAPVDSIQAEEWYFGKLGRKDAERQLLSFGNPRGTFLIRESETTKGAYS

SEQ ID NO: 46825 - protein, 103 aa, Homo sapiens
MGCVQCKDKEATKLTEERDGSLNQSSGYRYGTDPTPQHYPSFGVTSIPNYNNFHAAGGQGLTVFGGVNSSSHTGTLRTRGGTGVTLFVALYDYEARTEDDLSF

SEQ ID NO: 46826 - protein, 152 aa, Homo sapiens
MGCVQCKDKEATKLTEERDGSLNQSSGYRYGTDPTPQHYPSFGVTSIPNYNNFHAAGGQGLTVFGGVNSSSHTGTLRTRGGTGVTLFVALYDYEARTEDDLSFHKGEKFQILNSSEGDWWEARSLTTGETGYIPSNYVAPVDSIQAEEWYFG

SEQ ID NO: 46827 - protein, 116 aa, Homo sapiens
MGCVQCKDKEATKLTEERDGSLNQSSGYRYGTDPTPQHYPSFGVTSIPNYNNFHAAGGQGLTVFGGVNSSSHTGTLRTRGGTGVTLFVALYDYEARTEDDLSFHKGEKFQILNSSE

SEQ ID NO: 46828 - protein, 140 aa, Homo sapiens
MGCVQCKDKEATKLTEERDGSLNQSSGYRYGTDPTPQHYPSFGVTSIPNYNNFHAAGGQGLTVFGGVNSSSHTGTLRTRGGTGVTLFVALYDYEARTEDDLSFHKGEKFQILNSSEGDWWEARSLTTGETGYIPSNYVAP

SEQ ID NO: 46829 - protein, 145 aa, Homo sapiens
MGCVQCKDKEATKLTEERDGSLNQSSGYRYGTDPTPQHYPSFGVTSIPNYNNFHAAGGQGLTVFGGVNSSSHTGTLRTRGGTGVTLFVALYDYEARTEDDLSFHKGEKFQILNSSEGDWWEARSLTTGETGYIPSNYVAPVDSIQ

SEQ ID NO: 46830 - protein, 534 aa, Homo sapiens; identical to SEQ ID NO: 46815

SEQ ID NO: 46831 - protein, 485 aa, Homo sapiens
MGCVQCKDKEATKLTEERDGSLNQSSGYRYGTDPTPQHYPSFGVTSIPNYNNFHAAGGQGLTVFGGVNSSSHTGTLRTRGGTGVTLFVALYDYEAQAEEWYFGKLGRKDAERQLLSFGNPRGTFLIRESETTKGAYSLSIRDWDDMKGDHVKHYKIRKLDNGGYYITTRAQFETLQQLVQHYSEKADGLCFNLTVIASSCTPQTSGLAKDAWEVARRSLCLEKKLGQGCFAEVWLGTWNGNTKVAIKTLKPGTMSPESFLEEAQIMKKLKHDKLVQLYAVVSEEPIYIVTEYMNKGSLLDFLKDGEGRALKLPNLVDMAAQVAAGMAYIERMNYIHRDLRSANILVGNGLICKIADFGLARLIEDNEYTARQGAKFPIKWTAPEAALYGRFTIKSDVWSFGILLTELVTKGRVPYPGMNNREVLEQVERGYRMPCPQDCPISLHELMIHCWKKDPEERPTFEYLQSFLEDYFTATEPQYQPGENL

SEQ ID NO: 46832 - protein, 1478 aa, Homo sapiens
MASTNAESQLQRIIRDLQDAVTELSKEFQEAGEPITDDSTSLHKFSYKLEYLLQFDQKEKATLLGNKKDYWDYFCACLAKVKGANDGIRFVKSISELRTSLGKGRAFIRYSLVHQRLADTLQQCFMNTKVTSDWYYARSPFLQPKLSSDIVGQLYELTEVQFDLASRGFDLDAAWPTFARRTLTTGSSAYLWKPPSRSSSMSSLVSSYLQTQEMVSNFDLNSPLNNEALEGFDEMRLELDQLEVREKQLRERMQQLDRENQELRAAVSQQGEQLQTERERGRTAAEDNVRLTCLVAELQKQWEVTQATQNTVKELQTCLQGLELGAAEKEEDYHTALRRLESMLQPLAQELEATRDSLDKKNQHLASFPGWLAMAQQKADTASDTKGRQEPIPSDAAQEMQELGEKLQALERERTKVEEVNRQQSAQLEQLVKELQLKEDARASLERLVKEMAPLQEELSGKGQEADQLWRRLQELLAHTSSWEEELAELRREKKQQQEEKELLEQEVRSLTRQLQFLETQLAQVSQHVSDLEEQKKQLIQDKDHLSQQVGMLERLAGPPGPELPVAGEKNEALVPVNSSLQEAWGKPEEEQRGLQEAQLDDTKVQEGSQEEELRQANRELEKELQNVVGRNQLLEGKLQALQADYQALQQRESAIQGSLASLEAEQASIRHLGDQMEASLLAVRKAKEAMKAQMAEKEAILQSKEGECQQLREEVEQCQQLAEARHRELRALESQCQQQTQLIEVLTAEKGQQGVGPPTDNEARELAAQLALSQAQLEVHQGEVQRLQAQVVDLQAKMRAALDDQDKVQSQLSMAEAVLREHKTLVQQLKEQNEALNRAHVQELLQCSEREGALQEERADEAQQREEELRALQEELSQAKCSSEEAQLEHAELQEQLHRANTDTAELGIQVCALTVEKERVEEALACAVQELQDAKEAASREREGLERQVAGLQQEKESLQEKLKAAKAAAGSLPGLQAQLAQAEQRAQSLQEAAHQELNTLKFQLSAEIMDYQSRLKNAGEECKSLRGQLEEQGRQLQAAEEAVEKLKATQADMGEKLSCTSNHLAECQAAMLRKDKEGAALREDLERTQKELEKATTKIQEYYNKLCQEVTNRERNDQKMLADLDDLNRTKKYLEERLIELLRDKDALWQKSDALEFQQKLSAEERWLGDTEANHCLDCKREFSWMVRRHHCRICGRIFCYYCCNNYVLSKHGGKKERCCRACFQKLSEGPGSPDSSGSGTSQGEPSPALSPASPGPQATGGQGANTDYRPPDDAVFDIITDEELCQIQESGSSLPETPTETDSLDPNAAEQDTTSTSLTPEDTEDMPVGQDSEICLLKSGELMIKVPLTVDEIASFGEGSRELFVRSSTYSLIPITVAEAGLTISWVFSSDPKSISFSVVFQEAEDTPLDQCKVLIPTTRCNSHKENIQGQLKVRTPGIYMLIFDNTFSRFVSKKVFYHLTVDRPVIYDGSDFL

SEQ ID NO: 46833 - protein, 267 aa, Homo sapiens
  VARIANT 1: note = MOD_RES - Any amino acid
XSKHGGKKERCCRACFQKLSEGPGSPDSSGSGTSQGEPSPALSPASPGPQATGGQGANTDYRPPDDAVFDIITDEELCQIQESGSSLPETPTETDSLDPNAAEQDTTSTSLTPEDTEDMPVGQDSEICLLKSGELMIKVPLTVDEIASFGEGSRELFVRSSTYSLIPITVAEAGLTISWVFSSDPKSISFSVVFQEAEDTPLDQCKVLIPTTRCNSHKENIQGQLKVRTPGIYMLIFDNTFSRFVSKKVFYHLTVDRPVIYDGSDFL

SEQ ID NO: 46834 - protein, 1498 aa, Homo sapiens
MASTNAESQLQRIIRDLQDAVTELSKEFQEAGEPITDDSTSLHKFSYKLEYLLQFDQKEKATLLGNKKDYWDYFCACLAKVKGANDGIRFVKSISELRTSLGKGRAFIRYSLVHQRLADTLQQCFMNTKVTSDWYYARSPFLQPKLSSDIVGQLYELTEVQFDLASRGFDLDAAWPTFARRTLTTGSSAYLWKPPSRSSSMSSLVSSYLQTQEMVSNFDLNSPLNNEALEGFDEMRLELDQLEVREKQLRERMQQLDRENQELRAAVSQQGEQLQTERERGRTAAEDNVRLTCLVAELQKQWEVTQATQNTVKELQTCLQGLELGAAEKEEDYHTALRRLESMLQPLAQELEATRDSLDKKNQHLASFPGWLAMAQQKADTASDTKGRQEPIPSDAAQEMQELGEKLQALERERTKVEEVNRQQSAQLEQLVKELQLKEDARASLERLVKEMAPLQEELSGKGQEADQLWRRLQELLAHTSSWEEELAELRREKKQQQEEKELLEQEVRSLTRQLQFLETQLAQVSQHVSDLEEQKKQLIQDKDHLSQQVGMLERLAGPPGPELPVAGEKNEALVPVNSSLQEAWGKPEEEQRGLQEAQLDDTKVQEGSQEEELRQANRELEKELQNVVGRNQLLEGKLQALQADYQALQQRESAIQGSLASLEAEQASIRHLGDQMEASLLAVRKAKEAMKAQMAEKEAILQSKEGECQQLREEVEQCQQLAEARHRELRALESQCQQQTQLIEVLTAEKGQQGVGPPTDNEARELAAQLALSQAQLEVHQGEVQRLQAQVVDLQAKMRAALDDQDKVQSQLSMAEAVLREHKTLVQQLKEQNEALNRAHVQELLQCSEREGALQEERADEAQQREEELRALQEELSQAKCSSEEAQLEHAELQEQLHRANTDTAELGIQVCALTVEKERVEEALACAVQELQDAKEAASREREGLERQVAGLQQEKESLQEKLKAAKAAAGSLPGLQAQLAQAEQRAQSLQEAAHQELNTLKFQLSAEIMDYQSRLKNAGEECKSLRGQLEEQGRQLQAAEEAVEKLKATQADMGEKLSCTSNHLAECQAAMLRKDKEGAALREDLERTQKELEKATTKIQEYYNKLCQEVTNRERNDQKMLADLDDLNRTKKYLEERLIELLRDKDALWQKSDALEFQQKLSAEERWLGDTEANHCLDCKREFSWMVRRHHCRICGRIFCYYCCNNYVLSKHGGKKERCCRACFQKLSEGPGSPDSSGSGTSQGEPSPALSPASPGPQATGGQGANTDYRPPDDAVFDIITDEELCQIQESGSSLPETPTETDSLDPNAAEQASVGASKGLGNLLCESSACRDTTSTSLTPEDTEDMPVGQDSEICLLKSGELMIKVPLTVDEIASFGEGSRELFVRSSTYSLIPITVAEAGLTISWVFSSDPKSISFSVVFQEAEDTPLDQCKVLIPTTRCNSHKENIQGQLKVRTPGIYMLIFDNTFSRFVSKKVFYHLTVDRPVIYDGSDFL

SEQ ID NO: 46835 - protein, 961 aa, Homo sapiens
MHGHRAPGGAGPSEPEHPATNPPGAAPPACADSDPGASEPGLLARRGSGSALGGPLDPQFVGPSDTSLGAAPGHRVLPCGPSPQHHRALRFSYHLEGSQPRPGLHQGNRILVKSLSLDPGQSLEPHPEGPQRLRSDPGPPTETPSQRPSPLKRAPGPKPQVPPKPSYLQMPRMPPPLEPIPPPPSRPLPADPRVAKGLAPRAEASPSSAAVSSLIEKFEREPVIVASDRPVPGPSPGPPEPVMLPQPTSQPPVPQLPEGEASRCLFLLAPGPRDGEKVPNRDSGIDSISSPSNSEETCFVSDDGPPSHSLCPGPPALASVPVALADPHRPGSQEVDSDLEEEDDEEEEEEKDREIPVPLMERQESVELTVQQKVFHIANELLQTEKAYVSRLHLLDQVFCARLLEEARNRSSFPADVVHGIFSNICSIYCFHQQFLLPELEKRMEEWDRYPRIGDILQKLAPFLKMYGEYVKNFDRAVELVNTWTERSTQFKVIIHEVQKEEACGNLTLQHHMLEPVQRIPRYELLLKDYLLKLPHGSPDSKDAQKSLELIATAAEHSNAAIRKMERMHKLLKVYELLGGEEDIVSPTKELIKEGHILKLSAKNGTTQDRYLILFNDRLLYCVPRLRLLGQKFSVRARIDVDGMELKESSNLNLPRTFLVSGKQRSLELQARTEEEKKDWVQAINSTLLKHEQTLETFKLLNSTNREDEDTPPNSPNVDLGKRAPTPIREKEVTMCMRCQEPFNSITKRRHHCKACGHVVCGKCSEFRARLVYDNNRSNRVCTDCYVALHGVPGSSPACSQHTPQRRRSILEKQASVAAENSVICSFLHYMEKGGKGWHKAWFVVPENEPLVLYIYGAPQDVKAQRSLPLIGFEVGPPEAGERPDRRHVFKITQSHLSWYFSPETEELQRRWMAVLGRAGRGDTFCPGPTLSEDREMEEAPVAALGATAEPPESPQTRDKT

SEQ ID NO: 46836 - protein, 655 aa, Homo sapiens
MKGASEEKLASVSNLVTVFENSRTPEAAPRGQRLEDVHHRPECRPPESPGPREKTNVGEAVGSEPRTVSRRYLNSLKNKLSSEAWRKSCQPVTLSGSGTQEPEKKIVQELLETEQAYVARLHLLDQVFFQELLKTARSSKAFPEDVVRVIFSNISSIYQFHSQFFLPELQRRLDDWTANPRIGDVIQKLAPFLKMYSEYVKNFERAAELLATWTDKSPLFQEVLTRIQSSEASGSLTLQHHMLEPVQRIPRYELLLKEYIQKLPAQAPDQADAQKALDMIFSAAQHSNAAITEMERLQDLWEVYQRLGLEDDIVDPSNTLLREGPVLKISFRRNDPMERYLFLFNNMLLYCVPRVIQVGAQFQVRTRIDVAGMKVRELMDAEFPHSFLVSGKQRTLELQARSQEEMISWMQAFQAAIDQIEKRNETFKAAAQGPEGDIQEQELQSEELGLRAPQWVRDKMVTMCMRCQEPFNALTRRRHHCRACGYVVCARCSDYRAELKYDDNRPNRVCLHCYAFLTGNVLPEAKEDKRRGILEKGSSATPDQSLMCSFLQLIGDKWGKSGPRGWCVIPRDDPLVLYVYAAPQDMRAHTSIPLLGYQVTVGPQGDPRVFQLQQSGQLYTFKAETEELKGRWVKAMERAASGWSPSWPNDGDLSD

SEQ ID NO: 46837 - protein, 283 aa, Homo sapiens
MKVRELMDAEFPHSFLVSGKQRTLELQARSQEEMISWMQAFQAAIDQIEKRNETFKAAAQGPEGDIQEQELQSEELGLRAPQWVRDKMVTMCMRCQEPFNALTRRRHHCRACGYVVCARCSDYRAELKYDDNRPNRVCLHCYAFLTGNVLPEAKEDKRRGILEKGSSATPDQSLMCSFLQLIGDKWGKSGPRGWCVIPRDDPLVLYVYAAPQDMRAHTSIPLLGYQVTVGPQGDPRVFQLQQSGQLYTFKAETEELKGRWVKAMERAASGWSPSWPNDGDLSD

SEQ ID NO: 46838 - protein, 725 aa, Homo sapiens
MESGRGSSTPPGPIAALGMPDTGPGSSSLGKLQALPVGPRAHCGDPVSLAAAGDGSPDIGPTGELSGSLKIPNRDSGIDSPSSSVAGENFPCEEGLEAGPSPTVLGAHAEMALDSQVPKVTPQEEADSDVGEEPDSENTPQKADKDAGLAQHSGPQKLLHIAQELLHTEETYVKRLHLLDQVFCTRLTDAGIPPEVIMGIFSNISSIHRFHGQFLLPELKTRITEEWDTNPRLGDILQKLAPFLKMYGEYVKNFDRAVGLVSTWTQRSPLFKDVVHSIQKQEVCGNLTLQHHMLEPVQRVPRYELLLKDYLKRLPQDAPDRKDAERSLELISTAANHSNAAIRKVEKMHKLLEVYEQLGGEEDIVNPANELIKEGQIQKLSAKNGTPQDRHLFLFNSMILYCVPKLRLMGQKFSVREKMDISGLQVQDIVKPNTAHTFIITGRKRSLELQTRTEEEKKEWIQIIQATIEKHKQNSETFKAFGGAFSQDEDPSLSPDMPITSTSPVEPVVTTEGSSGAAGLEPRKLSSKTRRDKEKQSCKSCGETFNSITKRRHHCKLCGAVICGKCSEFKAENSRQSRVCRDCFLTQPVAPESTEKTPTADPQPSLLCGPLRLSESGETWSEVWAAIPMSDPQVLHLQGGSQDGRLPRTIPLPSCKLSVPDPEERLDSGHVWKLQWAKQSWYLSASSAELQQQWLETLSTAAHGDTAQDSPGALQLQVPMGAAAP

SEQ ID NO: 46839 - protein, 725 aa, Homo sapiens; identical to SEQ ID NO: 46838

SEQ ID NO: 46840 - protein, 724 aa, Homo sapiens
MESGRGSSTPPGPIAALGMPDTGPGSSSLGKLQALPVGPRAHCGDPVSLAAAGDGSPDIGPTGELSGSLKIPNRDSGIDSPSSSVAGENFPCEEGLEAGPSPTVLGAHAEMALDSQVPKVTPQEEADSDVGEEPDSENTPQKADKDAGLAQHSGPQKLLHIAQELLHTEETYVKRLHLLDQVFCTRLTDAGIPPEVIMGIFSNISSIHRFHGQFLLPELKTRITEEWDTNPRLGDILQKLAPFLKMYGEYVKNFDRAVGLVSTWTQRSPLFKDVVHSIQKQEVCGNLTLQHHMLEPVQRVPRYELLLKDYLKRLPQDAPDRKDAERSLELISTAANHSNAAIRKVEKMHKLLEVYEQLGGEEDIVNPANELIKEGQIQKLSAKNGTPQDRHLFLFNSMILYCVPKLRLMGQKFSVREKMDISGLQVQDIVKPNTAHTFIITGRKRSLELQTRTEEEKKEWIQIIQATIEKHKQNSETFKAFGGAFSQDEDPSLSPDMPITSTSPVEPVVTTEGSSGAAGLEPRKLSSKTRRDKEKQSCKSCGETFNSITKRRHHCKLCGAVICGKCSEFKAENSRQSRVCRDCFLTQPVAPESTETPTADPQPSLLCGPLRLSESGETWSEVWAAIPMSDPQVLHLQGGSQDGRLPRTIPLPSCKLSVPDPEERLDSGHVWKLQWAKQSWYLSASSAELQQQWLETLSTAAHGDTAQDSPGALQLQVPMGAAAP

SEQ ID NO: 46841 - protein, 328 aa, Homo sapiens
MILYCVPKLRLMGQKFSVREKMDISGLQVQDIVKPNTAHTFIITGRKRSLELQTRTEEEKKEWIQIIQATIEKHKQNSETFKAFGGAFSQDEDPSLSPDMPITSTSPVEPVVTTEGSSGAAGLEPRKLSSKTRRDKEKQSCKSCGETFNSITKRRHHCKLCGAVICGKCSEFKAENSRQSRVCRDCFLTQPVAPESTEKTPTADPQPSLLCGPLRLSESGETWSEVWAAIPMSDPQVLHLQGGSQDGRLPRTIPLPSCKLSVPDPEERLDSGHVWKLQWAKQSWYLSASSAELQQQWLETLSTAAHGDTAQDSPGALQLQVPMGAAAP

SEQ ID NO: 46842 - protein, 471 aa, Homo sapiens
MVNKIFSNISSINAFHSKFLLPELEKRMQEWETTPRIGDILQKLAPFLKMYGEYVKGFDNAMELVKNMTERIPQFKSVVEEIQKQKICGSLTLQHHMLEPVQRIPRYEMLLKDYLRKLPPDSLDWNDAKKSLEIISTAASHSNSAIRKMENLKKLLEIYEMLGEEEDIVNPSNELIKEGQILKLAARNTSAQERYLFLFNNMLLYCVPKFSLVGSKFTVRTRVGIDGMKIVETQNEEYPHTFQVSGKERTLELQASSAQDKEEWIKALQETIDAFHQRHETFRNAIAKDNDIHSEVSTAELGKRAPRWIRDNEVTMCMKCKEPFNALTRRRHHCRACGYVVCWKCSDYKAQLEYDGGKLSKVCKDCYQIISGFTDSEEKKRKGILEIESAEVSGNSVVCSFLQYMEKSKPWQKAWCVIPKQDPLVLYMYGAPQVSKPHLSEGTDALGGKGKRVDSGLKICRTRVQAVSLFH

SEQ ID NO: 46843 - protein, 280 aa, Homo sapiens
MVNKIFSNISSINAFHSKFLLPELEKRMQEWETTPRIGDILQKLAPFLKMYGEYVKGFDNAMELVKNMTERIPQFKSVVEEIQKQKICGSLTLQHHMLEPVQRIPRYEMLLKDYLRKLPPDSLDWNDAKKSLEIISTAASHSNSAIRKMENLKKLLEIYEMLGEEEDIVNPSNELIKEGQILKLAARNTSAQERYLFLFNNMLLYCVPKFSLVGSKFTVRTRVGIDGMKIVETQNEEYPHTFQVSGKERTLELQASSAQDKEEWIKRRGFAMLPRLISNS

SEQ ID NO: 46844 - protein, 188 aa, Homo sapiens
MFSCFLCILSFSSLSNYSDLKKESAVNLNAPRTPGRHGLTTTPQQKLLSQHLPQRQGNDTDKTQGAQTCVANGVMAAQNQMECEEEKAATLSSDTSIQASEPLLDTHIVNGERDETATAPASPTTDSCDGNASDSSYRTPGIGPVLPLEERGAETETKVQERENGESPLELEQLDQHHEMKVEHETSS

SEQ ID NO: 46845 - protein, 766 aa, Homo sapiens
MEEIKPASASCVSKEKPSKVSDLISRFEGGSSLSNYSDLKKESAVNLNAPRTPGRHGLTTTPQQKLLSQHLPQRQGNDTDKTQGAQTCVANGVMAAQNQMECEEEKAATLSSDTSIQASEPLLDTHIVNGERDETATAPASPTTDSCDGNASDSSYRTPGIGPVLPLEERGAETETKVQERENGESPLELEQLDQHHEMKETNEQKLHKIANELLLTERAYVNRLDLLDQVFYCKLLEEANRGSFPAEMVNKIFSNISSINAFHSKFLLPELEKRMQEWETTPRIGDILQKLAPFLKMYGEYVKGFDNAMELVKNMTERIPQFKSVVEEIQKQKICGSLTLQHHMLEPVQRIPRYEMLLKDYLRKLPPDSLDWNDAKKSLEIISTAASHSNSAIRKMENLKKLLEIYEMLGEEEDIVNPSNELIKEGQILKLAARNTSAQERYLFLFNNMLLYCVPKFSLVGSKFTVRTRVGIDGMKIVETQNEEYPHTFQVSGKERTLELQASSAQDKEEWIKALQETIDAFHQRHETFRNAIAKDNDIHSEVSTAELGKRAPRWIRDNEVTMCMKCKEPFNALTRRRHHCRACGYVVCWKCSDYKAQLEYDGGKLSKVCKDCYQIISGFTDSEEKKRKGILEIESAEVSGNSVVCSFLQYMEKSKPWQKAWCVIPKQDPLVLYMYGAPQDVRAQATIPLLGYVVDEMPRSADLPHSFKLTQSKSVHSFAADSEELKQKWLKVILLAVTGETPGGPNEHPATLDDHPEPKKKSEC

SEQ ID NO: 46846 - protein, 207 aa, Homo sapiens
MEEIKPASASCVSKEKPSKVSDLISRFEGGSSLSNYSDLKKESAVNLNAPRTPGRHGLTTTPQQKLLSQHLPQRQGNDTDKTQGAQTCVANGVMAAQNQMECEEEKAATLSSDTSIQASEPLLDTHIVNGERDETATAPASPTTDSCDGNASDSSYRTPGIGPVLPLEERGAETETKVQERENGESPLELEQLDQHHEMKVEHETSS

SEQ ID NO: 46847 - protein, 878 aa, Homo sapiens
MNFKRVKPNIFLLNQSRLIISICEIMSTDQGSSTCPKIALVPPCSTSSTTTLVGENVSEEEAQGINGNRPAKHSAASPKPQVPPKPLHLQNSPSSNIHQTPRHKALPSAKPRMEEIKPASASCVSKEKPSKVSDLISRFEGGSSLSNYSDLKKESAVNLNAPRTPGRHGLTTTPQQKLLSQHLPQRQGNDTDKTQGAQTCVANGVMAAQNQMECEEEKAATLSSDTSIQASEPLLDTHIVNGERDETATAPASPTTDSCDGNASDSSYRTPGIGPVLPLEERGAETETKVQERENGESPLELEQLDQHHEMKETNEQKLHKIANELLLTERAYVNRLDLLDQVFYCKLLEEANRGSFPAEMVNKIFSNISSINAFHSKFLLPELEKRMQEWETTPRIGDILQKLAPFLKMYGEYVKGFDNAMELVKNMTERIPQFKSVVEEIQKQKICGSLTLQHHMLEPVQRIPRYEMLLKDYLRKLPPDSLDWNDAKKSLEIISTAASHSNSAIRKMENLKKLLEIYEMLGEEEDIVNPSNELIKEGQILKLAARNTSAQERYLFLFNNMLLYCVPKFSLVGSKFTVRTRVGIDGMKIVETQNEEYPHTFQVSGKERTLELQASSAQDKEEWIKALQETIDAFHQRHETFRNAIAKDNDIHSEVSTAELGKRAPRWIRDNEVTMCMKCKEPFNALTRRRHHCRACGYVVCWKCSDYKAQLEYDGGKLSKVCKDCYQIISGFTDSEEKKRKGILEIESAEVSGNSVVCSFLQYMEKSKPWQKAWCVIPKQDPLVLYMYGAPQDVRAQATIPLLGYVVDEMPRSADLPHSFKLTQSKSVHSFAADSEELKQKWLKVILLAVTGETPGGPNEHPATLDDHPEPKKKSEC

SEQ ID NO: 46848 - protein, 851 aa, Homo sapiens
MGGCSSTCPKIALVPPCSTSSTTTLVGENVSEEEAQGINGNRPAKHSAASPKPQVPPKPLHLQNSPSSNIHQTPRHKALPSAKPRMEEIKPASASCVSKEKPSKVSDLISRFEGGSSLSNYSDLKKESAVNLNAPRTPGRHGLTTTPQQKLLSQHLPQRQGNDTDKTQGAQTCVANGVMAAQNQMECEEEKAATLSSDTSIQASEPLLDTHIVNGERDETATAPASPTTDSCDGNASDSSYRTPGIGPVLPLEERGAETETKVQERENGESPLELEQLDQHHEMKETNEQKLHKIANELLLTERAYVNRLDLLDQVFYCKLLEEANRGSFPAEMVNKIFSNISSINAFHSKFLLPELEKRMQEWETTPRIGDILQKLAPFLKMYGEYVKGFDNAMELVKNMTERIPQFKSVVEEIQKQKICGSLTLQHHMLEPVQRIPRYEMLLKDYLRKLPPDSLDWNDAKKSLEIISTAASHSNSAIRKMENLKKLLEIYEMLGEEEDIVNPSNELIKEGQILKLAARNTSAQERYLFLFNNMLLYCVPKFSLVGSKFTVRTRVGIDGMKIVETQNEEYPHTFQVSGKERTLELQASSAQDKEEWIKALQETIDAFHQRHETFRNAIAKDNDIHSEVSTAELGKRAPRWIRDNEVTMCMKCKEPFNALTRRRHHCRACGYVVCWKCSDYKAQLEYDGGKLSKVCKDCYQIISGFTDSEEKKRKGILEIESAEVSGNSVVCSFLQYMEKSKPWQKAWCVIPKQDPLVLYMYGAPQDVRAQATIPLLGYVVDEMPRSADLPHSFKLTQSKSVHSFAADSEELKQKWLKVILLAVTGETPGGPNEHPATLDDHPEPKKKSEC

SEQ ID NO: 46849 - protein, 903 aa, Homo sapiens
MSDEGGSNFRRVAIRRKSNPSYLPPGVPRPWSRPASHLGRVGTAAFKGQVPSGATGSSTCPKIALVPPCSTSSTTTLVGENVSEEEAQGINGNRPAKHSAASPKPQVPPKPLHLQNSPSSNIHQTPRHKALPSAKPRMEEIKPASASCVSKEKPSKVSDLISRFEGGSSLSNYSDLKKESAVNLNAPRTPGRHGLTTTPQQKLLSQHLPQRQGNDTDKTQGAQTCVANGVMAAQNQMECEEEKAATLSSDTSIQASEPLLDTHIVNGERDETATAPASPTTDSCDGNASDSSYRTPGIGPVLPLEERGAETETKVQERENGESPLELEQLDQHHEMKETNEQKLHKIANELLLTERAYVNRLDLLDQVFYCKLLEEANRGSFPAEMVNKIFSNISSINAFHSKFLLPELEKRMQEWETTPRIGDILQKLAPFLKMYGEYVKGFDNAMELVKNMTERIPQFKSVVEEIQKQKICGSLTLQHHMLEPVQRIPRYEMLLKDYLRKLPPDSLDWNDAKKSLEIISTAASHSNSAIRKMENLKKLLEIYEMLGEEEDIVNPSNELIKEGQILKLAARNTSAQERYLFLFNNMLLYCVPKFSLVGSKFTVRTRVGIDGMKIVETQNEEYPHTFQVSGKERTLELQASSAQDKEEWIKALQETIDAFHQRHETFRNAIAKDNDIHSEVSTAELGKRAPRWIRDNEVTMCMKCKEPFNALTRRRHHCRACGYVVCWKCSDYKAQLEYDGGKLSKVCKDCYQIISGFTDSEEKKRKGILEIESAEVSGNSVVCSFLQYMEKSKPWQKAWCVIPKQDPLVLYMYGAPQDVRAQATIPLLGYVVDEMPRSADLPHSFKLTQSKSVHSFAADSEELKQKWLKVILLAVTGETPGGPNEHPATLDDHPEPKKKSEC

SEQ ID NO: 46850 - protein, 139 aa, Homo sapiens
MSWRGRSTYYWPRPRRYVQPPEMIGPMRPEQFSDEVEPATPEEGEPATQRQDPAAAQEGEDEGASAGQGPKPEADSQEQGHPQTGCECEDGPDGQEMDPPNPEEVKTPEEEMRSHYVAQTGILWLLMNNCFLNLSPRKP

SEQ ID NO: 46851 - protein, 116 aa, Homo sapiens [sequence omitted]

SEQ ID NO: 46852 - protein, 117 aa, Homo sapiens
MSWRGRSTYYWPRPRRYVQPPEMIGPMRPEQFSDEVEPATPEEGEPATQCQDPAAAQEGEDEGASAGQGPKPEAHSQEQGHPQTGCECEDGPDGQEMDPPNPEEVKTPEEGEKQSQC

SEQ ID NO: 46853 - protein, 117 aa, Homo sapiens; identical to SEQ ID NO: 46852

SEQ ID NO: 46854 - protein, 117 aa, Homo sapiens; identical to SEQ ID NO: 46852

SEQ ID NO: 46855 - protein, 117 aa, Homo sapiens
MSWRGRSTYYWPRPRRYVQPPEMIGPMRPEQFSDEVEPATPEEGEPATQRQDPAAAQEGEDEGASAGQGPKPEAHSQEQGHPQTGCECEDGPDGQEMDPPNPEEVKTPEEGEKQSQC

SEQ ID NO: 46856 - protein, 117 aa, Homo sapiens; identical to SEQ ID NO: 46855

SEQ ID NO: 46857 - protein, 117 aa, Homo sapiens
MSWRGRSTYYWPRPRRYVQPPEMIGPMRPEQFSDEVEPATPEEGEPATQCQDPAAAQKGEDEGASAGQGPKPEAHSQEQGHPQTGCECEDGPDGQEMDPPNPEEVKTPEEGEKQSQC

SEQ ID NO: 46858 - protein, 117 aa, Homo sapiens
MSWRGRSTYYWPRPRPYVQPPEMIGPMRPEQFSDEVEPATPEEGEPATQRQDPAAAQEGEDEGASAGQGPKPEADSQEQGHPQTGCECEDGPDGQEMDPPNPEEVKTPEEGKKQSQC

SEQ ID NO: 46859 - protein, 117 aa, Homo sapiens
MSWRGRSTYYRPRPRRYVEPPEMIGPMRPEQFSDEVEPATPEEGEPATQCQDPAAAQEGEDEGASAGQGPKPEADSQEQGHPQTGCECEDGPDGQEMDPPNPEEVKTPEEGKKQSQC

SEQ ID NO: 46860 - protein, 116 aa, Homo sapiens
MSWRGRSTYRPRPRRYVEPPEMIGPMRPEQFSDEVEPATPEEGEPATQRQDPAAAQEGQDEGASAGQGPKPEAHSQEQGHPQTGCECEDGPDGQEMDPPNPEEVKTPEEGEKQSQC

SEQ ID NO: 46861 - protein, 116 aa, Homo sapiens
MSWRGRSTYRPRPRRYVEPPEMIGPMRPEQFSDEVEPATPEEGEPATQRQDPAAAQEGEDEGASAGQGPKPEAHSQEQGHPQTGCECEDGPDGQEMDPPNPEEVKTPEEGEKQSQC

SEQ ID NO: 46862 - protein, 116 aa, Homo sapiens; identical to SEQ ID NO: 46861

SEQ ID NO: 46863 - protein, 116 aa, Homo sapiens
MSWRGRSTYRPRPRRYVEPPEMIGPMRPEQFSDEVEPATPEEGEPATQRQDPAAAQEGEDEGASAGQGPKPEADSQEQGHPQTGCECEDGPDGQEMDPPNPEEVKTPEEGEKQSQC

SEQ ID NO: 46864 - protein, 116 aa, Homo sapiens
MSWRGRSTYRPRPRRYVEPPEMIGPMRPEQFSDEVEPATPEEGEPATQRQDPAAAQEGEDEGASAGQGPKPEADSQEQGHPQTGCECEDGPDGQEMDPPNPEEVKTPEEGKKQSQC

SEQ ID NO: 46865 - protein, 144 aa, Homo sapiens
MFLEEKIPSISDLKLAIRRATLKRSFTPVFLGSALKNKGVQPLLDAVLEYLPNPSEVQNYAILNKEDDSKEKTKILMNSSRDNSHPFVGLAFKLEFLSRSFFRLTRQKDHRRPIQRTTLYLIVMSPYDLLGCNSFLDFPCFSRD

SEQ ID NO: 46866 - protein, 751 aa, Homo sapiens
MRLLGAAAVAALGRGRAPASLGWQRKQVNWKACRWSSSGVIPNEKIRNIGISAHIDSGKTTLTERVLYYTGRIAKMHEVKGKDGVGAVMDSMELERQRGITIQSAATYTMWKDVNINIIDTPGHVDFTIEVERALRVLDGAVLVLCAVGGVQCQTMTVNRQMKRYNVPFLTFINKLDRMGSNPARALQQMRSKLNHNAAFMQIPMGLEGNFKGIVDLIEERAIYFDGDFGQIVRYGEIPAELRAAATDHRQELIECVANSDEQLGEMFLEEKIPSISDLKLAIRRATLKRSFTPVFLGSALKNKGVQPLLDAVLEYLPNPSEVQNYAILNKEDDSKEKTKILMNSSRDNSHPFVGLAFKLEVGRFGQLTYVRSYQGELKKGDTIYNTRTRKKVRLQRLARMHADMMEDVEEVYAGDICALFGIDCASGDTFTDKANSGLSMESIHVPDPVISIAMKPSNKNDLEKFSKGIGRFTREDPTFKVYFDTENKETVISGMGELHLEIYAQRLEREYGCPCITGKPKVAFRETITAPVPFDFTHKKQSGGAGQYGKVIGVLEPLDPEDYTKLEFSDETFGSNIPKQFVPAVEKGFLDACEKGPLSGHKLSGLRFVLQDGAHHMVDSNEISFIRAGEGALKQALANATLCILEPIMAVEVVAPNEFQGQVIAGINRRHGVITGQDGVEDYFTLYADVPLNDMFGYSTELRSCTEGKGEYTMEYSRYQPCLPSTQEDVINKYLEATGQLPVKKGKAKN

SEQ ID NO: 46867 - protein, 356 aa, Homo sapiens
MSRPLLITFTPATDPSDLWKDGQQQPQPEKPESTLDGAAALAFYEALIGDESSAPDSQRSQTEPARERKRKKRRIMKAPAAEAVAEGASGRHGQGRSLEAEDKMTHRILRAAQEGDLPELRRLLEPHEAGGAGGNINARDAFWWTPLMCAARAGQGAAVSYLLGRGAAWVGVCELSGRDAAQLAEEAGFPEVARMVRESHGETRSPENRSPTPSLQYCENCDTHFQDSNHRTSTAHLLSLSQGPQPPNLPLGVPISSPGFKLLLRGGWEPGMGLGPRGEGRANPIPTVLKRDQEGLGYRSAPQPRVTHFPAWDTRAVAGRERPPRVATLSWREERRREEKDRAWERDLRTYMNLEF

SEQ ID NO: 46868 - protein, 356 aa, Homo sapiens
MSRPLLITFTPATDPSDLWKDGQQQPQPEKPESTLDGAAARAFYEALIGDESSAPDSQRSQTEPARERKRKKRRIMKAPAAEAVAEGASGRHGQGRSLEAEDKMTHRILRAAQEGDLPELRRLLEPHEAGGAGGNINARDAFWWTPLMCAARAGQGAAVSYLLGRGAAWVGVCELSGRDAAQLAEEAGFPEVARMVRESHGETRSPENRSPTPSLQYCENCDTHFQDSNHRTSTAHLLSLSQGPQPPNLPLGVPISSPGFKLLLRGGWEPGMGLGPRGEGRANPIPTVLKRDQEGLGYRSAPQPRVTHFPAWDTRAVAGRERPPRVATLSWREERRREEKDRAWERDLRTYMNLEF

SEQ ID NO: 46869 - protein, 356 aa, Homo sapiens; identical to SEQ ID NO: 46868

SEQ ID NO: 46870 - protein, 356 aa, Homo sapiens; identical to SEQ ID NO: 46868

SEQ ID NO: 46871 - protein, 356 aa, Homo sapiens; identical to SEQ ID NO: 46868

SEQ ID NO: 46872 - protein, 356 aa, Homo sapiens; identical to SEQ ID NO: 46868

SEQ ID NO: 46873 - protein, 356 aa, Homo sapiens; identical to SEQ ID NO: 46867

SEQ ID NO: 46874 - protein, 356 aa, Homo sapiens; identical to SEQ ID NO: 46867

SEQ ID NO: 46875 - protein, 356 aa, Homo sapiens; identical to SEQ ID NO: 46867

SEQ ID NO: 46876 - protein, 356 aa, Homo sapiens; identical to SEQ ID NO: 46867

SEQ ID NO: 46877 - protein, 356 aa, Homo sapiens; identical to SEQ ID NO: 46867

SEQ ID NO: 46878 - protein, 165 aa, Homo sapiens
MSRPLLITFTPATDPSDLWKDGQQQPQPEKPESTLDGAAARAFYEALIGDESSAPDSQRSQTEPARERKRKKRRIMKAPAAEAVAEGASGRHGQGRSLEAEDKMTHRILRAAQEGDLPELRRLLEPHEAGGAGGNINARDAFWWTPLMCAARAGQGAAVSYLLGR

SEQ ID NO: 46879 - protein, 152 aa, Homo sapiens
MSRPLLITFTPATDPSDLWKDGQQQPQPEKPESTLDGAAALAFYEALIGDESSAPDSQRSQTEPARERKRKKRRIMKAPAAEAVAEGASGRHGQGRSLEAEDKMTHRILRAAQEGDLPELRRLLEPHEAGGAGGNINARDAFWWTPLMCAAR

SEQ ID NO: 46880 - protein, 356 aa, Homo sapiens; identical to SEQ ID NO: 46867

SEQ ID NO: 46881 - protein, 152 aa, Homo sapiens
MSRPLLITFTPATDPSDLWKDGQQQPQPEKPESTLDGAAARAFYEALIGDESSAPDSQRSQTEPARERKRKKRRIMKAPAAEAVAEGASGRHGQGRSLEAEDKMTHRILRAAQEGDLPELRRLLEPHEAGGAGGNINARDAFWWTPLMCAAR

SEQ ID NO: 46882 - protein, 165 aa, Homo sapiens
MSRPLLITFTPATDPSDLWKDGQQQPQPEKPESTLDGAAALAFYEALIGDESSAPDSQRSQTEPARERKRKKRRIMKAPAAEAVAEGASGRHGQGRSLEAEDKMTHRILRAAQEGDLPELRRLLEPHEAGGAGGNINARDAFWWTPLMCAARAGQGAAVSYLLGR

SEQ ID NO: 46883 - protein, 90 aa, Homo sapiens
MSRPLLITFTPATDPSDLWKDGQQQPQPEKPESTLDGAAALAFYEALIGDESSAPDSQRSQTEPARERKRKKRRIMKAPAAEAVAEGASG

SEQ ID NO: 46884 - protein, 356 aa, Homo sapiens; identical to SEQ ID NO: 46868

SEQ ID NO: 46885 - protein, 356 aa, Homo sapiens; identical to SEQ ID NO: 46868

SEQ ID NO: 46886 - protein, 107 aa, Homo sapiens
MSRPLLITFTPATDPSDLWKDGQQQPQPEKPESTLDGAAARAFYEALIGDESSAPDSQRSQTEPARERKRKKRRIMKAPAAEAVAEGASGRHGQGRSLEAEDKMTHR

SEQ ID NO: 46887 - protein, 107 aa, Homo sapiens
MSRPLLITFTPATDPSDLWKDGQQQPQPEKPESTLDGAAALAFYEALIGDESSAPDSQRSQTEPARERKRKKRRIMKAPAAEAVAEGASGRHGQGRSLEAEDKMTHR

SEQ ID NO: 46888 - protein, 356 aa, Homo sapiens; identical to SEQ ID NO: 46868

SEQ ID NO: 46889 - protein, 356 aa, Homo sapiens
MSRPLLITFTPATDPSDLWKDGQQQPQPEKPESTLDGAAARAFYEALIGDESSAPDSQRSQTEPARERKRKKRRIMKAPAAEAVAEGASGRHGQGRSLEAEDKMTHRILRAAQEGDLPELRRLLEPHEAGGAGGNINARDAFWWTPLMCAARAGQGAAVSYLLGRGAAWVGVCELSGRDAAQLAEEAGFPEVARMVRESHGETRSPENRSPTPSLQYCENCDTHFQDSNHRTSTAHLLSLSQGPQPPNLPLGVPISSPGFKLLLRRGWEPGMGLGPRGEGRANPIPTVLKRDQEGLGYRSAPQPRVTHFPAWDTRAVAGRERPPRVATLSWREERRREEKDRAWERDLRTYMNLEF

SEQ ID NO: 46890 - protein, 356 aa, Homo sapiens; identical to SEQ ID NO: 46889

SEQ ID NO: 46891 - protein, 165 aa, Homo sapiens; identical to SEQ ID NO: 46878

SEQ ID NO: 46892 - protein, 356 aa, Homo sapiens; identical to SEQ ID NO: 46868

SEQ ID NO: 46893 - protein, 198 aa, Homo sapiens
MSRPLLITFTPATDPSDLWKDGQQQPQPEKPESTLDGAAARAFYEALIGDESSAPDSQRSQTEPARERKRKKRRIMKAPAAEAVAEGASGRHGQGRSLEAEDKMTHRILRAAQEGDLPELRRLLEPHEAGGAGGNINARDAFWWTPLMCAARAGQGAAVSYLLGRGAAWVGVCELSGRDAAQLAEEAGFPEVARMVRE

SEQ ID NO: 46894 - protein, 356 aa, Homo sapiens; identical to SEQ ID NO: 46889

SEQ ID NO: 46895 - protein, 165 aa, Homo sapiens; identical to SEQ ID NO: 46882

SEQ ID NO: 46896 - protein, 152 aa, Homo sapiens; identical to SEQ ID NO: 46879

SEQ ID NO: 46897 - protein, 152 aa, Homo sapiens; identical to SEQ ID NO: 46879

SEQ ID NO: 46898 - protein, 198 aa, Homo sapiens
MSRPLLITFTPATDPSDLWKDGQQQPQPEKPESTLDGAAALAFYEALIGDESSAPDSQRSQTEPARERKRKKRRIMKAPAAEAVAEGASGRHGQGRSLEAEDKMTHRILRAAQEGDLPELRRLLEPHEAGGAGGNINARDAFWWTPLMCAARAGQGAAVSYLLGRGAAWVGVCELSGRDAAQLAEEAGFPEVARMVRE

SEQ ID NO: 46899 - protein, 198 aa, Homo sapiens; identical to SEQ ID NO: 46898

SEQ ID NO: 46900 - protein, 356 aa, Homo sapiens; identical to SEQ ID NO: 46889

SEQ ID NO: 46901 - protein, 356 aa, Homo sapiens; identical to SEQ ID NO: 46867

SEQ ID NO: 46902 - protein, 198 aa, Homo sapiens; identical to SEQ ID NO: 46898

SEQ ID NO: 46903 - protein, 356 aa, Homo sapiens; identical to SEQ ID NO: 46867

SEQ ID NO: 46904 - protein, 198 aa, Homo sapiens; identical to SEQ ID NO: 46893

SEQ ID NO: 46905 - protein, 356 aa, Homo sapiens; identical to SEQ ID NO: 46868

SEQ ID NO: 46906 - protein, 107 aa, Homo sapiens; identical to SEQ ID NO: 46886

SEQ ID NO: 46907 - protein, 356 aa, Homo sapiens; identical to SEQ ID NO: 46889

SEQ ID NO: 46908 - protein, 107 aa, Homo sapiens; identical to SEQ ID NO: 46886

SEQ ID NO: 46909 - protein, 152 aa, Homo sapiens; identical to SEQ ID NO: 46881

SEQ ID NO: 46910 - protein, 356 aa, Homo sapiens; identical to SEQ ID NO: 46867

SEQ ID NO: 46911 - protein, 356 aa, Homo sapiens; identical to SEQ ID NO: 46867

SEQ ID NO: 46912 - protein, 165 aa, Homo sapiens; identical to SEQ ID NO: 46878

SEQ ID NO: 46913 - protein, 90 aa, Homo sapiens; identical to SEQ ID NO: 46883

SEQ ID NO: 46914 - protein, 356 aa, Homo sapiens; identical to SEQ ID NO: 46868

SEQ ID NO: 46915 - protein, 90 aa, Homo sapiens; identical to SEQ ID NO: 46883

SEQ ID NO: 46916 - protein, 356 aa, Homo sapiens; identical to SEQ ID NO: 46868

SEQ ID NO: 46917 - protein, 198 aa, Homo sapiens; identical to SEQ ID NO: 46893

SEQ ID NO: 46918 - protein, 107 aa, Homo sapiens; identical to SEQ ID NO: 46887

SEQ ID NO: 46919 - protein, 107 aa, Homo sapiens; identical to SEQ ID NO: 46887

SEQ ID NO: 46920 - protein, 90 aa, Homo sapiens
MSRPLLITFTPATDPSDLWKDGQQQPQPEKPESTLDGAAARAFYEALIGDESSAPDSQRSQTEPARERKRKKRRIMKAPAAEAVAEGASG

SEQ ID NO: 46921 - protein, 90 aa, Homo sapiens; identical to SEQ ID NO: 46920

SEQ ID NO: 46922 - protein, 152 aa, Homo sapiens; identical to SEQ ID NO: 46881

SEQ ID NO: 46923 - protein, 198 aa, Homo sapiens; identical to SEQ ID NO: 46893

SEQ ID NO: 46924 - protein, 356 aa, Homo sapiens; identical to SEQ ID NO: 46867

SEQ ID NO: 46925 - protein, 356 aa, Homo sapiens; identical to SEQ ID NO: 46868

SEQ ID NO: 46926 - protein, 356 aa, Homo sapiens; identical to SEQ ID NO: 46868

SEQ ID NO: 46927 - protein, 165 aa, Homo sapiens; identical to SEQ ID NO: 46882

SEQ ID NO: 46928 - protein, 90 aa, Homo sapiens; identical to SEQ ID NO: 46920

SEQ ID NO: 46929 - protein, 107 aa, Homo sapiens; identical to SEQ ID NO: 46886

SEQ ID NO: 46930 - protein, 356 aa, Homo sapiens; identical to SEQ ID NO: 46868

SEQ ID NO: 46931 - protein, 356 aa, Homo sapiens; identical to SEQ ID NO: 46867

SEQ ID NO: 46932 - protein, 356 aa, Homo sapiens; identical to SEQ ID NO: 46867

SEQ ID NO: 46933 - protein, 90 aa, Homo sapiens; identical to SEQ ID NO: 46920

SEQ ID NO: 46934 - protein, 356 aa, Homo sapiens; identical to SEQ ID NO: 46867

SEQ ID NO: 46935 - protein, 165 aa, Homo sapiens; identical to SEQ ID NO: 46878

SEQ ID NO: 46936 - protein, 152 aa, Homo sapiens; identical to SEQ ID NO: 46881

SEQ ID NO: 46937 - protein, 1502 aa, Homo sapiens
MADRFSRFNEDRDFQGNHFDQYEEGHLEIEQASLDKPIESDNIGHRLLQKHGWKLGQGLGKSLQGRTDPIPIVVKYDVMGMGRMEMELDYAEDATERRRVLEVEKEDTEELRQKYKDYVDKEKAIAKALEDLRANFYCELCDKQYQKHQEFDNHINSYDHAHKQRLKDLKQREFARNVSSRSRKDEKKQEKALRRLHELAEQRKQAECAPGSGPMFKPTTVAVDEEGGEDDKDESATNSGTGATASCGLGSEFSTDKGGPFTAVQITNTTGLAQAPGLASQGISFGIKNNLGTPLQKLGVSFSFAKKAPVKLESIASVFKDHAEEGTSEDGTKPDEKSSDQGLQKVGDSDGSSNLDGKKEDEDPQDGGSLASTLSKLKRMKREEGAGATEPEYYHYIPPAHCKVKPNFPFLLFMRASEQMDGDNTTHPKNAPESKKGSSPKPKSCIKAAASQGAEKTVSEVSEQPKETSMTEPSEPGSKAEAKKALGGDVSDQSLESHSQKVSETQMCESNSSKETSLATPAGKESQEGPKHPTGPFFPVLSKDESTALQWPSELLIFTKAEPSISYSCNPLYFDFKLSRNKDARTKGTEKPKDIGSSSKDHLQGLDPGEPNKSKEVGGEKIVRSSGGRMDAPASGSACSGLNKQEPGGSHGSETEDTGRSLPSKKERSGKSHRHKKKKKHKKSSKHKRKHKADTEEKSSKAESGEKSKKRKKRKRKKNKSSAPADSERGPKPEPPGSGSPAPPRRRRRAQDDSQRRSLPAEEGSSGKKDEGGGGSSSQDHGGRKHKGELPPSSCQRRAGTKRSSRSSHRSQPSSGDEDSDDASSHRLHQKSPSQYSEEEEEEDSGSEHSRSRSRSGRRHSSHRSSRRSYSSSSDASSDQSCYSRQRSYSDDSYSDYSDRSRRHSKRSHDSDDSDYASSKHRSKRHKYSSSDDDYSLSCSQSRSRSRSHTRERSRSRGRSRSSSCSRSRSKRRSRSTTAHSWQRSRSYSRDRSRSTRSPSQRSGSRKRSWGHESPEERHSGRRDFIRSKIYRSQSPHYFRSGRGEGPGKKDDGRGDDSKATGPPSQNSNIGTGRGSEGDCSPEDKNSVTAKLLLEKIQSRKVERKPSVSEEVQATPNKAGPKLKDPPQGYFGPKLPPSLGNKPVLPLIGKLPATRKPNKKCEESGLERGEEQEQSETEEGPPGSSDALFGHQFPSEETTGPLLDPPPEESKSGEATADHPVAPLGTPAHSDCYPGDPTISHNYLPDPSDGDTLESLDSSSQPGPVESSLLPIAPDLEHFPSYAPPSGDPSIESTDGAEDASLAPLESQPITFTPEEMEKYSKLQQAAQQHIQQQLLAKQVKAFPASAALAPATPALQPIHIQQPATASATSITTVQHAILQHHAAAAAAAIGIHPHPHPQPLAQVHHIPQPHLTPISLSHLTHSIIPGHPATFLASHPIHIIPASAIHPGPFTFHPVPHAALYPTLLAPRPAAAAATALHLHPLLHPIFSGQDLQHPPSHGT

SEQ ID NO: 46938 - protein, 1424 aa, Homo sapiens
MGMGRMEMELDYAEDATERRRVLEVEKEDTEELRQKYKDYVDKEKAIAKALEDLRANFYCELCDKQYQKHQEFDNHINSYDHAHKQRLKDLKQREFARNVSSRSRKDEKKQEKALRRLHELAEQRKQAECAPGSGPMFKPTTVAVDEEGGEDDKDESATNSGTGATASCGLGSEFSTDKGGPFTAVQITNTTGLAQAPGLASQGISFGIKNNLGTPLQKLGVSFSFAKKAPVKLESIASVFKDHAEEGTSEDGTKPDEKSSDQGLQKVGDSDGSSNLDGKKEDEDPQDGGSLASTLSKLKRMKREEGAGATEPEYYHYIPPAHCKVKPNFPFLLFMRASEQMDGDNTTHPKNAPESKKGSSPKPKSCIKAAASQGAEKTVSEVSEQPKETSMTEPSEPGSKAEAKKALGGDVSDQSLESHSQKVSETQMCESNSSKETSLATPAGKESQEGPKHPTGPFFPVLSKDESTALQWPSELLIFTKAEPSISYSCNPLYFDFKLSRNKDARTKGTEKPKDIGSSSKDHLQGLDPGEPNKSKEVGGEKIVRSSGGRMDAPASGSACSGLNKQEPGGSHGSETEDTGRSLPSKKERSGKSHRHKKKKKHKKSSKHKRKHKADTEEKSSKAESGEKSKKRKKRKRKKNKSSAPADSERGPKPEPPGSGSPAPPRRRRRAQDDSQRRSLPAEEGSSGKKDEGGGGSSSQDHGGRKHKGELPPSSCQRRAGTKRSSRSSHRSQPSSGDEDSDDASSHRLHQKSPSQYSEEEEEEDSGSEHSRSRSRSGRRHSSHRSSRRSYSSSSDASSDQSCYSRQRSYSDDSYSDYSDRSRRHSKRSHDSDDSDYASSKHRSKRHKYSSSDDDYSLSCSQSRSRSRSHTRERSRSRGRSRSSSCSRSRSKRRSRSTTAHSWQRSRSYSRDRSRSTRSPSQRSGSRKRSWGHESPEERHSGRRDFIRSKIYRSQSPHYFRSGRGEGPGKKDDGRGDDSKATGPPSQNSNIGTGRGSEGDCSPEDKNSVTAKLLLEKIQSRKVERKPSVSEEVQATPNKAGPKLKDPPQGYFGPKLPPSLGNKPVLPLIGKLPATRKPNKKCEESGLERGEEQEQSETEEGPPGSSDALFGHQFPSEETTGPLLDPPPEESKSGEATADHPVAPLGTPAHSDCYPGDPTISHNYLPDPSDGDTLESLDSSSQPGPVESSLLPIAPDLEHFPSYAPPSGDPSIESTDGAEDASLAPLESQPITFTPEEMEKYSKLQQAAQQHIQQQLLAKQVKAFPASAALAPATPALQPIHIQQPATASATSITTVQHAILQHHAAAAAAAIGIHPHPHPQPLAQVHHIPQPHLTPISLSHLTHSIIPGHPATFLASHPIHIIPASAIHPGPFTFHPVPHAALYPTLLAPRPAAAAATALHLHPLLHPIFSGQDLQHPPSHGT

SEQ ID NO: 46939 - protein, 43 aa, Homo sapiens
MADRFSRFNEDRDFQGNHFDQYEEGHLEIEQASLDKPIESSCF

SEQ ID NO: 46940 - protein, 1502 aa, Homo sapiens; identical to SEQ ID NO: 46937

SEQ ID NO: 46941 - protein, 491 aa, Homo sapiens
MPLPVQVFNLQGAVEPMQIDVDPQEDPQNAPDVNYVVENPSLDLEQYAASYSGLMRIERLQFIADHCPTLRVEALKMALSFVQRTFNVDMYEEIHRKLSEATRSSLRELQNAPDAIPESGVEPPALDTAWVEATRKKALLKLEKLDTDLKNYKGNSIKESIRRGHDDLGDHYLDCGDLSNALKCYSRARDYCTSAKHVINMCLNVIKVSVYLQNWSHVLSYVSKAESTPEIAEQRGERDSQTQAILTKLKCAAGLAELAARKYKQAAKCLLLASFDHCDFPELLSPSNVAIYGGLCALATFDRQELQRNVISSSSFKLFLELEPQVRDIIFKFYESKYASCLKMLDEMKDNLLLDMYLAPHVRTLYTQIRNRALIQYFSPYVSADMHRMAAAFNTTVAALEDELTQLILEGLISARVDSHSKILYARDVDQRSTTFEKSLLMGKEFQRRAKAMMLRAAVLRNQIHVKSPPREGSQGELTPANSQSRMSTNM

SEQ ID NO: 46942 - protein, 550 aa, Homo sapiens
MPLPVQVFNLQQPASSVSGSGGAESQDRMRDSSAPSSASSSVTDLYCTPHSSRSDLVLPGTAGDFSLSASLSACTLLYEGAVEPMQIDVDPQEDPQNAPDAIPESGVEPPALDTAWVEATRKKALLKLEKLDTDLKNYKGNSIKESIRRGHDDLGDHYLDCGDLSNALKCYSRARDYCTSAKHVINMCLNVIKVSVYLQNWSHVLSYVSKAESTPEIAEQRGERDSQTQAILTKLKCAAGLAELAARKYKQAAKCLLLASFDHCDFPELLSPSNVAIYGGLCALATFDRQELQRNVISSSSFKLFLELEPQVRDIIFKFYESKYASCLKMLDEMKDNLLLDMYLAPHVRTLYTQIRNRALIQYFSPYVSADMHRMAAAFNTTVAALEDELTQLILEGLISARVDSHSKILYARDVDQRSTTFEKSLLMGKEFQRRAKAMMLRAAVLRNQIHVKPLPTSTDLGPPGGSVLPAAQLRGLATGCHPACVPSLGLRRQAAASCGPSWKERPAGLDPVGFCPQGADCAAPRPSGTISQTPPVPASVRCRQVGGVH

SEQ ID NO: 46943 - protein, 527 aa, Homo sapiens
MRDSSAPSSASSSVTDLYCTPHSSRSDLVLPGTAGDFSLSASLSACTLLYEGAVEPMQIDVDPQEDPQNAPDVNYVVENPSLDLEQYAASYSGLMRIERLQFIADHCPTLRVEALKMALSFVQRTFNVDMYEEIHRKLSEATRELQNAPDAIPESGVEPPALDTAWVEATRKKALLKLEKLDTDLKNYKGNSIKESIRRGHDDLGDHYLDCGDLSNALKCYSRARDYCTSAKHVINMCLNVIKVSVYLQNWSHVLSYVSKAESTPEIAEQRGERDSQTQAILTKLKCAAGLAELAARKYKQAAKCLLLASFDHCDFPELLSPSNVAIYGGLCALATFDRQELQRNVISSSSFKLFLELEPQVRDIIFKFYESKYASCLKMLDEMKDNLLLDMYLAPHVRTLYTQIRNRALIQYFSPYVSADMHRMAAAFNTTVAALEDELTQLILEGLISARVDSHSKILYARDVDQRSTTFEKSLLMGKEFQRRAKAMMLRAAVLRNQIHVKSPPREGSQGELTPANSQSRMSTNM

SEQ ID NO: 46944 - protein, 284 aa, Homo sapiens
GQPEIGGFLPSSLAPVTAAILMARSSLRELQNAPDAIPESGVEPPALDTAWVEATRKKALLKLEKLDTDLKNYKGNSIKESIRRGHDDLGDHYLDCGDLSNALKCYSRARDYCTSAKHVINMCLNVIKVSVYLQNWSHVLSYVSKAESTPEIAEVRATSSETLPPGFLTTAGPSCPPPPHSPPDLNLPSSPLSLGAGHRALGNVEHGPHACGFLLQQRGERDSQTQAILTKLKCAAGEGLGHAQLTPRSPVAKSSQPRAVGWSLPQPGKTSLAGRRMLWAHVQV

SEQ ID NO: 46945 - protein, 527 aa, Homo sapiens; identical to SEQ ID NO: 46943

SEQ ID NO: 46946 - protein, 330 aa, Homo sapiens
MTPNSTGEVPSPIPKGALGLSLALASLIITANLLLALGIAWDRRLRSPPAGCFFLSLLLAGLLTGLALPTLPGLWNQSRRGYWSCLLVYLAPNFSFLSLLANLLLVHGERYMAVLRPLQPPGSIRLALLLTWAGPLLFASLPALGWNHWTPGANCSSQAIFPAPYLYLEVYGLLLPAVGAAAFLSVRVLATAHRQLQDICRLERAVCRDEPSALARALTWRQARAQAGAMLLFGLCWGPYVATLLLSVLAYEQRPPLGPGTLLSLLSLGSASAAAVPVAMGLGDQRYTAPWRAAAQRCLQGLWGRASRDSPGPSIAYHPSSQSSVDLDLN

SEQ ID NO: 46947 - protein, 330 aa, Homo sapiens; identical to SEQ ID NO: 46946

SEQ ID NO: 46948 - protein, 330 aa, Homo sapiens; identical to SEQ ID NO: 46946

SEQ ID NO: 46949 - protein, 330 aa, Homo sapiens; identical to SEQ ID NO: 46946

SEQ ID NO: 46950 - protein, 375 aa, Homo sapiens
MDVTSQARGVGLEMYPGTAQPAAPNTTSPELNLSHPLLGTALANGTGELSEHQQYVIGLFLSCLYTIFLFPIGFVGNILILVVNISFREKMTIPDLYFINLAVADLILVADSLIEVFNLHERYYDIAVLCTFMSLFLQVNMYSSVFFLTWMSFDRYIALARAMRCSLFRTKHHARLSCGLIWMASVSATLVPFTAVHLQHTDEACFCFADVREVQWLEVTLGFIVPFAIIGLCYSLIVRVLVRAHRHRGLRPRRQKALRMILAVVLVFFVCWLPENVFISVHLLQRTQPGAAPCKQSFRHAHPLTGHIVNLAAFSNSCLNPLIYSFLGETFRDKLRLYIEQKTNLPALNRFCHAALKAVIPDSTEQSDVRFSSAV

SEQ ID NO: 46951 - protein, 176 aa, Homo sapiens
MSLNCGQMWLLAPRGLARVTLAWSPWGCLGNLTTGHLALLTQNCYNPKALAPQGPKASGDQPVTQLLPANPACRCTCLPLQETFLSVLHLPGWQQWRCAASPGPRGAAALGPEQQEGPSVERPPSAPGWFSHCLLTSTWQLHSCGLGPCELPCGLVGCQDNEILQHLWLTNLFLQK

SEQ ID NO: 46952 - protein, 375 aa, Homo sapiens; identical to SEQ ID NO: 46950

SEQ ID NO: 46953 - protein, 375 aa, Homo sapiens; identical to SEQ ID NO: 46950

SEQ ID NO: 46954 - protein, 375 aa, Homo sapiens; identical to SEQ ID NO: 46950

SEQ ID NO: 46955 - protein, 73 aa, Homo sapiens
MDVTSQARGVGLEMYPGTAQPAAPNTTSPELNLSHPLLGTALANGTGELSEHQQYVIGLFLSCLYTIFLFPIG

SEQ ID NO: 46956 - protein, 408 aa, Homo sapiens
MDVTSQARGVGLEMYPGTAQPAAPNTTSPELNLSHPLLGTALANGTGELSEHQQYVIGLFLSCLYTIFLFPIGFVGNILILVVNISFREKMTIPDLYFINLAVADLILVADSLIEVFNLHERYYDIAVLCTFMSLFLQVNMYSSVFFLTWMSFDRYIALARAMRCSLFRTKHHARLSCGLIWMASVSATLVPFTAVHLQHTDEACFCFADVREVQWLEVTLGFIVPFAIIGLCYSLIVRVLVRAHRHRGLRPRRQKALRMILAVVLVFFVCWLPENVFISVHLLQRTQPGAAPCKQSFRHAHPLTHGHVMSLNCGQMWLLAPRGLARVTLAWSPWGCLGNLTTGHLALLTQNCYNPKALAPQGPKASGDQPVTQLLPANPACRCTCLPLQETFLTPSTRKATRRGHCG

SEQ ID NO: 46957 - protein, 355 aa, Homo sapiens
MEDLEETLFEEFENYSYDLDYYSLESDLEEKVQLGVVHWVSLVLYCLAFVLGIPGNAIVIWFTGFKWKKTVTTLWFLNLAIADFIFLLFLPLYISYVAMNFHWPFGIWLCKANSFTAQLNMFASVFFLTVISLDHYIHLIHPVLSHRHRTLKNSLIVIIFIWLLASLIGGPALYFRDTVEFNNHTLCYNNFQKHDPDLTLIRHHVLTWVKFIIGYLFPLLTMSICYLCLIFKVKKRSILISSRHFWTILVVVVAFVVCWTPYHLFSIWELTIHHNSYSHHVMQAGIPLSTGLAFLNSCLNPILYVLISKKFQARFRSSVAEILKYTLWEVSCSGTVSEQLRNSETKNLCLLETAQ

SEQ ID NO: 46958 - protein, 74 aa, Homo sapiens
MEDLEETLFEEFENYSYDLDYYSLESDLEEKVQLGVVHWVSLVLYCLAFVLGIPGNAIVIWFTGFKWKKTVTTL

SEQ ID NO: 46959 - protein, 355 aa, Homo sapiens; identical to SEQ ID NO: 46957

SEQ ID NO: 46960 - protein, 82 aa, Homo sapiens
MEDLEETLFEEFENYSYDLDYYSLESDLEEKVQLGVVHWVSLVLYCLAFVLGIPGNAIVIWFTGFKWKKTVTTLWFLNLAIA

SEQ ID NO: 46961 - protein, 227 aa, Homo sapiens
MEDLEETLFEEFENYSYDLDYYSLESDLEEKVQLGVVHWVSLVLYCLAFVLGIPGNAIVIWFTGFKWKKTVTTLWFLNLAIADFIFLLFLPLYISYVAMNFHWPFGIWLCKANSFTAQLNMFASVFFLTVISLDHYIHLIHPVLSHRHRTLKNSLIVIIFIWLLASLIGGPALYFRDTVEFNNHTLCYNNFQKHDPDLTLIRHHVLTWVKFIIGYLFPLLTMSICYL

SEQ ID NO: 46962 - protein, 137 aa, Homo sapiens
MEDLEETLFEEFENYSYDLDYYSLESDLEEKVQLGVVHWVSLVLYCLAFVLGIPGNAIVIWFTGFKWKKTVTTLWFLNLAIADFIFLLFLPLYISYVAMNFHWPFGIWLCKANSFTAQLNMFASVFFLTVISLDHYI

SEQ ID NO: 46963 - protein, 178 aa, Homo sapiens
MEDLEETLFEEFENYSYDLDYYSLESDLEEKVQLGVVHWVSLVLYCLAFVLGIPGNAIVIWFTGFKWKKTVTTLWFLNLAIADFIFLLFLPLYISYVAMNFHWPFGIWLCKANSFTAQLNMFASVFFLTVISLDHYIHLIHPVLSHRHRTLKNSLIVIIFIWLLASLIGGPALYFRDT

SEQ ID NO: 46964 - protein, 19 aa, Homo sapiens
MEDLEETLFEEFENYSYDL

SEQ ID NO: 46965 - protein, 508 aa, Homo sapiens
MTSTCTNSTRESNSSHTCMPLSKMPISLAHGIIRSTVLVIFLAASFVGNIVLALVLQRKPQLLQVTNRFIFNLLVTDLLQISLVAPWVVATSVPLFWPLNSHFCTALVSLTHLFAFASVNTIVVVSVDRYLSIIHPLSYPSKMTQRRGYLLLYGTWIVAILQSTPPLYGWGQAAFDERNALCSMIWGASPSYTILSVVSFIVIPLIVMIACYSVVFCAARRQHALLYNVKRHSLEVRVKDCVENEDEEGAEKKEEFQDESEFRRQHEGEVKAKEGRMEAKDGSLKAKEGSTGTSESSVEARGSEEVRESSTVASDGSMEGKEGSTKVEENSMKADKGRTEVNQCSIDLGEDDMEFGEDDINFSEDDVEAVNIPESLPPSRRNSNSNPPLPRCYQCKAAKVIFIIIFSYVLSLGPYCFLAVLAVWVDVETQVPQWVITIIIWLFFLQCCIHPYVYGYMHKTIKKEIQDMLKKFFCKEKPPKEDSHPDLPGTEGGTEGKIVPSYDSATFP

SEQ ID NO: 46966 - protein, 695 aa, Homo sapiens
MKMKSQATMICCLVFFLSTECSHYRSKIHLKAGDKLQSPEGKPKTGRIQEKCEGPCISSSNCSQPCAKDFHGEIGFTCNQKKWQKSAETCTSLSVEKLFKDSTGASRLSVAAPSIPLHILDFRAPETIESVAQGIRKNCPFDYACITDMVKSSETTSGNIAFIVELLKNISTDLSDNVTREKMKSYSEVANHILDTAAISNWAFIPNKNASSDLLQSVNLFARQLHIHNNSENIVNELFIQTKGFHINHNTSEKSLNFSMSMNNTTEDILGMVQIPRQELRKLWPNASQAISIAFPTLGAILREAHLQNVSLPRQVNGLVLSVVLPERLQEIILTFEKINKTRNARAQCVGWHSKKRRWDEKACQMMLDIRNEVKCRCNYTSVVMSFSILMSSKSMTDKVLDYITCIGLSVSILSLVLCLIIEATVWSRVVVTEISYMRHVCIVNIAVSLLTANVWFIIGSHFNIKAQDYNMCVAVTFFSHFFYLSLFFWMLFKALLIIYGILVIFRRMMKSRMMVIGFAIGYGCPLIIAVTTVAITEPEKGYMRPEACWLNWDNTKALLAFAIPAFVIVAVNLIVVLVVAVNTQRPSIGSSKSQDVVIIMRISKNVAILTPLLGLTWGFGIATLIEGTSLTFHIIFALLNAFQGFFILLFGTIMDHKIRDALRMRMSSLKGKSRAAENASLGPTNGSKLMNRQG

SEQ ID NO: 46967 - protein, 695 aa, Homo sapiens; identical to SEQ ID NO: 46966

SEQ ID NO: 46968 - protein, 752 aa, Homo sapiens
MYTGPCKVLHLSSGLLPNSGRFGIVLSDEYQVVTSLWCQLYTTHAPQQASGMLLLNYLVIPSKAQVNKPGYIPNLGECSHYRSKIHLKAGDKLQSPEGKPKTGRIQEKCEGPCISSSNCSQPCAKDFHGEIGFTCNQKKWQKSAETCTSLSVEKLFKDSTGASRLSVAAPSIPLHILDFRAPETIESVAQGIRKNCPFDYACITDMVKSSETTSGNIAFIVELLKNISTDLSDNVTREKMKSYSEVANHILDTAAISNWAFIPNKNASSDLLQSVNLFARQLHIHNNSENIVNELFIQTKGFHINHNTSEKSLNFSMSMNNTTEDILGMVQIPRQELRKLWPNASQAISIAFPTLGAILREAHLQNVSLPRQVNGLVLSVVLPERLQEIILTFEKINKTRNARAQCVGWHSKKRRWDEKACQMMLDIRNEVKCRCNYTSVVMSFSILMSSKSMTDKVLDYITCIGLSVSILSLVLCLIIEATVWSRVVVTEISYMRHVCIVNIAVSLLTANVWFIIGSHFNIKAQDYNMCVAVTFFSHFFYLSLFFWMLFKALLIIYGILVIFRRMMKSRMMVIGFAIGYGCPLIIAVTTVAITEPEKGYMRPEACWLNWDNTKALLAFAIPAFVIVAVNLIVVLVVAVNTQRPSIGSSKSQDVVIIMRISKNVAILTPLLGLTWGFGIATLIEGTSLTFHIIFALLNAFQGFFILLFGTIMDHKIRDALRMRMSSLKGKSRAAENASLGPTNGSKLMNRQG

SEQ ID NO: 46969 - protein, 334 aa, Homo sapiens
MNEDLKVNLSGLPRDYLDAAAAENISAAVSSRVPAVEPEPELVVNPWDIVLCTSGTLISCENAIVVLIIFHNPSLRAPMFLLIGSLALADLLAGIGLITNFVFAYLLQSEATKLVTIGLIVASFSASVCSLLAITVDRYLSLYYALTYHSERTVTFTYVMLVMLWGTSICLGLLPVMGWNCLRDESTCSVVRPLTKNNAAILSVSFLFMFALMLQLYIQICKIVMRHAHQIALQHHFLATSHYVTTRKGVSTLAIILGTFAACWMPFTLYSLIADYTYPSIYTYATLLPATYNSIINPVIYAFRNQEIQKALCLICCGCIPSSLAQRARSPSDV

SEQ ID NO: 46970 - protein, 334 aa, Homo sapiens; identical to SEQ ID NO: 46969

SEQ ID NO: 46971 - protein, 1279 aa, Homo sapiens
MRGHGNHSRLKSRCASLGNVHHHQAQMAHGAHCRGGRTPQSPDSRGPTAGGHTRGRWTYRPIEALINVSFPGAKGGRTAEGEPSWAWVFRSGYLQRQALPGLPVSTRVAACWWQHHPGRDSGFLGPGFIDLLREEPSGRADGKAAAQKTGRLYLFPTFLGNKLPEAADSFGEIASGNSVIFTSVLQSSHPPGTPPPSARKPSPGAAMLVCEETLELGAQGCWGSTSPRGQAVSLVGGPTAGGSRLGGAGCTMGLLMALQARRPRDGTWADPRRCSRAVEGSGLTRAALVSPGPSGVEEDTRREGCVLVGSWRSSTHRSRVLIINTPSGRTPWSQGSLGSTGRYNQTRAPGSQQQGLCSDAALHEDFVPEPTPAFFQYPPQAFSKTKVRDLGRGGLYAFSKEEKVSEAQRVEAYETHGLGLSTGRQNPVPSPCKPGCVCQGLALDAEAWPRHPGRRPCAAKEACLGPPGCSGELSLPEEEGIAPGAATAAPAWVPHGRVSRFLTVKLFTYVTMYQCKQERILRLCISGESGRYVRRSRFRNFAALMVSTGVPGVLQLGARPLRGGGHPYGDSQAGKVVEWRAGDRASGLSAGERRFLSQSELQTWPRTPHCVGKKVPQPVGAADLAPDTSLCRKEGSSASRSCRPGPGHLTRREEDSFRQLAFPRFEEVTFPPLTAAERAPSVHGGHSLASQGLVLAGRTRSVASGGKQELSGPLAACIPTQDLKTVLSLPRYPGEFLHPVVYACTAVMLLCLLASFVTYIVHQSAIRISRKGRHTLLNFCFHAALTFTVFAGGINRTKYPILCQAVGIVLHYSTLSTMLWIGVTARNIYKQVTKKAPLCLDTDQPPYPRQPLLRFYLVSGGVPFIICGVTAATNIRNYGTEDEDTACWMAWEPSLGAFYGPAAIITLVTCVYFLGTYVQLRRHPGRRYELRTQPEEQRRLATPEGGRGIRPGTPPAHDAPGASVLQNEHSFQAQLRAAAFTLFLFTATWAFGALAVSQGHFLDMVFSCLYGAFCVTLGLFVLIHHCAKREDVWQCWWACCPPRKDAHPALDANGAALGRAACLHSPGLGQPRGFAHPPGPCKMTNLQAAQGHASCLSPATPCCAKMHCEPLTADEAHVHLQEEGAFGHDPHLHGCLQGRTKPPYFSRHPAEEPEYAYHIPSSLDGSPRSSRTDSPPSSLDGPAGTHTLACCTQGDPFPMVTQPEGSDGSPALYSCPTQPGREAALGPGHLEMLRRTQSLPFGGPSQNGLPKGKLLEGLPFGTDGTGNIRTGPWKNETTV

SEQ ID NO: 46972 - protein, 464 aa, Homo sapiens
MLWIGVTARNIYKQVTKKAPLCLDTDQPPYPRQPLLSRFYLVSGGVPFIICGVTAATNIRNYGTEDEDTAYCWMAWEPSLGAFYGPAAIITLVTCVYFLGTYVQLRRHPGRRYELRTQPEEQRRLATPEGGRGIRPGTPPAHDAPGASVLQNEHSFQAQLRAAAFTLFLFTATWAFGALAVSQGHFLDMVFSCLYGAFCVTLGLFVLIHHCAKREDVWQCWWACCPPRKDAHPALDANGAALGRAACLHSPGLGQPRGFAHPPGPCKMTNLQAAQGHASCLSPATPCCAKMHCEPLTADEAHVHLQEEGAFGHDPHLHGCLQGRTKPPYFSRHPAEEPEYAYHIPSSLDGSPRSSRTDSPPSSLDGPAGTHTLACCTQGDPFPMVTQPEGSDGSPALYSCPTQPGREAALGPGHLEMLRRTQSLPFGGPSQNGLPKGKLLEGLPFGTDGTGNIRTGPWKNETTV

SEQ ID NO: 46973 - protein, 560 aa, Homo sapiens
MDLKTVLSLPRYPGEFLHPVVYACTAVMLLCLLASFVTYIVHQSAIRISRKGRHTLLNFCFHAALTFTVFAGGINRTKYPILCQAVGIVLHYSTLSTMLWIGVTARNIYKQVTKKAPLCLDTDQPPYPRQPLLRFYLVSGGVPFIICGVTAATNIRNYGTEDEDTAYCWMAWEPSLGAFYGPAAIITLVTCVYFLGTYVQLRRHPGRRYELRTQPEEQRRLATPEGGRGIRPGTPPAHDAPGASVLQNEHSFQAQLRAAAFTLFLFTATWAFGALAVSQGHFLDMVFSCLYGAFCVTLGLFVLIHHCAKREDVWQCWWACCPPRKDAHPALDANGAALGRAACLHSPGLGQPRGFAHPPGPCKMTNLQAAQGHASCLSPATPCCAKMHCEPLTADEAHVHLQEEGAFGHDPHLHGCLQGRTKPPYFSRHPAEEPEYAYHIPSSLDGSPRSSRTDSPPSSLDGPAGTHTLACCTQGDPFPMVTQPEGSDGSPALYSCPTQPGREAALGPGHLEMLRRTQSLPFGGPSQNGLPKGKLLEGLPFGTDGTGNIRTGPWKNETTV

SEQ ID NO: 46974 - protein, 853 aa, Homo sapiens
MRGHGNHSRLKSRCASLGNVHHHQAQMAHGAHCRGGRTPQSPDSRGPTAGGHTRGRWTYRPIEALINVSFPGAKGGRTAEGEPSWAWVFRSGYLQRQALPGLPVSTRVAACWWQHHPGRDSGFLGPGFIDLLREEPSGRADGKAAAQKTGRLYLFPTFLGNKLPEAADSFGEIASGNSVIFTSVLQSSHPPGTPPPSARKPSPGAAMLVCEETLELGAQGCWGSTSPRGQAVSLVGGPTAGGSRLGGAGCTMGLLMALQARRPRDGTWADPRRCSRAVEGSGLTRAALVSPGPSGVEEDTRREGCVLVGSWRSSTHRSRVLIINTPSGRTPWSQGSLGSTGRYNQTRAPGSQQQGLCSDAALHEDFVPEPTPAFFQYPPQAFSKTKVRDLGRGGLYAFSKEEKVSEAQRVEAYETHGLGLSTGRQNPVPSPCKPGCVCQGLALDAEAWPRHPGRRPCAAKEACLGPPGCSGELSLPEEEGIAPGAATAAPAWVPHGRVSRFLTVKLFTYVTMYQCKQERILRLCISGESGRYVRRSRFRNFAALMVSTGVPGVLQLGARPLRGGGHPYGDSQAGKVVEWRAGDRASGLSAGERRFLSQSELQTWPRTPHCVGKKVPQPVGAADLAPDTSLCRKEGSSASRSCRPGPGHLTRREEDSFRQLAFPRFEEVTFPPLTAAERAPSVHGGHSLASQGLVLAGRTRSVASGGKQELSGPLAACIPTQDLKTVLSLPRYPGEFLHPVVYACTAVMLLCLLASFVTYIVHQSAIRISRKGRHTLLNFCFHAAEHPGVTPLRTSPPLPWWTPIQVGIVLHYSTLSTMLWIGVTARNIYKQVTKKAPLCLDTDQPPYPRQPLL

SEQ ID NO: 46975 - protein, 1121 aa, Homo sapiens
MGAGGRRMRGAPARLLLPLLPWLLLLLAPEARGAPGCPLSIRSCKCSGERPKGLSGGVPGPARRRVVCSGGDLPEPPEPGLLPNGTVTLLLSNNKITGLRNGSFLGLSLLEKLDLRNNIISTVQPGAFLGLGELKRLDLSNNRIGCLTSETFQGLPRLLRLNISGNIFSSLQPGVFDELPALKVVDLGTEFLTCDCHLRWLLPWAQNRSLQLSEHTLCAYPSALHAQALGSLQEAQLCCEGALELHTHHLIPSLRQVVFQGDRLPFQCSASYLGNDTRIRWYHNRAPVEGDEQAGILLAESLIHDCTFITSELTLSHIGVWASGEWECTVSMAQGNASKKVEIVVLETSASYCPAERVANNRGDFRWPRTLAGITAYQSCLQYPFTSVPLGGGAPGTRASRRCDRAGRWEPGDYSHCLYTNDITRVLYTFVLMPINASNALTLAHQLRVYTAEAASFSDMMDVVYVAQMIQKFLGYVDQIKELVEVMVDMASNLMLVDEHLLWLAQREDKACSRIVGALERIGGAALSPHAQHISVELSAFPREVGGAGAGLHPVVYPCTALLLLCLFATIITYILNHSSIRVSRKGWHMLLNLCFHIAMTSAVFAGGITLTNYQMVCQAVGITLHYSSLSTLLWMGVKARVLHKELTWRAPPPQEGDPALPTPSPMLRFYLIAGGIPLIICGITAAVNIHNYRDHSPYCWLVWRPSLGAFYIPVALILLITWIYFLCAGLRLRGPLAQNPKAGNSRASLEAGEELRGSTRLRGSGPLLSDSGSLLATGSARVGTPGPPEDGDSLYSPGVQLGALVTTHFLYLAMWACGALAVSQRWLPRVVCSCLYGVAASALGLFVFTHHCARRRDVRASWRACCPPASPAAPHAPPRALPAAAEDGSPVFGEGPPSLKSSPSGSSGHPLALGPCKLTNLQLAQSQVCEAGAAAGGEGEPEPAGTRGNLAHRHPNNVHHGRRAHKSRAKGHRAGEACGKNRLKALRGGAAGALELLSSESGSLHNSPTDSYLGSSRNSPGAGLQLEGEPMLTPSEGSDTSAAPLSEAGRAGQRRSASRDSLKGGGALEKESHRRSYPLNAASLNGAPKGGKYDDVTLMGAEVASGGCMKTGLWKSETTV

SEQ ID NO: 46976 - protein, 1338 aa, Homo sapiens
MGAGGRRMRGAPARLLLPLLPWLLLLLAPEARGAPGCPLSIRSCKCSGERPKGLSGGVPGPARRRVVCSGGDLPEPPEPGLLPNGTVTLLLSNNKITGLRNGSFLGLSLLEKLDLRNNIISTVQPGAFLGLGELKRLDLSNNRIGCLTSETFQGLPRLLRLNISGNIFSSLQPGVFDELPALKVVDLGTEFLTCDCHLRWLLPWAQNRSLQLSEHTLCAYPSALHAQALGSLQEAQLCCEGALELHTHHLIPSLRQVVFQGDRLPFQCSASYLGNDTRIRWYHNRAPVEGDEQAGILLAESLIHDCTFITSELTLSHIGVWASGEWECTVSMAQGNASKKVEIVVLETSASYCPAERVANNRGDFRWPRTLAGITAYQSCLQYPFTSVPLGGGAPGTRASRRCDRAGRWEPGDYSHCLYTNDITRVLYTFVLMPINASNALTLAHQLRVYTAEAASFSDMMDVVYVAQMIQKFLGYVDQIKELVEVMVDMASNLMLVDEHLLWLAQREDKACSRIVGALERIGGAALSPHAQHISVNARNVALEAYLIKPHSYVGLTCTAFQRREGGVPGTRPGSPGQNPPPEPEPPADQQLRFRCTTGRPNVSLSSFHIKNSVALASIQLPPSLFSSLPAALAPPVPPDCTLQLLVFRNGRLFHSHSNTSRPGAAGPGKRRGVATPVIFAGTSGCGVGNLTEPVAVSLRHWAEGAEPVAAWWSQEGPGEAGGWTSEGCQLRSSQPNVSALHCQHLGNVAVLMELSAFPREVGGAGAGLHPVVYPCTALLLLCLFATIITYILNHSSIRVSRKGWHMLLNLCFHIAMTSAVFAGGITLTNYQMVCQAVGITLHYSSLSTLLWMGVKARVLHKELTWRAPPPQEGDPALPTPSPMLRFYLIAGGIPLIICGITAAVNIHNYRDHSPYCWLVWRPSLGAFYIPVALILLITWIYFLCAGLRLRGPLAQNPKAGNSRASLEAGEELRGSTRLRGSGPLLSDSGSLLATGSARVGTPGPPEDGDSLYSPGVQLGALVTTHFLYLAMWACGALAVSQRWLPRVVCSCLYGVAASALGLFVFTHHCARRRDVRASWRACCPPASPAAPHAPPRALPAAAEDGSPVFGEGPPSLKSSPSGSSGHPLALGPCKLTNLQLAQSQVCEAGAAAGGEGEPEPAGTRGNLAHRHPNNVHHGRRAHKSRAKGHRAGEACGKNRLKALRGGAAGALELLSSESGSLHNSPTDSYLGSSRNSPGAGLQLEGEPMLTPSEGSDTSAAPLSEAGRAGQRRSASRDSLKGGGALEKESHRRSYPLNAASLNGAPKGGKYDDVTLMGAEVASGGCMKTGLWKSETTV

SEQ ID NO: 46977 - protein, 1256 aa, Homo sapiens
MRGAPARLLLPLLPWLLLLLAPEARGAPGCPLSIRSCKCSGERPKGLSGGVPGPARRRVVCSGGDLPEPPEPGLLPNGTVTLLLSNNKITGLRNGSFLGLSLLEKLDLRNNIISTVQPGAFLGLGELKRLDLSNNRIGCLTSETFQGLPRLLRLNISGNIFSSLQPGVFDELPALKVVDLGTEFLTCDCHLRWLLPWAQNRSLQLSEHTLCAYPSALHAQALGSLQEAQLCCEGALELHTHHLIPSLRQVVFQGDRLPFQCSASYLGNDTRIRWYHNRAPVEGDEQAGILLAESLIHDCTFITSELTLSHIGVWASGEWECTVSMAQGNASKKVEIVVLETSASYCPAERVANNRGDFRWPRTLAGITAYQSCLQYPFTSVPLGGGAPGTRASRRCDRAGRWEPGDYSHCLYTNDITRVLYTFVLMPINASNALTLAHQLRVYTAEAASFSDMMDVVYVAQMIQKFLGYVDQIKELVEVMVDMASNLMLVDEHLLWLAQREDKACSRIVGALERIGGAALSPHAQHISVNARNVALEAYLIKPHSYVGLTCTAFQRREGGVPGTRPGSPGQNPPPEPEPPADQQLRFRCTTGRPNVSLSSFHIKNSVALASIQLPPSLFSSLPAALAPPVPPDCTLQLLVFRNGRLFHSHSNTSRPGAAGPGKRRGVATPVIFAGTSGCGVGNLTEPVAVSLRHWAEGAEPVAAWWSQEGPGEAGGWTSEGCQLRSSQPNVSALHCQHLGNVAVLMELSAFPREVGGAGAGLHPVVYPCTALLLLCLFATIITYILNHSSIRVSRKGWHMLLNLCFHIAMTSAVFAGGITLTNYQMVCQAVGITLHYSSLSTLLWMGVKARVLHKELTWRAPPPQEGDPALPTPSPMLRFYLIAGGIPLIICGITAAVNIHNYRDHSPYCWLVWRPSLGAFYIPVALILLITWIYFLCAGLRLRGPLAQNPKAGNSRASLEAGEELRGSTRLRGSGPLLSDSGSLLATGSARVGTPGPPEDGDSLYSPGVQRGAGDHALPVLGHVGLRGSGSVPALAAPGGVQLLVRGGSLRPGPLRLHSPLCQAEGRESLVARLLPPCLSRGPPCPAPGPARRRRGRFPGVRGGPPLPQVLPKRQQRPSAGSGPLQAHQPAAGPESGVRGGGGGRRGRRAGAGGHPGKPRPPPPQQRAPRASGAQEPGQGTPRGGGLRQEPAQGPARGRGGGAGAAVQRERQSAQQPHRQLPGQQPQQPGRRPAAGRRAHAHAVRGQRHQRRAAF

SEQ ID NO: 46978 - protein, 1321 aa, Homo sapiens
MEPPGRRRGRAQPPLLLPLSLLALLALLGGGGGGGAAALPAGCKHDGRPRGAGRAAGAAEGKVVCSSLELAQVLPPDTLPNRTVTLILSNNKISELKNGSFSGLSLLERLDLRNNLISSIDPGAFWGLSSLKRLDLTNNRIGCLNADIFRGLTNLVRLNLSGNLFSSLSQGTFDYLASLRSLEFQTEYLLCDCNILWMHRWVKEKNITVRDTRCVYPKSLQAQPVTGVKQELLTCDPPLELPSFYMTPSHRQVVFEGDSLPFQCMASYIDQDMQVLWYQDGRIVETDESQGIFVEKNMIHNCSLIASALTISNIQAGSTGNWGCHVQTKRGNNTRTVDIVVLESSAQYCPPERVVNNKGDFRWPRTLAGITAYLQCTRNTHGSGIYPGNPQDERKAWRRCDRGGFWADDDYSRCQYANDVTRVLYMFNQMPLNLTNAVATARQLLAYTVEAANFSDKMDVIFVAEMIEKFGRFTKEEKSKELGDVMVDIASNIMLADERVLWLAQREAKACSRIVQCLQRIATYRLAGGAHVYSTYSPNIALEAYVIKSTGFTGMTCTVFQKVAASDRTGLSDYGRRDPEGNLDKQLSFKCNVSNTFSSLALKNTIVEASIQLPPSLFSPKQKRELRPTDDSLYKLQLIAFRNGKLFPATGNSTNLADDGKRRTVVTPVILTKIDGVNVDTHHIPVNVTLRRIAHGADAVAARWDFDLLNGQGGWKSDGCHILYSDENITTIQCYSLSNYAVLMDLTGSELYTQAASLLHPVVYTTAIILLLCLLAVIVSYIYHHSLIRISLKSWHMLVNLCFHIFLTCVVFVGGITQTRNASICQAVGIILHYSTLATVLWVGVTARNIYKQVTKKAKRCQDPDEPPPPPRPMLRFYLIGGGIPIIVCGITAAANIKNYGSRPNAPYCWMAWEPSLGAFYGPASFITFVNCMYFLSIFIQLKRHPERKYELKEPTEEQQRLAANENGEINHQDSMSLSLISTSALENEHTFHSQLLGASLTLLLYVALWMFGALAVSLYYPLDLVFSFVFGATSLSFSAFFVVHHCVNREDVRLAWIMTCCPGRSSYSVQVNVQPPNSNGTNGEAPKCPNSSAESSCTNKSASSFKNSSQGCKLTNLQAAAAQCHANSLPLNSTPQLDNSLTEHSMDNDIKMHVAPLEVQFRTNVHSSRHHKNRSKGHRASRLTVLREYAYDVPTSVEGSVQNGLPKSRLGNNEGHSRSRRAYLAYRERQYNPPQQDSSDACSTLPKSSRNFEKPVSTTSKKDALRKPAVVELENQQKSYGLNLAIQNGPIKSNGQEGPLLGTDSTGNVRTGLWKHETTV

SEQ ID NO: 46979 - protein, 616 aa, Homo sapiens
MEPPGRRRGRAQPPLLLPLSLLALLALLGGGGGGGAAALPAGCKHDGRPRGAGRAAGAAEGKVVCSSLELAQVLPPDTLPNRTVTLILSNNKISELKNGSFSGLSLLERLDLRNNLISSIDPGAFWGLSSLKRLDLTNNRIGCLNADIFRGLTNLVRLNLSGNLFSSLSQGTFDYLASLRSLEFQTEYLLCDCNILWMHRWVKEKNITVRDTRCVYPKSLQAQPVTGVKQELLTCDPPLELPSFYMTPSHRQVVFEGDSLPFQCMASYIDQDMQVLWYQDGRIVETDESQGIFVEKNMIHNCSLIASALTISNIQAGSTGNWGCHVQTKRGNNTRTVDIVVLESSAQYCPPERVVNNKGDFRWPRTLAGITAYLQCTRNTHGSGIYPGNPQDERKAWRRCDRGGFWADDDYSRCQYANDVTRVLYMFNQMPLNLTNAVATARQLLAYTVEAANFSDKMDVIFVAEMIEKFGRFTKEEKSKELGDVMVDIASNIMLADERVLWLAQREAKACSRIVQCLQRIATYRLAGGAHVYSTYSPNIALEAYVIKSTGFTGMTCTVFQKVAASDRTGLSDYGRRDPEGNLDKQLSFKCNVSNTFSSLALKVCYILQSFKTIYS

SEQ ID NO: 46980 - protein, 381 aa, Homo sapiens
MPLKRNNSKYPPLELPSFYMTPSHRQVVFEGDSLPFQCMASYIDQDMQVLWYQDGRIVETDESQGIFVEKNMIHNCSLIASALTISNIQAGSTGNWGCHVQTKRGNNTRTVDIVVLESSAQYCPPERVVNNKGDFRWPRTLAGITAYLQCTRNTHGSGIYPGNPQDERKAWRRCDRGGFWADDDYSRCQYANDVTRVLYMFNQMPLNLTNAVATARQLLAYTVEAANFSDKMDVIFVAEMIEKFGRFTKEEKSKELGDVMVDIASNIMLADERVLWLAQREAKACSRIVQCLQRIATYRLAGGAHVYSTYSPNIALEAYVIKSTGFTGMTCTVFQKVAASDRTGLSDYGRRDPEGNLDKQLSFKCNVSNTFSSLALKGKFR

SEQ ID NO: 46981 - protein, 1221 aa, Homo sapiens
MMFRSDRMWSCHWKWKPSPLLFLFALYIMCVPHSVWGCANCRVVLSNPSGTFTSPCYPNDYPNSQACMWTLRAPTGYIIQITFNDFDIEEAPNCIYDSLSLDNGESQTKFCGATAKGLSFNSSANEMHVSFSSDFSIQKKGFNASYIRVAVSLRNQKVILPQTSDAYQVSVAKSISIPELSAFTLCFEATKVGHEDSDWTAFSYSNASFTQLLSFGKAKSGYFLSISDSKCLLNNALPVKEKEDIFAESFEQLCLVWNNSLGSIGVNFKRNYETVPCDSTISKVIPGNGKLLLGSNQNEIVSLKGDIYNFRLWNFTMNAKILSNLSCNVKGNVVDWQNDFWNIPNLALKAESNLSCGSYLIPLPAAELASCADLGTLCQATVNSPSTTPPTVTTNMPVTNRIDKQRNDGIIYRISVVIQNILRHPEVKVQSKVAEWLNSTFQNWNYTVYVVNISFHLSAGEDKIKVKRSLEDEPRLVLWALLVYNATNNTNLEGKIIQQKLLKNNESLDEGLRLHTVNVRQLGHCLAMEEPKGYYWPSIQPSEYVLPCPDKPGFSASRICFYNATNPLVTYWGPVDISNCLKEANEVANQILNLTADGQNLTSANITNIVEQVKRIVNKEENIDITLGSTLMNIFSNILSSSDSDLLESSSEALKTIDELAFKIDLNSTSHVNITTRNLALSVSSLLPGTNAISNFSIGLPSNNESYFQMDFESGQVDPLASVILPPNLLENLSPEDSVLVRRAQFTFFNKTGLFQDVGPQRKTLVSYVMACSIGNITIQNLKDPVQIKIKHTRTQEVHHPICAFWDLNKNKSFGGWNTSGCVAHRDSDASETVCLCNHFTHFGVLMDLPRSASQLDARNTKVLTFISYIGCGISAIFSAATLLTYVAFEKLRRDYPSKILMNLSTALLFLNLLFLLDGWITSFNVDGLCIAVAVLLHFFLLATFTWMGLEAIHMYIALVKVFNTYIRRYILKFCIIGWGLPALVVSVVLASRNNNEVYGKESYGKEKGDEFCWIQDPVIFYVTCAGYFGVMFFLNIAMFIVVMVQICGRNGKRSNRTLREEVLRNLRSVVSLTFLLGMTWGFAFFAWGPLNIPFMYLFSIFNSLQGLFIFIFHCAMKENVQKQWRQHLCCGRFRLADNSDWSKTATNIIKKSSDNLGKSLSSSSIGSNSTYLTSKSKSSSTTYFKRNSHTDNVSYEHSFNKSGSLRQCFHGQVLVKTGPC

SEQ ID NO: 46982 - protein, 1193 aa, Homo sapiens
MMFRSDRMWSCHWKWKPSPLLFLFALYIMCVPHSVWGCANCRVVLSNPSGTFTSPCYPNDYPNSQACMWTLRAPTGYIIQITFNDFDIEEAPNCIYDSLSLDNGESQTKFCGATAKGLSFNSSANEMHVSFSSDFSIQKKGFNASYIRVAVSLRNQKVILPQTSDAYQVSVAKSISIPELSAFTLCFEATKVGHEDSDWTAFSYSNASFTQLLSFGKAKSGYFLSISDSKCLLNNALPVKEKEDIFAESFEQLCLVWNNSLGSIGVNFKRNYETVPCDSTISKVIPGNGKLLLGSNQNEIVSLKGDIYNFRLWNFTMNAKILSNLSCNVKGNVVDWQNDFWNIPNLALKAESNLSCGSYLIPLPAAELASCADLGTLCQDGIIYRISVVIQNILRHPEVKVQSKVAEWLNSTFQNWNYTVYVVNISFHLSAGEDKIKVKRSLEDEPRLVLWALLVYNATNNTNLEGKIIQQKLLKNNESLDEGLRLHTVNVRQLGHCLAMEEPKGYYWPSIQPSEYVLPCPDKPGFSASRICFYNATNPLVTYWGPVDISNCLKEANEVANQILNLTADGQNLTSANITNIVEQVKRIVNKEENIDITLGSTLMNIFSNILSSSDSDLLESSSEALKTIDELAFKIDLNSTSHVNITTRNLALSVSSLLPGTNAISNFSIGLPSNNESYFQMDFESGQVDPLASVILPPNLLENLSPEDSVLVRRAQFTFFNKTGLFQDVGPQRKTLVSYVMACSIGNITIQNLKDPVQIKIKHTRTQEVHHPICAFWDLNKNKSFGGWNTSGCVAHRDSDASETVCLCNHFTHFGVLMDLPRSASQLDARNTKVLTFISYIGCGISAIFSAATLLTYVAFEKLRRDYPSKILMNLSTALLFLNLLFLLDGWITSFNVDGLCIAVAVLLHFFLLATFTWMGLEAIHMYIALVKVFNTYIRRYILKFCIIGWGLPALVVSVVLASRNNNEVYGKESYGKEKGDEFCWIQDPVIFYVTCAGYFGVMFFLNIAMFIVVMVQICGRNGKRSNRTLREEVLRNLRSVVSLTFLLGMTWGFAFFAWGPLNIPFMYLFSIFNSLQGLFIFIFHCAMKENVQKQWRQHLCCGRFRLADNSDWSKTATNIIKKSSDNLGKSLSSSSIGSNSTYLTSKSKSSSTTYFKRNSHTDNVSYEHSFNKSGSLRQCFHGQVLVKTGPC

SEQ ID NO: 46983 - protein, 1222 aa, Homo sapiens
MMFRSDRMWSCHWKWKPSPLLFLFALYIMCVPHSVWGCANCRVVLSNPSGTFTSPCYPNDYPNSQACMWTLRAPTGYIIQITFNDFDIEEAPNCIYDSLSLDNGESQTKFCGATAKGLSFNSSANEMHVSFSSDFSIQKKGFNASYIRVAVSLRNQKVILPQTSDAYQVSVAKSISIPELSAFTLCFEATKVGHEDSDWTAFSYSNASFTQLLSFGKAKSGYFLSISDSKCLLNNALPVKEKEDIFAESFEQLCLVWNNSLGSIGVNFKRNYETVPCDSTISKVIPGNGKLLLGSNQNEIVSLKGDIYNFRLWNFTMNAKILSNLSCNVKGNVVDWQNDFWNIPNLALKAESNLSCGSYLIPLPAAELASCADLGTLCQDGIIYRISVVIQNILRHPEVKVQSKVAEWLNSTFQNWNYTVYVVNISFHLSAGEDKIKVKRSLEDEPRLVLWALLVYNATNNTNLEGKIIQQKLLKNNESLDEGLRLHTVNVRQLGHCLAMEEPKGYYWPSIQPSEYVLPCPDKPGFSASRICFYNATNPLVTYWGPVDISNCLKEANEVANQILNLTADGQNLTSANITNIVEQVKRIVNKEENIDITLGSTLMNIFSNILSSSDSDLLESSSEALKTIDELAFKIDLNSTSHVNITTRNLALSVSSLLPGTNAISNFSIGLPSNNESYFQMDFESGQVDPLASVILPPNLLENLSPEDSVLVRRAQFTFFNKTGLFQDVGPQRKTLVSYVMACSIGNITIQNLKDPVQIKIKHTRTQEVHHPICAFWDLNKNKSFGGWNTSGCVAHRDSDASETVCLCNHFTHFGVLMDLPRSASQLDARNTKVLTFISYIGCGISAIFSAATLLTYVAFEKLRRDYPSKILMNLSTALLFLNLLFLLDGWITSFNVDGLCIAVAVLLHFFLLATFTWMGLEAIHMYIALVKVFNTYIRRYILKFCIIGWGLPALVVSVVLASRNNNEVYGKESYGKEKGDEFCWIQDPVIFYVTCAGYFGVMFFLNIAMFIVVMVQICGRNGKRSNRTLREEVLRNLRSVVSLTFLLGMTWGFAFFAWGPLNIPFMYLFSIFNSLQGLFIFIFHCAMKENVQKQWRQHLCCGRFRLADNSDWSKTATNIIKKSSDNLGKSLSSSSIGSNSTYLTSKSKSSSTTYFKRNSHTDSASMDKSLSKLAHADGDQTSIIPVHQVIDKVKGYCNAHSDNFYKNIIMSDTFSHSTKF

SEQ ID NO: 46984 - protein, 1250 aa, Homo sapiens
MMFRSDRMWSCHWKWKPSPLLFLFALYIMCVPHSVWGCANCRVVLSNPSGTFTSPCYPNDYPNSQACMWTLRAPTGYIIQITFNDFDIEEAPNCIYDSLSLDNGESQTKFCGATAKGLSFNSSANEMHVSFSSDFSIQKKGFNASYIRVAVSLRNQKVILPQTSDAYQVSVAKSISIPELSAFTLCFEATKVGHEDSDWTAFSYSNASFTQLLSFGKAKSGYFLSISDSKCLLNNALPVKEKEDIFAESFEQLCLVWNNSLGSIGVNFKRNYETVPCDSTISKVIPGNGKLLLGSNQNEIVSLKGDIYNFRLWNFTMNAKILSNLSCNVKGNVVDWQNDFWNIPNLALKAESNLSCGSYLIPLPAAELASCADLGTLCQATVNSPSTTPPTVTTNMPVTNRIDKQRNDGIIYRISVVIQNILRHPEVKVQSKVAEWLNSTFQNWNYTVYVVNISFHLSAGEDKIKVKRSLEDEPRLVLWALLVYNATNNTNLEGKIIQQKLLKNNESLDEGLRLHTVNVRQLGHCLAMEEPKGYYWPSIQPSEYVLPCPDKPGFSASRICFYNATNPLVTYWGPVDISNCLKEANEVANQILNLTADGQNLTSANITNIVEQVKRIVNKEENIDITLGSTLMNIFSNILSSSDSDLLESSSEALKTIDELAFKIDLNSTSHVNITTRNLALSVSSLLPGTNAISNFSIGLPSNNESYFQMDFESGQVDPLASVILPPNLLENLSPEDSVLVRRAQFTFFNKTGLFQDVGPQRKTLVSYVMACSIGNITIQNLKDPVQIKIKHTRTQEVHHPICAFWDLNKNKSFGGWNTSGCVAHRDSDASETVCLCNHFTHFGVLMDLPRSASQLDARNTKVLTFISYIGCGISAIFSAATLLTYVAFEKLRRDYPSKILMNLSTALLFLNLLFLLDGWITSFNVDGLCIAVAVLLHFFLLATFTWMGLEAIHMYIALVKVFNTYIRRYILKFCIIGWGLPALVVSVVLASRNNNEVYGKESYGKEKGDEFCWIQDPVIFYVTCAGYFGVMFFLNIAMFIVVMVQICGRNGKRSNRTLREEVLRNLRSVVSLTFLLGMTWGFAFFAWGPLNIPFMYLFSIFNSLQGLFIFIFHCAMKENVQKQWRQHLCCGRFRLADNSDWSKTATNIIKKSSDNLGKSLSSSSIGSNSTYLTSKSKSSSTTYFKRNSHTDSASMDKSLSKLAHADGDQTSIIPVHQVIDKVKGYCNAHSDNFYKNIIMSDTFSHSTKF

SEQ ID NO: 46985 - protein, 797 aa, Homo sapiens
MASCRAWNLRVLVAVVCGLLTGIILGLGIWRIVIRIQRGKSTSSSSTPTEFCRNGGTWENGRCICTEEWKGLRCTIANFCENSTYMGFTFARIPVGRYGPSLQTCGKDTPNAGNPMAVRLCSLSLYGEIELQKVTIGNCNENLETLEKQVKDVTAPLNNISSEVQILTSDANKLTAENITSATRVVGQIFNTSRNASPEAKKVAIVTVSQLLDASEDAFQRVAATANDDALTTLIEQMETYSLSLGNQSVVEPNIAIQSANFSSENAVGPSNVRFSVQKGASSSLVSSSTFIHTNVDGLNPDAQTELQVLLNMTKNYTKTCGFVVYQNDKLFQSKTFTAKSDFSQKIISSKTDENEQDQSASVDMVFSPKYNQKEFQLYSYACVYWNLSAKDWDTYGCQKDKGTDGFLRCRCNHTTNFAVLMTFKKDYQYPKSLDILSNVGCALSVTGLALTVIFQIVTRKVRKTSVTWVLVNLCISMLIFNLLFVFGIENSNKNLQTSDGDINNIDFDNNDIPRTDTINIPNPMCTAIAALLHYFLLVTFTWNALSAAQLYYLLIRTMKPLPRHFILFISLIGWGVPAIVVAITVGVIYSQNGNNPQWELDYRQEKICWLAIPEPNGVIKSPLLWSFIVPVTIILISNVVMFITISIKVLWKNNQNLTSTKKVSSMKKIVSTLSVAVVFGITWILAYLMLVNDDSIRIVFSYIFCLFNTTQGLQIFILYTVRTKVFQSEASKVLMLLSSIGRRKSLPSVTRPRLRVKMYNFLRSLPTLHERFRLLETSPSTEEITLSESDNAKESI

SEQ ID NO: 46986 - protein, 502 aa, Homo sapiens
MPVKMLFKELLLLLMMMPLQHYTKTCGFVVYQNDKLFQSKTFTAKSDFSQKIISSKTDENEQDQSASVDMVFSPKYNQKEFQLYSYACVYWNLSAKDWDTYGCQKDKGTDGFLRCRCNHTTNFAVLMTFKKDYQYPKSLDILSNVGCALSVTGLALTVIFQIVTRKVRKTSVTWVLVNLCISMLIFNLLFVFGIENSNKNLQTSDGDINNIDFDNNDIPRTDTINIPNPMCTAIAALLHYFLLVTFTWNALSAAQLYYLLIRTMKPLPRHFILFISLIGWGVPAIVVAITVGVIYSQNGNNPQWELDYRQEKICWLAIPEPNGVIKSPLLWSFIVPVTIILISNVVMFITISIKVLWKNNQNLTSTKKVSSMKKIVSTLSVAVVFGITWILAYLMLVNDDSIRIVFSYIFCLFNTTQGLQIFILYTVRTKVFQSEASKVLMLLSSIGRRKSLPSVTRPRLRVKMYNFLRSLPTLHERFRLLETSPSTEEITLSESDNAKESI

SEQ ID NO: 46987 - protein, 380 aa, Homo sapiens
MCPMLLKNGYNGNATPVTTTAPWASLGLSAKTCNNVSFEESRIVLVVVYSAVCTLGVPANCLTAWLALLQVLQGNVLAVYLLCLALCELLYTGTLPLWVIYIRNQHRWTLGLLACKVTAYIFFCNIYVSILFLCCISCDRFVAVVYALESRGRRRRRTAILISACIFILVGIVHYPVFQTEDKETCFDMLQMDSRIAGYYYARFTVGFAIPLSIIAFTNHRIFRSIKQSMGLSAAQKAKVKHSAIAVVVIFLVCFAPYHLVLLVKAAAFSYYRGDRNAMCGLEERLYTASVVFLCLSTVNGVADPIIYVLATDHSRQEVSRIHKGWKEWSMKTDVTRLTHSRDTEELQSPVALADHYTFSRPVHPPGSPCPAKRLIEESC

SEQ ID NO: 46988 - protein, 371 aa, Homo sapiens
MPGNATPVTTTAPWASLGLSAKTCNNVSFEESRIVLVVVYSAVCTLGVPANCLTAWLALLQVLQGNVLAVYLLCLALCELLYTGTLPLWVIYIRNQHRWTLGLLACKVTAYIFFCNIYVSILFLCCISCDRFVAVVYALESRGRRRRRTAILISACIFILVGIVHYPVFQTEDKETCFDMLQMDSRIAGYYYARFTVGFAIPLSIIAFTNHRIFRSIKQSMGLSAAQKAKVKHSAIAVVVIFLVCFAPYHLVLLVKAAAFSYYRGDRNAMCGLEERLYTASVVFLCLSTVNGVADPIIYVLATDHSRQEVSRIHKGWKEWSMKTDVTRLTHSRDTEELQSPVALADHYTFSRPVHPPGSPCPAKRLIEESC

SEQ ID NO: 46989 - protein, 380 aa, Homo sapiens; identical to SEQ ID NO: 46987

SEQ ID NO: 46990 - protein, 10 aa, Homo sapiens
MCPMLLKNGY

SEQ ID NO: 46991 - protein, 874 aa, Homo sapiens
MEKLLRLCCWYSWLLLFYYNFQVRGVYSRSQDHPGFQVLASASHYWPLENVDGIHELQDTTGDIVEGKVNKGIYLKEEKGVTLLYYGRYNSSCISKPEQCGPEGVTFSFFWKTQGEQSRPIPSAYGGQVISNGFKVCSSGGRGSVELYTRDNSMTWEASFSPPGPYWTHVLFTWKSKEGLKVYVNGTLSTSDPSGKVSRDYGESNVNLVIGSEQDQAKCYENGAFDEFIIWERALTPDEIAMYFTAAIGKHALLSSTLPSLFMTSTASPVMPTDAYHPIITNLTEERKTFQSPGVILSYLQNVSLSLPSKSLSEQTALNLTKTFLKAVGEILLLPGWIALSEDSAVVLSLIDTIDTVMGHVSSNLHGSTPQVTVEGSSAMAEFSVAKILPKTVNSSHYRFPAHGQSFIQIPHEAFHRHAWSTVVGLLYHSMHYYLNNIWPAHTKIAEAMHHQDCLLFATSHLISLEVSPPPTLSQNLSGSPLITVHLKHRLTRKQHSEATNSSNRVFVYCAFLDFSSGEGVWSNHGCALTRGNLTYSVCRCTHLTNFAILMQVVPLELARGHQVALSSISYVGCSLSVLCLVATLVTFAVLSSVSTIRNQRYHIHANLSFAVLVAQVLLLISFRLEPGTTPCQVMAVLLHYFFLSAFAWMLVEGLHLYSMVIKVFGSEDSKHRYYYGMGWGFPLLICIISLSFAMDSYGTSNNCWLSLASGAIWAFVAPALFVIVVNIGILIAVTRVISQISADNYKIHGDPSAFKLTAKAVAVLLPILGTSWVFGVLAVNGCAVVFQYMFATLNSLQGLFIFLFHCLLNSEVRAAFKHKTKVWSLTSSSARTSNAKPFHSDLMNGTRPGMASTKLSPWDKSSHSAHRVDLSAV

SEQ ID NO: 46992 - protein, 228 aa, Homo sapiens
  VARIANT 1: note = MOD_RES - Any amino acid
XHGVSARDVLESRTRKQHSEATNSSNRVFVYCAFLDFSSGEGVWSNHGCALTRGNLTYSVCRCTHLTNFAILMQVVPLEVNIGILIAVTRVISQISADNYKIHGDPSAFKLTAKAVAVLLPILGTSWVFGVLAVNGCAVVFQYMFATLNSLQGLFIFLFHCLLNSEVRAAFKHKTKVWSLTSSSARTSNAKPFHSDLMNGTRPGMASTKLSPWDKSSHSAHRVDLSAV

SEQ ID NO: 46993 - protein, 906 aa, Homo sapiens
MEKLLRLCCWYSWLLLFYYNFQVRGVYSRSQDHPGFQVLASASHYWPLENVDGIHELQDTTGASRTHKLTVLPSRNATFVYSNDSAYSNLSATVDIVEGKVNKGIYLKEEKGVTLLYYGRYNSSCISKPEQCGPEGVTFSFFWKTQGEQSRPIPSAYGGQVISNGFKVCSSGGRGSVELYTRDNSMTWEASFSPPGPYWTHVLFTWKSKEGLKVYVNGTLSTSDPSGKVSRDYGESNVNLVIGSEQDQAKCYENGAFDEFIIWERALTPDEIAMYFTAAIGKHALLSSTLPSLFMTSTASPVMPTDAYHPIITNLTEERKTFQSPGVILSYLQNVSLSLPSKSLSEQTALNLTKTFLKAVGEILLLPGWIALSEDSAVVLSLIDTIDTVMGHVSSNLHGSTPQVTVEGSSAMAEFSVAKILPKTVNSSHYRFPAHGQSFIQIPHEAFHRHAWSTVVGLLYHSMHYYLNNIWPAHTKIAEAMHHQDCLLFATSHLISLEVSPPPTLSQNLSGSPLITVHLKHRLTRKQHSEATNSSNRVFVYCAFLDFSSGEGVWSNHGCALTRGNLTYSVCRCTHLTNFAILMQVVPLELARGHQVALSSISYVGCSLSVLCLVATLVTFAVLSSVSTIRNQRYHIHANLSFAVLVAQVLLLISFRLEPGTTPCQVMAVLLHYFFLSAFAWMLVEGLHLYSMVIKVFGSEDSKHRYYYGMGWGFPLLICIISLSFAMDSYGTSNNCWLSLASGAIWAFVAPALFVIVVNIGILIAVTRVISQISADNYKIHGDPSAFKLTAKAVAVLLPILGTSWVFGVLAVNGCAVVFQYMFATLNSLQGLFIFLFHCLLNSEVRAAFKHKTKVWSLTSSSARTSNAKPFHSDLMNGTRPGMASTKLSPWDKSSHSAHRVDLSAV

SEQ ID NO: 46994 - protein, 424 aa, Homo sapiens
MTQAGRRGPGTPEPRPRTQPMASPRLGTFCCPTRDAATQLVLSFQPRAFHALCLGSGGLRLALGLLQLLPGRRPAGPGSPATSPPASVRILRAAAACDLLGCLGMVIRSTVWLGFPNFVDSVSDMNHTEIWPAAFCVGSAMWIQLLYSACFWWLFCYAVDAYLVIRRSAGLSTILLYHIMAWGLATLLCVEGAAMLYYPSVSRCERGLDHAIPHYVTMYLPLLLVLVANPILFQKTVTAVASLLKGRQGIYTENERRMGAVIKIRFFKIMLVLIICWLSNIINESLLFYLEMQTDINGGSLKPVRTAAKTTWFIMGILNPAQGFLLSLAFYGWTGCSLGFQSPRKEIQWESLTTSAAEGAHPSPLMPHENPASGKVSQVGGQTSDEALSMLSEGSDASTIEIHTASESCNKNEGDPALPTHGDL

SEQ ID NO: 46995 - protein, 171 aa, Homo sapiens
MVIRSTVWLGFPNFVDSVSDMNHTEIWPAAFCVGSAMWIQLLYSACFWWLFCYAVDAYLVIRRSAGLSTILLYHIMAWGLATLLCVEGAAMLYYPSVSRCERGLDHAIPHYVTMYLPLLLVLVANPILFQKTVTAVASLLKGRQGIYTENERRMGAVIKIRFFKIMLVLII

SEQ ID NO: 46996 - protein, 287 aa, Homo sapiens
  VARIANT 1: note = MOD_RES - Any amino acid
XTAGPVTGSASRGPARGPKGMVIRSTVWLGFPNFVDSVSDMNHTEIWPAAFCVGSAMWIQLLYSACFWWLFCYAVDAYLVIRRSAGLSTILLYHIMAWGLATLLCVEGAAMLYYPSVSRCERGLDHAIPHYVTMYLPLLLVLVANPILFQKTVTAVASLLKGRQGIYTENERRMGAVIKIRFFKIMLVLIICWLSNIINESLLFYLEMQTDINGGSLKPVRTAAKTTWFIMGILNPAQGFLLSLAFYGWTGCSLGFQSPRKEIQWESLTTSAAEGAHPSPLMPHENP

SEQ ID NO: 46997 - protein, 404 aa, Homo sapiens
MASPRLGTFCCPTRDAATQLVLSFQPRAFHALCLGSGGLRLALGLLQLLPGRRPAGPGSPATSPPASVRILRAAAACDLLGCLGMVIRSTVWLGFPNFVDSVSDMNHTEIWPAAFCVGSAMWIQLLYSACFWWLFCYAVDAYLVIRRSAGLSTILLYHIMAWGLATLLCVEGAAMLYYPSVSRCERGLDHAIPHYVTMYLPLLLVLVANPILFQKTVTAVASLLKGRQGIYTENERRMGAVIKIRFFKIMLVLIICWLSNIINESLLFYLEMQTDINGGSLKPVRTAAKTTWFIMGILNPAQGFLLSLAFYGWTGCSLGFQSPRKEIQWESLTTSAAEGAHPSPLMPHENPASGKVSQVGGQTSDEALSMLSEGSDASTIEIHTASESCNKNEGDPALPTHGDL

SEQ ID NO: 46998 - protein, 360 aa, Homo sapiens
MDPEETSVYLDYYYATSPNSDIRETHSHVPYTSVFLPVFYTAVFLTGVLGNLVLMGALHFKPGSRRLIDIFIINLAASDFIFLVTLPLWVDKEASLGLWRTGSFLCKGSSYMISVNMHCSVLLLTCMSVDRYLAIVWPVVSRKFRRTDCAYVVCASIWFISCLLGLPTLLSRELTLIDDKPYCAEKKATPIKLIWSLVALIFTFFVPLLSIVTCYCCIARKLCAHYQQSGKHNKKLKKSIKIIFIVVAAFLVSWLPFNTFKFLAIVSGLRQEHYLPSAILQLGMEVSGPLAFANSCVNPFIYYIFDSYIRRAIVHCLCPCLKNYDFGSSTETSDSHLTKALSTFIHAEDFARRRKRSVSL

SEQ ID NO: 46999 - protein, 609 aa, Homo sapiens
MSDERRLPGSAVGWLVCGGLSLLANAWGILSVGAKQKKWKPLEFLLCTLAATHMLNVAVPIATYSVVQLRRQRPDFEWNEGLCKVFVSTFYTLTLATCFSVTSLSYHRMWMVCWPVNYRLSNAKKQAVHTVMGIWMVSFILSALPAVGWHDTSERFYTHGCRFIVAEIGLGFGVCFLLLVGGSVAMGVICTAIALFQTLAVQVGRQADRRAFTVPTIVVEDAQGKRRSSIDGSEPAKTSLQTTGLVTTIVFIYDCLMGFPVLVVSFSSLRADASAPWMALCVLWCSVAQALLLPVFLWACDRYRADLKAVREKCMALMANDEESDDETSLEGGISPDLVLERSLDYGYGGDFVALDRMAKYEISALEGGLPQLYPLRPLQEDKMQYLQVPPTRRFSHDDADVWAAVPLPAFLPRWGSGEDLAALAHLVLPAGPERRRASLLAFAEDAPPSRARRRSAESLLSLRPSALDSGPRGARDSPPGSPRRRPGPGPRSASASLLPDAFALTAFECEPQALRRPPGPFPAAPAAPDGADPGEAPTPPSSAQRSPGPRPSAHSHAGSLRPGLSASWGEPGGLRAAGGGGSTSSFLSSPSESSGYATLHSDSLGSAS

SEQ ID NO: 47000 - protein, 814 aa, Homo sapiens
MEPEINCSELCDSFPGQELDRRPLHDLCKTTITSSHHSSKTISSLSPVLLGIVWTFLSCGLLLILFFLAFTIHCRKNRIVKMSSPNLNIVTLLGSCLTYSSAYLFGIQDVLVGSSMETLIQTRLSMLCIGTSLVFGPILGKSWRLYKVFTQRVPDKRVIIKDLQLLGLVAALLMADVILLMTWVLTDPIQCLQILSVSMTVTGKDVSCTSTSTHFCASRYSDVWIALIWGCKGLLLLYGAYLAGLTGHVSSPPVNQSLTIMVGVNLLVLAAGLLFVVTRYLHSWPNLVFGLTSGGIFVCTTTINCFIFIPQLKQWKAFEEENQTIRRMAKYFSTPNKSFHTQYGEEENCHPRGEKSSMERLLTEKNAVIESLQEQVNNAKEKIVRLMSAECTYDLPEGAAPPASSPNKDVQAVASVHTLAAAQGPSGHLSDFQNDPGMAARDSQCTSGPSSYAQSLEGPGKDSSFSPGKEEKISDSKDFSDHLDSGCSQKPWTEQSLGPERGDQVPMNPSQSLLPERGGSDPQRQRHLENSEEPPERRSRVSSVIREKLQEVLQDLGLGPEASLSTAPSCHQQTWKNSAAFSPQKMPLSKELGFSPYMVRRRRAAQRARSHFPGSAPSSVGHRANRTVPGAHSRLHVQNGDSPSLAPQTTDSRVRRPSSRKPSLPSDPQDRPGTLEGSKQSQTEPEGARGSKAAFLRQPSGSGRAPSPAAPCLSKASPDLPEQWQLWPPVPSGCASLSSQHSYFDTESSSSDEFFCRCHRPYCEICFQSSSDSSDSGTSDTDPEPTGGLASWEKLWARSKPIVNFKDDLKPTLV

SEQ ID NO: 47001 - protein, 814 aa, Homo sapiens; identical to SEQ ID NO: 47000

SEQ ID NO: 47002 - protein, 810 aa, Homo sapiens
MEPEINCSELCDSFPGQELDRRPLHDLCKTTITSSHHSSKTISSLSPVLLGIVWTFLSCGLLLILFFLAFTIHCRKNRIVKMSSPNLNIVTLLGSCLTYSSAYLFGIQDVLVGSSMETLIQTRLSMLCIGTSLVFGPILGKSWRLYKVFTQRVPDKRVIIKDLQLLGLVAALLMADVILLMTWVLTDPIQCLQILSVTGKDVSCTSTSTHFCASRYSDVWIALIWGCKGLLLLYGAYLAGLTGHVSSPPVNQSLTIMVGVNLLVLAAGLLFVVTRYLHSWPNLVFGLTSGGIFVCTTTINCFIFIPQLKQWKAFEEENQTIRRMAKYFSTPNKSFHTQYGEEENCHPRGEKSSMERLLTEKNAVIESLQEQVNNAKEKIVRLMSAECTYDLPEGAAPPASSPNKDVQAVASVHTLAAAQGPSGHLSDFQNDPGMAARDSQCTSGPSSYAQSLEGPGKDSSFSPGKEEKISDSKDFSDHLDSGCSQKPWTEQSLGPERGDQVPMNPSQSLLPERGGSDPQRQRHLENSEEPPERRSRVSSVIREKLQEVLQDLGLGPEASLSTAPSCHQQTWKNSAAFSPQKMPLSKELGFSPYMVRRRRAAQRARSHFPGSAPSSVGHRANRTVPGAHSRLHVQNGDSPSLAPQTTDSRVRRPSSRKPSLPSDPQDRPGTLEGSKQSQTEPEGARGSKAAFLRQPSGSGRAPSPAAPCLSKASPDLPEQWQLWPPVPSGCASLSSQHSYFDTESSSSDEFFCRCHRPYCEICFQSSSDSSDSGTSDTDPEPTGGLASWEKLWARSKPIVNFKDDLKPTLV

SEQ ID NO: 47003 - protein, 529 aa, Homo sapiens
MSLNSSLSCRKELSNLTEEEGGEGGVIITQFIAIIVITIFVCLGNLVIVVTLYKKSYLLTLSNKFVFSLTLSNFLLSVLVLPFVVTSSIRREWIFGVVWCNFSALLYLLISSASMLTLGVIAIDRYYAVLYPMVYPMKITGNRAVMALVYIWLHSLIGCLPPLFGWSSVEFDEFKWMCVAAWHREPGYTAFWQIWCALFPFLVMLVCYGFIFRVARVKARKVHCGTVVIVEEDAQRTGRKNSSTSTSSSGSRRNAFQGVVYSANQCKALITILVVLGAFMVTWGPYMVVIASEALWGKSSVSPSLETWATWLSFASAVCHPLIYGLWNKTVRKELLGMCFGDRYYREPFVQRQRTSRLFSISNRITDLGLSPHLTALMAGGQPLGHSSSTGDTGFSCSQDSGTDMMLLEDYTSDDNPPSHCTCPPKRRSSVTFEDEVEQIKEAAKNSILHVKAEVHKSLDSYAASLAKAIEAEAKINLFGEEALPGVLVTARTVPGGGFGGRRGSRTLVSQRLQLQSIEEGDVLAAEQR

SEQ ID NO: 47004 - protein, 529 aa, Homo sapiens; identical to SEQ ID NO: 47003

SEQ ID NO: 47005 - protein, 529 aa, Homo sapiens; identical to SEQ ID NO: 47003

SEQ ID NO: 47006 - protein, 529 aa, Homo sapiens; identical to SEQ ID NO: 47003

SEQ ID NO: 47007 - protein, 549 aa, Homo sapiens
MSARGVVQHALPTPRRGALTMSLNSSLSCRKELSNLTEEEGGEGGVIITQFIAIIVITIFVCLGNLVIVVTLYKKSYLLTLSNKFVFSLTLSNFLLSVLVLPFVVTSSIRREWIFGVVWCNFSALLYLLISSASMLTLGVIAIDRYYAVLYPMVYPMKITGNRAVMALVYIWLHSLIGCLPPLFGWSSVEFDEFKWMCVAAWHREPGYTAFWQIWCALFPFLVMLVCYGFIFRVARVKARKVHCGTVVIVEEDAQRTGRKNSSTSTSSSGSRRNAFQGVVYSANQCKALITILVVLGAFMVTWGPYMVVIASEALWGKSSVSPSLETWATWLSFASAVCHPLIYGLWNKTVRKELLGMCFGDRYYREPFVQRQRTSRLFSISNRITDLGLSPHLTALMAGGQPLGHSSSTGDTGFSCSQDSGTDMMLLEDYTSDDNPPSHCTCPPKRRSSVTFEDEVEQIKEAAKNSILHVKAEVHKSLDSYAASLAKAIEAEAKINLFGEEALPGVLVTARTVPGGGFGGRRGSRTLVSQRLQLQSIEEGDVLAAEQR

SEQ ID NO: 47008 - protein, 451 aa, Homo sapiens
MGGRRCVPGTLPMRAAPPGAKRLHVPLRAKGVGRSGHAPRLESVRTSYYAVLYPMVYPMKITGNRAVMALVYIWLHSLIGCLPPLFGWSSVEFDEFKWMCVAAWHREPGYTAFWQIWCALFPFLVMLVCYGFIFRVARVKARKVHCGTVVIVEEDAQRTGRKNSSTSTSSSGSRRNAFQGVVYSANQCKALITILVVLGAFMVTWGPYMVVIASEALWGKSSVSPSLETWATWLSFASAVCHPLIYGLWNKTVRKELLGMCFGDRYYREPFVQRQRTSRLFSISNRITDLGLSPHLTALMAGGQPLGHSSSTGDTGFSCSQDSGTDMMLLEDYTSDDNPPSHCTCPPKRRSSVTFEDEVEQIKEAAKNSILHVKAEVHKSLDSYAASLAKAIEAEAKINLFGEEALPGVLVTARTVPGGGFGGRRGSRTLVSQRLQLQSIEEGDVLAAEQR

SEQ ID NO: 47009 - protein, 415 aa, Homo sapiens
MLVPVGWMNESYYAVLYPMVYPMKITGNRAVMALVYIWLHSLIGCLPPLFGWSSVEFDEFKWMCVAAWHREPGYTAFWQIWCALFPFLVMLVCYGFIFRVARVKARKVHCGTVVIVEEDAQRTGRKNSSTSTSSSGSRRNAFQGVVYSANQCKALITILVVLGAFMVTWGPYMVVIASEALWGKSSVSPSLETWATWLSFASAVCHPLIYGLWNKTVRKELLGMCFGDRYYREPFVQRQRTSRLFSISNRITDLGLSPHLTALMAGGQPLGHSSSTGDTGFSCSQDSGTDMMLLEDYTSDDNPPSHCTCPPKRRSSVTFEDEVEQIKEAAKNSILHVKAEVHKSLDSYAASLAKAIEAEAKINLFGEEALPGVLVTARTVPGGGFGGRRGSRTLVSQRLQLQSIEEGDVLAAEQR

SEQ ID NO: 47010 - protein, 367 aa, Homo sapiens
MSKRSWWAGSRKPPREMLKLSGSDSSQSMNGLEVAPPGLITNFSLATAEQCGQETPLENMLFASFYLLDFILALVGNTLALWLFIRDHKSGTPANVFLMHLAVADLSCVLVLPTRLVYHFSGNHWPFGEIACRLTGFLFYLNMYASIYFLTCISADRFLAIVHPVKSLKLRRPLYAHLACAFLWVVVAVAMAPLLVSPQTVQTNHTVVCLQLYREKASHHALVSLAVAFTFPFITTVTCYLLIIRSLRQGLRVEKRLKTKAVRMIAIVLAIFLVCFVPYHVNRSVYVLHYRSHGASCATQRILALANRITSCLTSLNGALDPIMYFFVAEKFRHALCNLLCGKRLKGPPPSFEGKTNESSLSAKSEL

SEQ ID NO: 47011 - protein, 103 aa, Homo sapiens
MNGLEVAPPGLITNFSLATAEQCGQETPLENMLFASFYLPLPRQPRMCTVTGLTAGSTARSKQHLEVVFAVLPAFKLQRGRRERTSKPPIIPMSSPGPCWVRT

SEQ ID NO: 47012 - protein, 367 aa, Homo sapiens; identical to SEQ ID NO: 47010

SEQ ID NO: 47013 - protein, 136 aa, Homo sapiens
MSKRSWWAGSRKPPREMLKLSGSDSSQSMNGLEVAPPGLITNFSLATAEQCGQETPLENMLFASFYLLDFILALVGNTLALWLFIRDHKSGTPANVFLMHLAVADLSCVLVLPTRLVYHFSGNHWPFGEIACRLTG

SEQ ID NO: 47014 - protein, 367 aa, Homo sapiens; identical to SEQ ID NO: 47010

SEQ ID NO: 47015 - protein, 445 aa, Homo sapiens
MAAPTPARPVLTHLLVALFGMGSWAAVNGIWVELPVVVKELPEGWSLPSYVSVLVALGNLGLLVVTLWRRLAPGKDEQVPIRVVQVLGMVGTALLASLWHHVAPVAGQLHSVAFLALAFVLALACCASNVTFLPFLSHLPPRFLRSFFLGQGLSALLPCVLALVQGVGRLECPPAPINGTPGPPLDFLERFPASTFFWALTALLVASAAAFQGLLLLLPPPPSVPTGELGSGLQVGAPGAEEEVEESSPLQEPPSQAAGTTPGPDPKAYQLLSARSACLLGLLAATNALTNGVLPAVQSFSCLPYGRLAYHLAVVLGSAANPLACFLAMGVLCRSLAGLGGLSLLGVFCGGYLMALAVLSPCPPLVGTSAGVVLVVLSWVLCLGVFSYVKVAASSLLHGGGRPALLAAGVAIQVGSLLGAVAMFPPTSIYHVFHSRKDCADPCDS

SEQ ID NO: 47016 - protein, 445 aa, Homo sapiens; identical to SEQ ID NO: 47015

SEQ ID NO: 47017 - protein, 445 aa, Homo sapiens; identical to SEQ ID NO: 47015

SEQ ID NO: 47018 - protein, 445 aa, Homo sapiens; identical to SEQ ID NO: 47015

SEQ ID NO: 47019 - protein, 445 aa, Homo sapiens; identical to SEQ ID NO: 47015

SEQ ID NO: 47020 - protein, 357 aa, Homo sapiens
MVGTALLASLWHHVAPVAGQLHSVAFLALAFVLALACCASNVTFLPFLSHLPPRFLRSFFLGQGLSALLPCVLALVQGVGRLECPPAPINGTPGPPLDFLERFPASTFFWALTALLVASAAAFQGLLLLLPPPPSVPTGELGSGLQVGAPGAEEEVEESSPLQEPPSQAAGTTPGPDPKAYQLLSARSACLLGLLAATNALTNGVLPAVQSFSCLPYGRLAYHLAVVLGSAANPLACFLAMGVLCRSLAGLGGLSLLGVFCGGYLMALAVLSPCPPLVGTSAGVVLVVLSWVLCLGVFSYVKVAASSLLHGGGRPALLAAGVAIQVGSLLGAVAMFPPTSIYHVFHSRKDCADPCDS

SEQ ID NO: 47021 - protein, 448 aa, Homo sapiens
MAAPTLGRLVLTHLLVALFGMGSWAAVNGIWVELPVVVKDLPEGWSLPSYLSVVVALGNLGLLVVTLWRQLAPGKGEQVPIQVVQVLSVVGTALLAPLWHHVAPVAGQLHSVAFLTLALVLAMACCTSNVTFLPFLSHLPPPFLRSFFLGQGLSALLPCVLALVQGVGRLECPPAPTNGTSGPPLDFPERFPASTFFWALTALLVTSAAAFRGLLLLLPSLPSVTTGGSGPELQLGSPGAEEEEKEEEEALPLQEPPSQAAGTIPGPDPEAHQLFSAHGAFLLGLMAFTSAVTNGVLPSVQSFSCLPYGRLAYHLAVVLGSAANPLACFLAMGVLCRSLAGLVGLSLLGMLFGAYLMALAILSPCPPLVGTTAGVVLVVLSWVLCLCVFSYVKVAASSLLHGGGRPALLAAGVAIQVGSLLGAGAMFPPTSIYHVFQSRKDCVDPCGP

SEQ ID NO: 47022 - protein, 448 aa, Homo sapiens; identical to SEQ ID NO: 47021

SEQ ID NO: 47023 - protein, 350 aa, Homo sapiens
MAAPTLGRLVLTHLLVALFGMGSWAAVNGIWVELPVVVKDLPEGWSLPSYLSVVVALGNLGLLVVTLWRQLAPGKGEQVPIQVVQVLSVVGTALLAPLWHHVAPVAGQLHSVAFLTLALVLAMACCTSNVTFLPFLSHLPPPFLRSFFLGQGLSALLPCVLALVQGVGRLECPPAPTNGTSGPPLDFPERFPASTFFWALTALLVTSAAAFRGLLLLLPSLPSVTTGGSGPELQLGSPGAEEEEKEEEEALPLQEPPSQAAGTIPGPDPEAHQLFSAHGAFLLGLMAFTSAVTNGVLPSVQSFSCLPYGRLAYHLAVVLGSAANPLACFLAMGVLCRCCRGCCVCVCSHM

SEQ ID NO: 47024 - protein, 470 aa, Homo sapiens
MPAPLLLISRTLGNFMVLWSTCRTTVFKSVTNRFIKNLACSGICASLVCVPFDIILSTSPHCCWWIYTMLFCKVVKFLHKVFCSVTILSFPAIALDRYYSVLYPLERKISDAKSRELVMYIWAHAVVASVPVFAVTNVADIYATSTCTEVWSNSLGHLVYVLVYNITTVIVPVVVVFLFLILIRRALSASQKKKVIIAALRTPQNTISIPYASQREAELHATLLSMVMVFILCSVPYATLVVYQTVLNVPDTSVFLLLTAVWLPKVSLLANPVLFLTVNKSVRKCLIGTLVQLHHRYSRRNVVSTGSGMAEASLEPSIRSGSQLLEMFHIGQQQIFKPTEDEEESEAKYIGSADFQAKEIFSTCLEGEQGPQFAPSAPPLSTVDSVSQVAPAAPVEPETFPDKYSLQFGFGPFELPPQWLSETRNSKKRLLPPLGNTPEELIQTKVPKVGRVERKMSRNNKVSIFPKVDS

SEQ ID NO: 47025 - protein, 515 aa, Homo sapiens
MGHNGSWISPNASEPHNASGAEAAGVNRSALGEFGEAQLYRQFTTTVQVVIFIGSLLGNFMVLWSTCRTTVFKSVTNRFIKNLACSGICASLVCVPFDIILSTSPHCCWWIYTMLFCKVVKFLHKVFCSVTILSFPAIALDRYYSVLYPLERKISDAKSRELVMYIWAHAVVASVPVFAVTNVADIYATSTCTEVWSNSLGHLVYVLVYNITTVIVPVVVVFLFLILIRRALSASQKKKVIIAALRTPQNTISIPYASQREAELHATLLSMVMVFILCSVPYATLVVYQTVLNVPDTSVFLLLTAVWLPKVSLLANPVLFLTVNKSVRKCLIGTLVQLHHRYSRRNVVSTGSGMAEASLEPSIRSGSQLLEMFHIGQQQIFKPTEDEEESEAKYIGSADFQAKEIFSTCLEGEQGPQFAPSAPPLSTVDSVSQVAPAAPVEPETFPDKYSLQFGFGPFELPPQWLSETRNSKKRLLPPLGNTPEELIQTKVPKVGRVERKMSRNNKVSIFPKVDS

SEQ ID NO: 47026 - protein, 515 aa, Homo sapiens; identical to SEQ ID NO: 47025

SEQ ID NO: 47027 - protein, 331 aa, Homo sapiens
MITLNNQDQPVPFNSSHPDEYKIAALVFYSCIFIIGLFVNITALWVFSCTTKKRTTVTIYMMNVALVDLIFIMTLPFRMFYYAKDEWPFGEYFCQILGALTVFYPSIALWLLAFISADRYMAIVQPKYAKELKNTCKAVLACVGVWIMTLTTTTPLLLLYKDPDKDSTPATCLKISDIIYLKAVNVLNLTRLTFFFLIPLFIMIGCYLVIIHNLLHGRTSKLKPKVKEKSIRIIITLLVQVLVCFMPFHICFAFLMLGTGENSYNPWGAFTTFLMNLSTCLDVILYYIVSKQFQARVISVMLYRNYLRSMRRKSFRSGSLRSLSNINSEML

SEQ ID NO: 47028 - protein, 331 aa, Homo sapiens; identical to SEQ ID NO: 47027

SEQ ID NO: 47029 - protein, 331 aa, Homo sapiens; identical to SEQ ID NO: 47027

SEQ ID NO: 47030 - protein, 98 aa, Homo sapiens
MITLNNQDQPVPFNSSHPDEYKIAALVFYSCIFIIGLFVNITALWVFSCTTKKRTTVTIYMMNVALVDLIFIMTLPFRMFYYAKDEWPFGEYFCQILG

SEQ ID NO: 47031 - protein, 361 aa, Homo sapiens [sequence omitted]

SEQ ID NO: 47032 - protein, 415 aa, Homo sapiens
MVFAHRMDNSKPHLIIPTLLVPLQNRSCTETATPLPSQYLMELSEEHSWMSNQTDLHYVLKPGEVATASIFFGILWLFSIFGNSLVCLVIHRSRRTQSTTNYFVVSMACADLLISVASTPFVLLQFTTGRWTLGSATCKVVRYFQYLTPGVQIYVLLSICIDRFYTIVYPLSFKVSREKAKKMIAASWVFDAGFVTPVLFFYGSNWDSHCNYFLPSSWEGTAYTVIHFLVGFVIPSVLIILFYQKVIKYIWRIGTDGRTVRRTMNIVPRTKVKTIKMFLILNLLFLLSWLPFHVAQLWHPHEQDYKKSSLVFTAITWISFSSSASKPTLYSIYNANFRRGMKETFCMSSMKCYRSNAYTITTSSRMAKKNYVGISEIPSMAKTITKDSIYDSFDREAKEKKLAWPINSNPPNTFV

SEQ ID NO: 47033 - protein, 415 aa, Homo sapiens; identical to SEQ ID NO: 47032

SEQ ID NO: 47034 - protein, 59 aa, Homo sapiens
MVFAHRMDNSKPHLIIPTLLVPLQNRSCTETATPLPSQYLMELSEEHSWMSNQTDLHYV

SEQ ID NO: 47035 - protein, 358 aa, Homo sapiens
MPSVSPAGPSAGAVPNATAVTTVRTNASGLEVPLFHLFARLDEELHGTFPGLWLALMAVHGAIFLAGLVLNGLALYVFCCRTRAKTPSVIYTINLVVTDLLVGLSLPTRFAVYYGARGCLRCAFPHVLGYFLNMHCSILFLTCICVDRYLAIVRPEGSRRCRQPACARAVCAFVWLAAGAVTLSVLGVTGSRPCCRVFALTVLEFLLPLLVISVFTGRIMCALSRPGLLHQGRQRRVRAMQLLLTVLIIFLVCFTPFHARQVAVALWPDMPHHTSLVVYHVAVTLSSLNSCMDPIVYCFVTSGFQATVRGLFGQHGEREPSSGDVVSMHRSSKGSGRHHILSAGPHALTQALANGPEA

SEQ ID NO: 47036 - protein, 349 aa, Homo sapiens
MNSTLDGNQSSHPFCLLAFGYLETVNFCLLEVLIIVFLTVLIISGNIIVIFVFHCAPLLNHHTTSYFIQTMAYADLFVGVSCVVPSLSLLHHPLPVEESLTCQIFGFVVSVLKSVSMASLACISIDRYIAITKPLTYNTLVTPWRLRLCIFLIWLYSTLVFLPSFFHWGKPGYHGDVFQWCAESWHTDSYFTLFIVMMLYAPAALIVCFTYFNIFRICQQHTKDISERQARFSSQSGETGEVQACPDKRYAMVLFRITSVFYILWLPYIIYFLLESSTGHSNRFASFLTTWLAISNSFCNCVIYSLSNSVFQRGLKRLSGAMCTSCASQTTANDPYTVRSKGPLNGCHI

SEQ ID NO: 47037 - protein, 250 aa, Homo sapiens [sequence omitted]

SEQ ID NO: 47038 - protein, 433 aa, Homo sapiens
MCFSPILEINMQSESNITVRDDIDDINTNMYQPLSYPLSFQVSLTGFLMLEIVLGLGSNLTVLVLYCMKSNLINSVSNIITMNLHVLDVIICVGCIPLTIVILLLSLESNTALICCFHEACVSFASVSTAINVFAITLDRYDISVKPANRILTMGRAVMLMISIWIFSFFSFLIPFIEVNFFSLQSGNTWENKTLLCVSTNEYYTELGMYYHLLVQIPIFFFTVVVMLITYTKILQALNIRIGTRFSTGQKKKARKKKTISLTTQHEATDMSQSSGGRNVVFGVRTSVSVIIALRRAVKRHRERRERQKRVFRMSLLIISTFLLCWTPISVLNTTILCLGPSDLLVKLRLCFLVMAYGTTIFHPLLYAFTRQKFQKVLKSKMKKRVVSIVEADPLPNNAVIHNSWIDPKRNKKITFEDSEIREKCLVPQVVTD

SEQ ID NO: 47039 - protein, 361 aa, Homo sapiens
MAPTEPWSPSPGSAPWDYSGLDGLEELELCPAGDLPYGYVYIPALYLAAFAVGLLGNAFVVWLLAGRRGPRRLVDTFVLHLAAADLGFVLTLPLWAAAAALGGRWPFGDGLCKLSSFALAGTRCAGALLLAGMSVDRYLAVVKLLEARPLRTPRCALASCCGVWAVALLAGLPSLVYRGLQPLPGGQDSQCGEEPSHAFQGLSLLLLLLTFVLPLVVTLFCYCRISRRLRRPPHVGRARRNSLRIIFAIESTFVGSWLPFSALRAVFHLARLGALPLPCPLLLALRWGLTIATCLAFVNSCANPLIYLLLDRSFRARALDGACGRTGRLARRISSASSLSRDDSSVFRCRAQAANTASASW

SEQ ID NO: 47040 - protein, 337 aa, Homo sapiens
MNSWDAGLAGLLVGTMGVSLLSNALVLLCLLHSADIRRQAPALFTLNLTCGNLLCTVVNMPLTLAGVVAQRQPAGDRLCRLAAFLDTFLAANSMLSMAALSIDRWVAVVFPLSYRAKMRLRDAALMVAYTWLHALTFPAAALALSWLGFHQLYASCTLCSRRPDERLRFAVFTGAFHALSFLLSFVVLCCTYLKVLKVARFHCKRIDVITMQTLVLLVDLHPSVRERCLEEQKRRRQRATKKISTFIGTFLVCFAPYVITRLVELFSTVPIGSHWGVLSKCLAYSKAASDPFVYSLLRHQYRKSCKEILNRLLHRRSIHSSGLTGDSHSQNILPVSE

SEQ ID NO: 47041 - protein, 375 aa, Homo sapiens
MANASEPGGSGGGEAAALGLKLATLSLLLCVSLAGNVLFALLIVRERSLHRAPYYLLLDLCLADGLRALACLPAVMLAARRAAAAAGAPPGALGCKLLAFLAALFCFHAAFLLLGVGVTRYLAIAHHRFYAERLAGWPCAAMLVCAAWALALAAAFPPVLDGGGDDEDAPCALEQRPDGAPGALGFLLLLAVVVGATHLVYLRLLFFIHDRRKMRPARLVPAVSHDWTFHGPGATGQAAANWTAGFGRGPTPPALVGIRPAGPGRGARRLLVLEEFKTEKRLCKMFYAVTLLFLLLWGPYVVASYLRVLVRPGAVPQAYLTASVWLTFAQAGINPVVCFLFNRELRDCFRAQFPCCQSPRTTQATHPCDLKGIGL

SEQ ID NO: 47042 - protein, 330 aa, Homo sapiens
MMWGAGSPLAWLSAGSGNVNVSSVGPAEGPTGPAAPLPSPKAWDVVLCISGTLVSCENALVVAIIVGTPAFRAPMFLLVGSLAVADLLAGLGLVLHFAAVFCIGSAEMSLVLVGVLAMAFTASIGSLLAITVDRYLSLYNALTYYSETTVTRTYVMLALVWGGALGLGLLPVLAWNCLDGLTTCGVVYPLSKNHLVVLAIAFFMVFGIMLQLYAQICRIVCRHAQQIALQRHLLPASHYVATRKGIATLAVVLGAFAACWLPFTVYCLLGDAHSPPLYTYLTLLPATYNSMINPIIYAFRNQDVQKVLWAVCCCCSSSKIPFRSRSPSDV

SEQ ID NO: 47043 - protein, 319 aa, Homo sapiens
MPFPNCSAPSTVVATAVGVLLGLECGLGLLGNAVALWTFLFRVRVWKPYAVYLLNLALADLLLAACLPFLAAFYLSLQAWHLGRVGCWALHFLLDLSRSVGMAFLAAVALDRYLRVVHPRLKVNLLSPQAALGVSGLVWLLMVALTCPGLLISEAAQNSTRCHSFYSRADGSFSIIWQEALSCLQFVLPFGLIVFCNAGIIRALQKRLREPEKQPKLQRAQALVTLVVVLFALCFLPCFLARVLMHIFQNLGSCRALCAVAHTSDVTGSLTYLHSVLNPVVYCFSSPTFRSSYRRVFHTLRGKGQAAEPPDFNPRDSYS

SEQ ID NO: 47044 - protein, 356 aa, Homo sapiens
MNGVSEGTRGCSDRQPGVLTRDRSCSRKMNSSGCLSEEVGSLRPLTVVILSASIVVGVLGNGLVLWMTVFRMARTVSTVCFFHLALADFMLSLSLPIAMYYIVSRQWLLGEWACKLYITFVFLSYFASNCLLVFISVDRCISVLYPVWALNHRTVQRASWLAFGVWLLAAALCSAHLKFRTTRKWNGCTHCYLAFNSDNETAQIWIEGVVEGHIIGTIGHFLLGFLGPLAIIGTCAHLIRAKLLREGWVHANRPKRLLLVLVSAFFIFWSPFNVVLLVHLWRRVMLKEIYHPRMLLILQASFALGCVNSSLNPFLYVFVGRDFQEKFFQSLTSALARAFGEEEFLSSCPRGNAPRE

SEQ ID NO: 47045 - protein, 381 aa, Homo sapiens
MRSHTITMTTTSVSSWPYSSHRMRFITNHSDQPPQNFSATPNVTTCPMDEKLLSTVLTTSYSVIFIVGLVGNIIALYVFLGIHRKRNSIQIYLLNVAIADLLLIFCLPFRIMYHINQNKWTLGVILCKVVGTLFYMNMYISIILLGFISLDRYIKINRSIQQRKAITTKQSIYVCCIVWMLALGGFLTMIILTLKKGGHNSTMCFHYRDKHNAKGEAIFNFILVVMFWLIFLLIILSYIKIGKNLLRISKRRSKFPNSGKYATTARNSFIVLIIFTICFVPYHAFRFIYISSQLNVSSCYWKEIVHKTNEIMLVLSSFNSCLDPVMYFLMSSNIRKIMCQLLFRRFQGEPSRSESTSEFKPGYSLHDTSVAVKIQSSSKST

SEQ ID NO: 47046 - protein, 381 aa, Homo sapiens; identical to SEQ ID NO: 47045

SEQ ID NO: 47047 - protein, 334 aa, Homo sapiens
MDEKLLSTVLTTSYSVIFIVGLVGNIIALYVFLGIHRKRNSIQIYLLNVAIADLLLIFCLPFRIMYHINQNKWTLGVILCKVVGTLFYMNMYISIILLGFISLDRYIKINRSIQQRKAITTKQSIYVCCIVWMLALGGFLTMIILTLKKGGHNSTMCFHYRDKHNAKGEAIFNFILVVMFWLIFLLIILSYIKIGKNLLRISKRRSKFPNSGKYATTARNSFIVLIIFTICFVPYHAFRFIYISSQLNVSSCYWKEIVHKTNEIMLVLSSFNSCLDPVMYFLMSSNIRKIMCQLLFRRFQGEPSRSESTSEFKPGYSLHDTSVAVKIQSSSKST

SEQ ID NO: 47048 - protein, 309 aa, Homo sapiens
MNGTYNTCGSSDLTWPPAIKLGFYAYLGVLLVLGLLLNSLALWVFCCRMQQWTETRIYMTNLAVADLCLLCTLPFVLHSLRDTSDTPLCQLSQGIYLTNRYMSISLVTAIAVDRYVAVRHPLRARGLRSPRQAAAVCAVLWVLVIGSLVARWLLGIQEGGFCFRSTRHNFNSMAFPLLGFYLPLAVVVFCSLKVVTALAQRPPTDVGQAEATRKAARMVWANLLVFVVCFLPLHVGLTVRLAVGWNACALLETIRRALYITSKLSDANCCLDAICYYYMAKEFQEASALAVAPSAKAHKSQDSLCVTLA

SEQ ID NO: 47049 - protein, 309 aa, Homo sapiens; identical to SEQ ID NO: 47048

SEQ ID NO: 47050 - protein, 309 aa, Homo sapiens; identical to SEQ ID NO: 47048

SEQ ID NO: 47051 - protein, 309 aa, Homo sapiens; identical to SEQ ID NO: 47048

SEQ ID NO: 47052 - protein, 340 aa, Homo sapiens
MLSGSRAVPTPHRGSEELLKYMLHSPCVSLTMNGTYNTCGSSDLTWPPAIKLGFYAYLGVLLVLGLLLNSLALWVFCCRMQQWTETRIYMTNLAVADLCLLCTLPFVLHSLRDTSDTPLCQLSQGIYLTNRYMSISLVTAIAVDRYVAVRHPLRARGLRSPRQAAAVCAVLWVLVIGSLVARWLLGIQEGGFCFRSTRHNFNSMAFPLLGFYLPLAVVVFCSLKVVTALAQRPPTDVGQAEATRKAARMVWANLLVFVVCFLPLHVGLTVRLAVGWNACALLETIRRALYITSKLSDANCCLDAICYYYMAKEFQEASALAVAPSAKAHKSQDSLCVTLA

SEQ ID NO: 47053 - protein, 613 aa, Homo sapiens
MRAPGALLARMSRLLLLLLLKVSASSALGVAPASRNETCLGESCAPTVIQRRGRDAWGPGNSARDVLRARAPREEQGAAFLAGPSWDLPAAPGRDPAAGRGAEASAAGPPGPPTRPPGPWRWKGARGQEPSETLGRGNPTALQLFLQISEEEEKGPRGAGISGRSQEQSVKTVPGASDLFYWPRRAGKLQGSHHKPLSKTANGLAGHEGWTIALPGRALAQNGSLGEGIHEPGGPRRGNSTNRRVRLKNPFYPLTQESYGAYAVMCLSVVIFGTGIIGNLAVMCIVCHNYYMRSISNSLLANLAFWDFLIIFFCLPLVIFHELTKKWLLEDFSCKIVPYIEVASLGVTTFTLCALCIDRFRAATNVQMYYEMIENCSSTTAKLAVIWVGALLLALPEVVLRQLSKEDLGFSGRAPAERCIIKISPDLPDTIYVLALTYDSARLWWYFGCYFCLPTLFTITCSLVTARKIRKAEKACTRGNKRQIQLESQMNCTVVALTILYGFCIIPENICNIVTAYMATGVSQQTMDLLNIISQFLLFFKSCVTPVLLFCLCKPFSRAFMECCCCCCEECIQKSSTVTSDDNDNEYTTELELSPFSTIRREMSTFASVGTHC

SEQ ID NO: 47054 - protein, 453 aa, Homo sapiens
MASPSLPGSDCSQIIDHSHVPEFEVATWIKITLILVYLIIFVMGLLGNSATIRVTQVLQKKGYLQKEVTDHMVSLACSDILVFLIGMPMEFYSIIWNPLTTSSYTLSCKLHTFLFEACSYATLLHVLTLSFERYIAICHPFRYKAVSGPCQVKLLIGFVWVTSALVALPLLFAMGTEYPLVNVPSHRGLTCNRSSTRHHEQPETSNMSICTNLSSRWTVFQSSIFGAFVVYLVVLLSVAFMCWNMMQVLMKSQKGSLAGGTRPPQLRKSESEESRTARRQTIIFLRLIVVTLAVCWMPNQIRRIMAAAKPKHDWTRSYFRAYMILLPFSETFFYLSSVINPLLYTVSSQQFRRVFVQVLCCRLSLQHANHEKRLRVHAHSTTDSARFVQRPLLFASRRQSSARRTEKIFLSTFQSEAEPQSKSQSLSLESLEPNSGAKPANSAAENGFQEHEV

SEQ ID NO: 47055 - protein, 362 aa, Homo sapiens
MGNHTWEGCHVDSRVDHLFPPSLYIFVIGVGLPTNCLALWAAYRQVQQRNELGVYLMNLSIADLLYICTLPLWVDYFLHHDNWIHGPGSCKLFGFIFYTNIYISIAFLCCISVDRYLAVAHPLRFARLRRVKTAVAVSSVVWATELGANSAPLFHDELFRDRYNHTFCFEKFPMEGWVAWMNLYRVFVGFLFPWALMLLSYRGILRAVRGSVSTERQEKAKIKRLALSLIAIVLVCFAPYHVLLLSRSAIYLGRPWDCGFEERVFSAYHSSLAFTSLNCVADPILYCLVNEGARSDVAKALHNLLRFLASDKPQEMANASLTLETPLTSKRNSTAKAMTGSWAATPPSQGDQVQLKMLPPAQ

SEQ ID NO: 47056 - protein, 346 aa, Homo sapiens
MDTGPDQSYFSGNHWFVFSVYLLTFLVGLPLNLLALVVFVGKLRCRPVAVDVLLLNLTASDLLLLLFLPFRMVEAANGMHWPLPFILCPLSGFIFFTTIYLTALFLAAVSIERFLSVAHPLWYKTRPRLGQAGLVSVACWLLASAHCSVVYVIEFSGDISHSQGTNGTCYLEFWKDQLAILLPVRLEMAVVLFVVPLIITSYCYSRLVWILGRGGSHRRQRRVAGLVAATLLNFLVCFGPYNVSHVVGYICGESPVWRIYVTLLSTLNSCVDPFVYYFSSSGFQADFHELLRRLCGLWGQWQQESSMELKEQKGGEEQRADRPAERKTSEHSQGCGTGGQVACAEN

SEQ ID NO: 47057 - protein, 372 aa, Homo sapiens
MACNSTSLEAYTYLLLNTSNASDSGSTQLPAPLRISLAIVMLLMTVVGFLGNTVVCIIVYQRPAMRSAINLLLATLAFSDIMLSLCCMPFTAVTLITVRWHFGDHFCRLSATLYWFFVLEGVAILLIISVDRFLIIVQRQDKLNPRRAKVIIAVSWVLSFCIAGPSLTGWTLVEVPARAPQCVLGYTELPADRAYVVTLVVAVFFAPFGVMLCAYMCILNTVRKNAVRVHNQSDSLDLRQLTRAGLRRLQRQQQVSVDLSFKTKAFTTILILFVGFSLCWLPHSVYSLLSVFSQRFYCGSSFYATSTCVLWLSYLKSVFNPIVYCWRIKKFREACIELLPQTFQILPKVPERIRRRIQPSTVYVCNENQSAV

SEQ ID NO: 47058 - protein, 617 aa, Homo sapiens
MGPTLAVPTPYGCIGCKLPQPEYPPALIIFMFCAMVITIVVDLIGNSMVILAVTKNKKLRNSGNIFVVSLSVADMLVAIYPYPLMLHAMSIGGWDLSQLQCQMVGFITGLSVVGSIFNIVAIAINRYCYICHSLQYERIFSVRNTCIYLVITWIMTVLAVLPNMYIGTIEYDPRTYTCIFNYLNNPVFTVTIVCIHFVLPLLIVGFCYVRIWTKVLAARDPAGQNPDNQLAEVRNFLTMFVIFLLFAVCWCPINVLTVLVAVSPKEMAGKIPNWLYLAAYFIAYFNSCLNAVIYGLLNENFRREYWTIFHAMRHPIIFFSGLISDIREMQEARTLARARAHARDQAREQDRAHACPAVEETPMNVRNVPLPGDAAAGHPDRASGHPKPHSRSSSAYRKSASTHHKSVFSHSKAASGHLKPVSGHSKPASGHPKSATVYPKPASVHFKADSVHFKGDSVHFKPDSVHFKPASSNPKPITGHHVSAGSHSKSAFSAATSHPKPTTGHIKPATSHAEPTTADYPKPATTSHPKPTAADNPELSASHCPEIPAIAHPVSDDSDLPESASSPAAGPTKPAASQLESDTIADLPDPTVVTTSTNDYHDVVVIDVEDDPDEMAV

SEQ ID NO: 47059 - protein, 194 aa, Homo sapiens
MVILAVTKNKKLRNSGNIFVVSLSVADMLVAIYPYPLMLHAMSIGGWDLSQLQCQMVGFITGLSVVGSIFNIVAIAINRYCYICHSLQYERIFSVRNTCIYLVITWIMTVLAVLPNMYIGTIEYDPRTYTCIFNYLNNPVFTVTIVCIHFVLPLLIVGFCYVRIWTKVLAARDPAGQNPDNQLAEPTSTAASTL

SEQ ID NO: 47060 - protein, 361 aa, Homo sapiens
MNESRWTEWRILNMSSGIVNVSERHSCPLGFGHYSVVDVCIFETVVIVLLTFLIIAGNLTVIFVFHCAPLLHHYTTSYFIQTMAYADLFVGVSCLVPTLSLLHYSTGVHESLTCQVFGYIISVLKSVSMACLACISVDRYLAITKPLSYNQLVTPCRLRICIILIWIYSCLIFLPSFFGWGKPGYHGDIFEWCATSWLTSAYFTGFIVCLLYAPAAFVVCFTYFHIFKICRQHTKEINDRRARFPSHEVDSSRETGHSPDRRYAMVLFRITSVFYMLWLPYIIYFLLESSRVLDNPTLSFLTTWLAISNSFCNCVIYSLSNSVFRLGLRRLSETMCTSCMCVKDQEAQEPKPRKRANSCSI

SEQ ID NO: 47061 - protein, 319 aa, Homo sapiens
MSQQNTSGDCLFDGVNELMKTLQFAVHIPTFVLGLLLNLLAIHGFSTFLKNRWPDYAATSIYMINLAVFDLLLVLSLPFKMVLSQVQSPFPSLCTLVECLYFVSMYGSVFTICFISMDRFLAIRYPLLVSHLRSPRKIFGICCTIWVLVWTGSIPIYSFHGKVEKYMCFHNMSDDTWSAKVFFPLEVFGFLLPMGIMGFCCSRSIHILLGRRDHTQDWVQQKACIYSIAASLAVFVVSFLPVHLGFFLQFLVRNSFIVECRAKQSISFFLQLSMCFSNVNCCLDVFCYYFVIKEFRMNIRAHRPSRVQLVLQDTTISRG

SEQ ID NO: 47062 - protein, 319 aa, Homo sapiens; identical to SEQ ID NO: 47061

SEQ ID NO: 47063 - protein, 242 aa, Homo sapiens
MSQQNTSGDCLFDGVNELMKTLQFAVHIPTFVLGLLLNLLAIHGFSTFLKNRWPDYAATSIYMINLAVFDLLLVLSLPFKMVLSQVQSPFPSLCTLVECLYFVSMYGSVFTICFISMDRFLAIRYPLLVSHLRSPRKIFGICCTIWVLVWTGSIPIYSFHGKVEKYMCFHNMSDDTWSAKVFFPLEVFGFLLPMGIMGFCCSRSIHILLGRRDHTQDWVQQKACIYSIAASLAVFVVSFLPV

SEQ ID NO: 47064 - protein, 319 aa, Homo sapiens; identical to SEQ ID NO: 47061

SEQ ID NO: 47065 - protein, 523 aa, Homo sapiens
MTPQSLLQTTLFLLSLLFLVQGAHGRGHREDFRFCSQQLQSLESKLTSVRFMGDMVSFEEDRINATVWKLQPTAGLQDLHIHSRQEEEQSEIMEYSVLLPRTLFQRTKGRSGEAEKRLLLVDFSSQALFQDKNSSQVLGEKVLGIVVQNTKVANLTEPVVLTFQHQLQPKNVTLQCVFWVEDPTLSSPGHWSSAGCETVRRETQTSCFCNHLTYFAVLMVSSVEVDAVHKHYLSLLSYVGCVVSALACLVTIAAYLCSRVPLPCRRKPRDYTIKVHMNLLLAVFLLDTSFLLSEPVALTGSEAGCRASAIFLHFSLLTCLSWMGLEGYNLYRLVVEVFGTYVPGYLLKLSAMGWGFPIFLVTLVALVDVDNYGPIILAVHRTPEGVIYPSMCWIRDSLVSYITNLGLFSLVFLFNMAMLATMVVQILRLRPHTQKWSHVLTLLGLSLVLGLPWALIFFSFASGTFQLVVLYLFSIITSFQGFLIFIWYWSMRLQARGGPSPLKSNSDSARLPISSGSTSSSRI

SEQ ID NO: 47066 - protein, 693 aa, Homo sapiens
MTPQSLLQTTLFLLSLLFLVQGAHGRGHREDFRFCSQRNQTHRSSLHYKPTPDLRISIENSEEALTVHAPFPAAHPASRSFPDPRGLYHFCLYWNRHAGRLHLLYGKRDFLLSDKASSLLCFQHQEESLAQGPPLLATSVTSWWSPQNISLPSAASFTFSFHSPPHTAAHNASVDMCELKRDLQLLSQFLKHPQKASRRPSAAPASQQLQSLESKLTSVRFMGDMVSFEEDRINATVWKLQPTAGLQDLHIHSRQEEEQSEIMEYSVLLPRTLFQRTKGRSGEAEKRLLLVDFSSQALFQDKNSSQVLGEKVLGIVVQNTKVANLTEPVVLTFQHQLQPKNVTLQCVFWVEDPTLSSPGHWSSAGCETVRRETQTSCFCNHLTYFAVLMVSSVEVDAVHKHYLSLLSYVGCVVSALACLVTIAAYLCSRVPLPCRRKPRDYTIKVHMNLLLAVFLLDTSFLLSEPVALTGSEAGCRASAIFLHFSLLTCLSWMGLEGYNLYRLVVEVFGTYVPGYLLKLSAMGWGFPIFLVTLVALVDVDNYGPIILAVHRTPEGVIYPSMCWIRDSLVSYITNLGLFSLVFLFNMAMLATMVVQILRLRPHTQKWSHVLTLLGLSLVLGLPWALIFFSFASGTFQLVVLYLFSIITSFQGFLIFIWYWSMRLQARGGPSPLKSNSDSARLPISSGSTSSSRI

SEQ ID NO: 47067 - protein, 693 aa, Homo sapiens; identical to SEQ ID NO: 47066

SEQ ID NO: 47068 - protein, 687 aa, Homo sapiens
MTPQSLLQTTLFLLSLLFLVQGAHGRGHREDFRFCSQRNQTHRSSLHYKPTPDLRISIENSEEALTVHAPFPAAHPASRSFPDPRGLYHFCLYWNRHAGRLHLLYGKRDFLLSDKASSLLCFQHQEESLAQGPPLLATSVTSWWSPQNISLPSAASFTFSFHSPPHTAAHNASVDMCELKRDLQLLSQFLKHPQKASRRPSAAPASQQLQSLESKLTSVRFMGDMVSFEEDRINATVWKLQPTAGLQDLHIHSRQEEEQSEIMEYSVLLPRTLFQRTKGRSGEAEKRLLLVDFSSQALFQDKNSSQVLGEKVLGIVVQNTKVANLTEPVVLTFQHQLQPKNVTLQCVFWVEDPTLSSPGHWSSAGCETVRRETQTSCFCNHLTYFAVLMVSSVEVDAVHKHYLSLLSYVGCVVSALACLVTIAAYLCSRRKPRDYTIKVHMNLLLAVFLLDTSFLLSEPVALTGSEAGCRASAIFLHFSLLTCLSWMGLEGYNLYRLVVEVFGTYVPGYLLKLSAMGWGFPIFLVTLVALVDVDNYGPIILAVHRTPEGVIYPSMCWIRDSLVSYITNLGLFSLVFLFNMAMLATMVVQILRLRPHTQKWSHVLTLLGLSLVLGLPWALIFFSFASGTFQLVVLYLFSIITSFQGFLIFIWYWSMRLQARGGPSPLKSNSDSARLPISSGSTSSSRI

SEQ ID NO: 47069 - protein, 693 aa, Homo sapiens; identical to SEQ ID NO: 47066

SEQ ID NO: 47070 - protein, 687 aa, Homo sapiens; identical to SEQ ID NO: 47068

SEQ ID NO: 47071 - protein, 687 aa, Homo sapiens; identical to SEQ ID NO: 47068

SEQ ID NO: 47072 - protein, 512 aa, Homo sapiens
MCELKRDLQLLSQFLKHPQKASRRPSAAPASQQLQSLESKLTSVRFMGDMVSFEEDRINATVWKLQPTAGLQDLHIHSRQEEEQSEIMEYSVLLPRTLFQRTKGRSGEAEKRLLLVDFSSQALFQDKNSSQVLGEKVLGIVVQNTKVANLTEPVVLTFQHQLQPKNVTLQCVFWVEDPTLSSPGHWSSAGCETVRRETQTSCFCNHLTYFAVLMVSSVEVDAVHKHYLSLLSYVGCVVSALACLVTIAAYLCSRRKPRDYTIKVHMNLLLAVFLLDTSFLLSEPVALTGSEAGCRASAIFLHFSLLTCLSWMGLEGYNLYRLVVEVFGTYVPGYLLKLSAMGWGFPIFLVTLVALVDVDNYGPIILAVHRTPEGVIYPSMCWIRDSLVSYITNLGLFSLVFLFNMAMLATMVVQILRLRPHTQKWSHVLTLLGLSLVLGLPWALIFFSFASGTFQLVVLYLFSIITSFQGFLIFIWYWSMRLQARGGPSPLKSNSDSARLPISSGSTSSSRI

SEQ ID NO: 47073 - protein, 687 aa, Homo sapiens; identical to SEQ ID NO: 47068

SEQ ID NO: 47074 - protein, 687 aa, Homo sapiens; identical to SEQ ID NO: 47068

SEQ ID NO: 47075 - protein, 362 aa, Homo sapiens
MNASAASLNDSQVVVVAAEGAAAAATAAGGPDTGEWGPPAAAALGAGGGANGSLELSSQLSAGPPGLLLPAVNPWDVLLCVSGTVIAGENALVVALIASTPALRTPMFVLVGSLATADLLAGCGLILHFVFQYLVPSETVSLLTVGFLVASFAASVSSLLAITVDRYLSLYNALTYYSRRTLLGVHLLLAATWTVSLGLGLLPVLGWNCLAERAACSVVRPLARSHVALLSAAFFMVFGIMLHLYVRICQVVWRHAHQIALQQHCLAPPHLAATRKGVGTLAVVLGTFGASWLPFAIYCVVGSHEDPAVYTYATLLPATYNSMINPIIYAFRNQEIQRALWLLLCGCFQSKVPFRSRSPSEV

SEQ ID NO: 47076 - protein, 377 aa, Homo sapiens
MTLLAWCTRGANPAAMNASAASLNDSQVVVVAAEGAAAAATAAGGPDTGEWGPPAAAALGAGGGANGSLELSSQLSAGPPGLLLPAVNPWDVLLCVSGTVIAGENALVVALIASTPALRTPMFVLVGSLATADLLAGCGLILHFVFQYLVPSETVSLLTVGFLVASFAASVSSLLAITVDRYLSLYNALTYYSRRTLLGVHLLLAATWTVSLGLGLLPVLGWNCLAERAACSVVRPLARSHVALLSAAFFMVFGIMLHLYVRICQVVWRHAHQIALQQHCLAPPHLAATRKGVGTLAVVLGTFGASWLPFAIYCVVGSHEDPAVYTYATLLPATYNSMINPIIYAFRNQEIQRALWLLLCGCFQSKVPFRSRSPSEV

SEQ ID NO: 47077 - protein, 340 aa, Homo sapiens
MNASAASLNDSQVVVVAAEGAAAAATAAGGPDTGEWGPPAAAALGAGGGANGSLELSSQLSAGPPGLLLPAVNPWDVLLCVSGTVIAGENALVVALIASTPALRTPMFVLVGSLATADLLAGCGLILHFVFQYLVPSETVSLLTVGFLVASFAASVSSLLAITVDRYLSLYNALTYYSRRTLLGVHLLLAATWTVSLGLGLLPVLGWNCLAERAACSVVRPLARSHVALLSAAFFMVFGIMLHLYVRICQVVWRHAHQIALQQHCLAPPHLAATRKGVGTLAVVLGTFGASWLPFATYNSMINPIIYAFRNQEIQRALWLLLCGCFQSKVPFRSRSPSEV

SEQ ID NO: 47078 - protein, 579 aa, Homo sapiens
NPRLTVLERVEGYGEQEWQKGDGKGRGEGHSESGVLSGSGSCTSHVSCFLAVTKADPAATSGQKGDELLILQLPGLALCTQTNLPKRLQWEVPPTKPGSLGLGSPSQGRWTRMGDGPQEVPWVPSFGPMESSPIPQSSGNSSTLGRVPQTPGPSTASGVPEVGLRDVASESVALFFMLLLDLTAVAGNAAVMAVIAKTPALRKFVFVFHLCLVDLLAALTLMPLAMLSSSALFDHALFGEVACRLYLFLSVCFVSLAILSVSAINVERYYYVVHPMRYEVRMTLGLVASVLVGVWVKALAMASVPVLGRVSWEEGAPSVPPGCSLQWSHSAYCQLFVVVFAVLYFLLPLLLILVVYCSMFRVARVAAMQHGPLPTWMETPRQRSESLSSRSTMVTSSGAPQTTPHRTFGGGKAAVVLLAVGGQFLLCWLPYFSFHLYVALSAQPISTGQVESVVTWIGYFCFTSNPFFYGCLNRQIRGELSKQFVCFFKPAPEEELRLPSREGSIEENFLQFLQGTGCPSESWVSRPLPSPKQEPPAVDFRIPGQIAEETSEFLEQQLTSDIIMSDSYLRPAASPRLES

SEQ ID NO: 47079 - protein, 451 aa, Homo sapiens
MESSPIPQSSGNSSTLGRVPQTPGPSTASGVPEVGLRDVASESVALFFMLLLDLTAVAGNAAVMAVIAKTPALRKFVFVFHLCLVDLLAALTLMPLAMLSSSALFDHALFGEVACRLYLFLSVCFVSLAILSVSAINVERYYYVVHPMRYEVRMTLGLVASVLVGVWVKALAMASVPVLGRVSWEEGAPSVPPGCSLQWSHSAYCQLFVVVFAVLYFLLPLLLILVVYCSMFRVARVAAMQHGPLPTWMETPRQRSESLSSRSTMVTSSGAPQTTPHRTFGGGKAAVVLLAVGGQFLLCWLPYFSFHLYVALSAQPISTGQVESVVTWIGYFCFTSNPFFYGCLNRQIRGELSKQFVCFFKPAPEEELRLPSREGSIEENFLQFLQGTGCPSESWVSRPLPSPKQEPPAVDFRIPGQIAEETSEFLEQQLTSDIIMSDSYLRPAASPRLES

SEQ ID NO: 47080 - protein, 451 aa, Homo sapiens; identical to SEQ ID NO: 47079

SEQ ID NO: 47081 - protein, 451 aa, Homo sapiens; identical to SEQ ID NO: 47079

SEQ ID NO: 47082 - protein, 368 aa, Homo sapiens
MANSTGLNASEVAGSLGLILAAVVEVGALLGNGALLVVVLRTPGLRDALYLAHLCVVDLLAAASIMPLGLLAAPPPGLGRVRLGPAPCRAARFLSAALLPACTLGVAALGLARYRLIVHPLRPGSRPPPVLVLTAVWAAAGLLGALSLLGTPPAPPPAPARCSVLAGGLGPFRPLWALLAFALPALLLLGAYGGIFVVARRAALRPPRPARGSRLHSDSLDSRLSILPPLRPRLPGGKAALAPALAVGQFAACWLPYGCACLAPAARAAEAEAAVTWVAYSAFAAHPFLYGLLQRPVRLALGRLSRRALPGPVRACTPQAWHPRALLQCLQRPPEGPAVGPSEAPEQTPELAGGRSPAYQGPPESSLS

SEQ ID NO: 47083 - protein, 419 aa, Homo sapiens
MVFSAVLTAFHTGTSNTTFVVYENTYMNITLPPPFQHPDLSPLLRYSFETMAPTGLSSLTVNSTAVPTTPAAFKSLNLPLQITLSAIMIFILFVSFLGNLVVCLMVYQKAAMRSAINILLASLAFADMLLAVLNMPFALVTILTTRWIFGKFFCRVSAMFFWLFVIEGVAILLIISIDRFLIIVQRQDKLNPYRAKVLIAVSWATSFCVAFPLAVGNPDLQIPSRAPQCVFGYTTNPGYQAYVILISLISFFIPFLVILYSFMGILNTLRHNALRIHSYPEGICLSQASKLGLMSLQRPFQMSIDMGFKTRAFTTILILFAVFIVCWAPFTTYSLVATFSKHFYYQHNFFEISTWLLWLCYLKSALNPLIYYWRIKKFHDACLDMMPKSFKFLPQLPGHTKRRIRPSAVYVCGEHRTVV

SEQ ID NO: 47084 - protein, 419 aa, Homo sapiens; identical to SEQ ID NO: 47083

SEQ ID NO: 47085 - protein, 419 aa, Homo sapiens; identical to SEQ ID NO: 47083

SEQ ID NO: 47086 - protein, 443 aa, Homo sapiens
YCCSVLKCLKNSCISACIFHPTETMVFSAVLTAFHTGTSNTTFVVYENTYMNITLPPPFQHPDLSPLLRYSFETMAPTGLSSLTVNSTAVPTTPAAFKSLNLPLQITLSAIMIFILFVSFLGNLVVCLMVYQKAAMRSAINILLASLAFADMLLAVLNMPFALVTILTTRWIFGKFFCRVSAMFFWLFVIEGVAILLIISIDRFLIIVQRQDKLNPYRAKVLIAVSWATSFCVAFPLAVGNPDLQIPSRAPQCVFGYTTNPGYQAYVILISLISFFIPFLVILYSFMGILNTLRHNALRIHSYPEGICLSQASKLGLMSLQRPFQMSIDMGFKTRAFTTILILFAVFIVCWAPFTTYSLVATFSKHFYYQHNFFEISTWLLWLCYLKSALNPLIYYWRIKKFHDACLDMMPKSFKFLPQLPGHTKRRIRPSAVYVCGEHRTVV

SEQ ID NO: 47087 - protein, 898 aa, Homo sapiens
MVFSVRQCGHVGRTEEVLLTFKIFLVIICLHVVLVTSLEEDTDNSSLSPPPEVETTSLNDVTLSLLPSNETGVKPQRNICNLSSICNDSAFFRGEIMFQYDKESTVPQNQHITNGTLTGVLSLSELKRSELNKTLQTLSETYFIMCATAEAQSTLNCTFTIKLNNTMNACAVIAALERVKIRPMEHCCCSVRIPCPSSPEELEKLQCDLQDPIVCLADHPRGPPFSSSQSIPVVPRATVLSQVPKATSFAEPPDYSPVTHNVPSPIGEIQPLSPQPSAPIASSPAIDMPPQSETISSPMPQTHVSGTPPPVKASFSSPTVSAPANVNTTSAPPVQTDIVNTSSISDLENQVLQMEKALSLGSLEPNLAGEMINQVSRLLHSPPDMLAPLAQRLLKVVDDIGLQLNFSNTTISLTSPSLALAVIRVNASSFNTTTFVAQDPANLQDELTVRCVFWDLGRNGGRGGWSDNGCSVKDRRLNETICTCSHLTSFGVLLDLSRTSVLPAQMMALTFITYIGCGLSSIFLSVTLVTYIAFEKIRRDYPSKILIQLCAALLLLNLVFLLDSWIALYKMQGLCISVAVFLHYFLLVSFTWMGLEAFHMYLALVKVFNTYIRKYILKFCIVGWGVPAVVVTIILTISPDNYGLGSYGKFPNGSPDDFCWINNNAVFYITVVGYFCVIFLLNVSMFIVVLVQLCRIKKKKQLGAQRKTSIQDLRSIAGLTFLLGITWGFAFFAWGPVNVTFMYLFAIFNTLQGFFIFIFYCVAKENVRKQWRRYLCCGKLRLAENSDWSKTATNGLKKQTVNQGVSSSSNSLQSSSNSTNSTTLLVNNDCSVHASGNGNASTERNGVSFSVQNGDVCLHDFTGKQHMFNEKEDSCNGKGRMALRRTSKRGSLHFIEQM

SEQ ID NO: 47088 - protein, 1001 aa, Homo sapiens
MVFSVRQCGHVGRTEEVLLTFKIFLVIICLHVVLVTSLEEDTDNSSLSPPPDEETGACSDVTLSLLPSNETEKTKITIVKTFNASGVKPQRNICNLSSICNDSAFFRGEIMFQYDKESTVPQNQHITNGTLTGVLSLSELKRSELNKTLQTLSETYFIMCATAEAQSTLNCTFTIKLNNTMNACAVIAALERVKIRPMEHCCCSVRIPCPSSPEELEKLQCDLQDPIVCLADHPRGPPFSSSQSIPVVPRATVLSQVPKATSFAEPPDYSPVTHNVPSPIGEIQPLSPQPSAPIASSPAIDMPPQSETISSPMPQTHVSGTPPPVKASFSSPTVSAPANVNTTSAPPVQTDIVNTSSISDLENQVLQMEKALSLGSLEPNLAGEMINQVSRLLHSPPDMLAPLAQRLLKVVDDIGLQLNFSNTTISLTSPSLALAVIRVNASSFNTTTFVAQDPANLQVSLETQAPENSIGTITLPSSLMNNLPAHDMELASRVQFNFFETPALFQDPSLENLSLISYVISSSVANLTVRNLTRNVTVTLKHINPSQDELTVRCVFWDLGRNGGRGGWSDNGCSVKDRRLNETICTCSHLTSFGVLLDLSRTSVLPAQMMALTFITYIGCGLSSIFLSVTLVTYIAFEKIRRDYPSKILIQLCAALLLLNLVFLLDSWIALYKMQGLCISVAVFLHYFLLVSFTWMGLEAFHMYLALVKVFNTYIRKYILKFCIVGWGVPAVVVTIILTISPDNYGLGSYGKFPNGSPDDFCWINNNAVFYITVVGYFCVIFLLNVSMFIVVLVQLCRIKKKKQLGAQRKTSIQDLRSIAGLTFLLGITWGFAFFAWGPVNVTFMYLFAIFNTLQGFFIFIFYCVAKENVRKQWRRYLCCGKLRLAENSDWSKTATNGLKKQTVNQGVSSSSNSLQSSSNSTNSTTLLVNNDCSVHASGNGNASTERNGVSFSVQNGDVCLHDFTGKQHMFNEKEDSCNGKGRMALRRTSKRGSLHFIEQM

SEQ ID NO: 47089 - protein, 1003 aa, Homo sapiens
MVFSVRQCGHVGRTEEVLLTFKIFLVIICLHVVLVTSLEEDTDNSSLSPPPAKLSVVSFAPSSNGTPEVETTSLNDVTLSLLPSNETGVKPQRNICNLSSICNDSAFFRGEIMFQYDKESTVPQNQHITNGTLTGVLSLSELKRSELNKTLQTLSETYFIMCATAEAQSTLNCTFTIKLNNTMNACAVIAALERVKIRPMEHCCCSVRIPCPSSPEELEKLQCDLQDPIVCLADHPRGPPFSSSQSIPVVPRATVLSQVPKATSFAEPPDYSPVTHNVPSPIGEIQPLSPQPSAPIASSPAIDMPPQSETISSPMPQTHVSGTPPPVKASFSSPTVSAPANVNTTSAPPVQTDIVNTSSISDLENQVLQMEKALSLGSLEPNLAGEMINQVSRLLHSPPDMLAPLAQRLLKVVDDIGLQLNFSNTTISLTSPSLALAVIRVNASSFNTTTFVAQDPANLQVSLETQAPENSIGTITLPSSLMNNLPAHDMELASRVQFNFFETPALFQDPSLENLSLISYVISSSVANLTVRNLTRNVTVTLKHINPSQDELTVRCVFWDLGRNGGRGGWSDNGCSVKDRRLNETICTCSHLTSFGVLLDLSRTSVLPAQMMALTFITYIGCGLSSIFLSVTLVTYIAFEKIRRDYPSKILIQLCAALLLLNLVFLLDSWIALYKMQGLCISVAVFLHYFLLVSFTWMGLEAFHMYLALVKVFNTYIRKYILKFCIVGWGVPAVVVTIILTISPDNYGLGSYGKFPNGSPDDFCWINNNAVFYITVVGYFCVIFLLNVSMFIVVLVQLCRIKKKKQLGAQRKTSIQDLRSIAGLTFLLGITWGFAFFAWGPVNVTFMYLFAIFNTLQGFFIFIFYCVAKENVRKQWRRYLCCGKLRLAENSDWSKTATNGLKKQTVNQGVSSSSNSLQSSSNSTNSTTLLVNNDCSVHASGNGNASTERNGVSFSVQNGDVCLHDFTGKQHMFNEKEDSCNGKGRMALRRTSKRGSLHFIEQM

SEQ ID NO: 47090 - protein, 987 aa, Homo sapiens
MVFSVRQCGHVGRTEEVLLTFKIFLVIICLHVVLVTSLEEDTDNSSLSPPPEVETTSLNDVTLSLLPSNETGVKPQRNICNLSSICNDSAFFRGEIMFQYDKESTVPQNQHITNGTLTGVLSLSELKRSELNKTLQTLSETYFIMCATAEAQSTLNCTFTIKLNNTMNACAVIAALERVKIRPMEHCCCSVRIPCPSSPEELEKLQCDLQDPIVCLADHPRGPPFSSSQSIPVVPRATVLSQVPKATSFAEPPDYSPVTHNVPSPIGEIQPLSPQPSAPIASSPAIDMPPQSETISSPMPQTHVSGTPPPVKASFSSPTVSAPANVNTTSAPPVQTDIVNTSSISDLENQVLQMEKALSLGSLEPNLAGEMINQVSRLLHSPPDMLAPLAQRLLKVVDDIGLQLNFSNTTISLTSPSLALAVIRVNASSFNTTTFVAQDPANLQVSLETQAPENSIGTITLPSSLMNNLPAHDMELASRVQFNFFETPALFQDPSLENLSLISYVISSSVANLTVRNLTRNVTVTLKHINPSQDELTVRCVFWDLGRNGGRGGWSDNGCSVKDRRLNETICTCSHLTSFGVLLDLSRTSVLPAQMMALTFITYIGCGLSSIFLSVTLVTYIAFEKIRRDYPSKILIQLCAALLLLNLVFLLDSWIALYKMQGLCISVAVFLHYFLLVSFTWMGLEAFHMYLALVKVFNTYIRKYILKFCIVGWGVPAVVVTIILTISPDNYGLGSYGKFPNGSPDDFCWINNNAVFYITVVGYFCVIFLLNVSMFIVVLVQLCRIKKKKQLGAQRKTSIQDLRSIAGLTFLLGITWGFAFFAWGPVNVTFMYLFAIFNTLQGFFIFIFYCVAKENVRKQWRRYLCCGKLRLAENSDWSKTATNGLKKQTVNQGVSSSSNSLQSSSNSTNSTTLLVNNDCSVHASGNGNASTERNGVSFSVQNGDVCLHDFTGKQHMFNEKEDSCNGKGRMALRRTSKRGSLHFIEQM

SEQ ID NO: 47091 - protein, 1014 aa, Homo sapiens
MVFSVRQCGHVGRTEEVLLTFKIFLVIICLHVVLVTSLEEDTDNSSLSPPPAKLSVVSFAPSSNEVETTSLNDVTLSLLPSNETEKTKITIVKTFNASGVKPQRNICNLSSICNDSAFFRGEIMFQYDKESTVPQNQHITNGTLTGVLSLSELKRSELNKTLQTLSETYFIMCATAEAQSTLNCTFTIKLNNTMNACAVIAALERVKIRPMEHCCCSVRIPCPSSPEELEKLQCDLQDPIVCLADHPRGPPFSSSQSIPVVPRATVLSQVPKATSFAEPPDYSPVTHNVPSPIGEIQPLSPQPSAPIASSPAIDMPPQSETISSPMPQTHVSGTPPPVKASFSSPTVSAPANVNTTSAPPVQTDIVNTSSISDLENQVLQMEKALSLGSLEPNLAGEMINQVSRLLHSPPDMLAPLAQRLLKVVDDIGLQLNFSNTTISLTSPSLALAVIRVNASSFNTTTFVAQDPANLQVSLETQAPENSIGTITLPSSLMNNLPAHDMELASRVQFNFFETPALFQDPSLENLSLISYVISSSVANLTVRNLTRNVTVTLKHINPSQDELTVRCVFWDLGRNGGRGGWSDNGCSVKDRRLNETICTCSHLTSFGVLLDLSRTSVLPAQMMALTFITYIGCGLSSIFLSVTLVTYIAFEKIRRDYPSKILIQLCAALLLLNLVFLLDSWIALYKMQGLCISVAVFLHYFLLVSFTWMGLEAFHMYLALVKVFNTYIRKYILKFCIVGWGVPAVVVTIILTISPDNYGLGSYGKFPNGSPDDFCWINNNAVFYITVVGYFCVIFLLNVSMFIVVLVQLCRIKKKKQLGAQRKTSIQDLRSIAGLTFLLGITWGFAFFAWGPVNVTFMYLFAIFNTLQGFFIFIFYCVAKENVRKQWRRYLCCGKLRLAENSDWSKTATNGLKKQTVNQGVSSSSNSLQSSSNSTNSTTLLVNNDCSVHASGNGNASTERNGVSFSVQNGDVCLHDFTGKQHMFNEKEDSCNGKGRMALRRTSKRGSLHFIEQM

SEQ ID NO: 47092 - protein, 995 aa, Homo sapiens
MVFSVRQCGHVGRTEEVLLTFKIFLVIICLHVVLVTSLEEDTDNSSLSPPPAKLSVVSFAPSSNGTPDVTLSLLPSNETGVKPQRNICNLSSICNDSAFFRGEIMFQYDKESTVPQNQHITNGTLTGVLSLSELKRSELNKTLQTLSETYFIMCATAEAQSTLNCTFTIKLNNTMNACAVIAALERVKIRPMEHCCCSVRIPCPSSPEELEKLQCDLQDPIVCLADHPRGPPFSSSQSIPVVPRATVLSQVPKATSFAEPPDYSPVTHNVPSPIGEIQPLSPQPSAPIASSPAIDMPPQSETISSPMPQTHVSGTPPPVKASFSSPTVSAPANVNTTSAPPVQTDIVNTSSISDLENQVLQMEKALSLGSLEPNLAGEMINQVSRLLHSPPDMLAPLAQRLLKVVDDIGLQLNFSNTTISLTSPSLALAVIRVNASSFNTTTFVAQDPANLQVSLETQAPENSIGTITLPSSLMNNLPAHDMELASRVQFNFFETPALFQDPSLENLSLISYVISSSVANLTVRNLTRNVTVTLKHINPSQDELTVRCVFWDLGRNGGRGGWSDNGCSVKDRRLNETICTCSHLTSFGVLLDLSRTSVLPAQMMALTFITYIGCGLSSIFLSVTLVTYIAFEKIRRDYPSKILIQLCAALLLLNLVFLLDSWIALYKMQGLCISVAVFLHYFLLVSFTWMGLEAFHMYLALVKVFNTYIRKYILKFCIVGWGVPAVVVTIILTISPDNYGLGSYGKFPNGSPDDFCWINNNAVFYITVVGYFCVIFLLNVSMFIVVLVQLCRIKKKKQLGAQRKTSIQDLRSIAGLTFLLGITWGFAFFAWGPVNVTFMYLFAIFNTLQGFFIFIFYCVAKENVRKQWRRYLCCGKLRLAENSDWSKTATNGLKKQTVNQGVSSSSNSLQSSSNSTNSTTLLVNNDCSVHASGNGNASTERNGVSFSVQNGDVCLHDFTGKQHMFNEKEDSCNGKGRMALRRTSKRGSLHFIEQM

SEQ ID NO: 47093 - protein, 1017 aa, Homo sapiens
MVFSVRQCGHVGRTEEVLLTFKIFLVIICLHVVLVTSLEEDTDNSSLSPPPAKLSVVSFAPSSNGTPEVETTSLNDVTLSLLPSNETEKTKITIVKTFNASGVKPQRNICNLSSICNDSAFFRGEIMFQYDKESTVPQNQHITNGTLTGVLSLSELKRSELNKTLQTLSETYFIMCATAEAQSTLNCTFTIKLNNTMNACAVIAALERVKIRPMEHCCCSVRIPCPSSPEELEKLQCDLQDPIVCLADHPRGPPFSSSQSIPVVPRATVLSQVPKATSFAEPPDYSPVTHNVPSPIGEIQPLSPQPSAPIASSPAIDMPPQSETISSPMPQTHVSGTPPPVKASFSSPTVSAPANVNTTSAPPVQTDIVNTSSISDLENQVLQMEKALSLGSLEPNLAGEMINQVSRLLHSPPDMLAPLAQRLLKVVDDIGLQLNFSNTTISLTSPSLALAVIRVNASSFNTTTFVAQDPANLQVSLETQAPENSIGTITLPSSLMNNLPAHDMELASRVQFNFFETPALFQDPSLENLSLISYVISSSVANLTVRNLTRNVTVTLKHINPSQDELTVRCVFWDLGRNGGRGGWSDNGCSVKDRRLNETICTCSHLTSFGVLLDLSRTSVLPAQMMALTFITYIGCGLSSIFLSVTLVTYIAFEKIRRDYPSKILIQLCAALLLLNLVFLLDSWIALYKMQGLCISVAVFLHYFLLVSFTWMGLEAFHMYLALVKVFNTYIRKYILKFCIVGWGVPAVVVTIILTISPDNYGLGSYGKFPNGSPDDFCWINNNAVFYITVVGYFCVIFLLNVSMFIVVLVQLCRIKKKKQLGAQRKTSIQDLRSIAGLTFLLGITWGFAFFAWGPVNVTFMYLFAIFNTLQGFFIFIFYCVAKENVRKQWRRYLCCGKLRLAENSDWSKTATNGLKKQTVNQGVSSSSNSLQSSSNSTNSTTLLVNNDCSVHASGNGNASTERNGVSFSVQNGDVCLHDFTGKQHMFNEKEDSCNGKGRMALRRTSKRGSLHFIEQM

SEQ ID NO: 47094 - protein, 966 aa, Homo sapiens
MVFSVRQCGHVGRTEEVLLTFKIFLVIICLHVVLVTSLEEDTDNSSLSPPPAKLSVVSFAPSSNGTPEVETTSLNDVTLSLLPSNETEKTKITIVKTFNASGVKPQRNICNLSSICNDSAFFRGEIMFQYDKESTVPQNQHITNGTLTGVLSLSELKRSELNKTLQTLSETYFIMCATAEAQSTLNCTFTIKLNNTMNACAVIAALERVKIRPMEHCCCSVRIPCPSSPEELEKLQCDLQDPIVCLADHPRGPPFSSSQSIPVVPRATVLSQVPKATSFAEPPDYSPVTHNVPSPIGEIQPLSPQPSAPIASSPAIDMPPQSETISSPMPQTHVSGTPPPVKASFSSPTVSAPANVNTTSAPPVQTDIVNTSSISDLENQVLQMEKALSLGSLEPNLAGEMINQVSRLLHSPPDMLAPLAQRLLKVVDDIGLQLNFSNTTISLTSPSLALAVIRVNASSFNTTTFVAQDPANLQVSLETQAPENSIGTITLPSSLMNNLPAHDMELASRVQFNFFETPALFQDPSLENLSLISYVISSSVANLTVRNLTRNVTVTLKHINPSQDELTVRCVFWDLGRNGGRGGWSDNGCSVKDRRLNETICTCSHLTSFGVLLDLSRTSVLPAQMMALTFITYIGCGLSSIFLSVTLVTYIAFEKIRRDYPSKILIQLCAALLLLNLVFLLDSWIALYKMQGLCISVAVFLHYFLLVSFTWMGLEAFHMYLALVKVFNTYIRKYILKFCIVGWGVPAVVVTIILTISPDNYGLGSYGKFPNGSPDDFCWINNNAVFYITVVGYFCVIFLLNVSMFIVVLVQLCRIKKKKQLGAQRKTSIQDLRSIAGLTFLLGITWGFAFFAWGPVNVTFMYLFAIFNTLQGFFIFIFYCVAKENVRKQWRRYLCCGKLRLAENSGNASTERNGVSFSVQNGDVCLHDFTGKQHMFNEKEDSCNGKGRMALRRTSKRGSLHFIEQM

SEQ ID NO: 47095 - protein, 993 aa, Homo sapiens
MVFSVRQCGHVGRTEEVLLTFKIFLVIICLHVVLVTSLEEDTDNSSLSPPPDVTLSLLPSNETEKTKITIVKTFNASGVKPQRNICNLSSICNDSAFFRGEIMFQYDKESTVPQNQHITNGTLTGVLSLSELKRSELNKTLQTLSETYFIMCATAEAQSTLNCTFTIKLNNTMNACAVIAALERVKIRPMEHCCCSVRIPCPSSPEELEKLQCDLQDPIVCLADHPRGPPFSSSQSIPVVPRATVLSQVPKATSFAEPPDYSPVTHNVPSPIGEIQPLSPQPSAPIASSPAIDMPPQSETISSPMPQTHVSGTPPPVKASFSSPTVSAPANVNTTSAPPVQTDIVNTSSISDLENQVLQMEKALSLGSLEPNLAGEMINQVSRLLHSPPDMLAPLAQRLLKVVDDIGLQLNFSNTTISLTSPSLALAVIRVNASSFNTTTFVAQDPANLQVSLETQAPENSIGTITLPSSLMNNLPAHDMELASRVQFNFFETPALFQDPSLENLSLISYVISSSVANLTVRNLTRNVTVTLKHINPSQDELTVRCVFWDLGRNGGRGGWSDNGCSVKDRRLNETICTCSHLTSFGVLLDLSRTSVLPAQMMALTFITYIGCGLSSIFLSVTLVTYIAFEKIRRDYPSKILIQLCAALLLLNLVFLLDSWIALYKMQGLCISVAVFLHYFLLVSFTWMGLEAFHMYLALVKVFNTYIRKYILKFCIVGWGVPAVVVTIILTISPDNYGLGSYGKFPNGSPDDFCWINNNAVFYITVVGYFCVIFLLNVSMFIVVLVQLCRIKKKKQLGAQRKTSIQDLRSIAGLTFLLGITWGFAFFAWGPVNVTFMYLFAIFNTLQGFFIFIFYCVAKENVRKQWRRYLCCGKLRLAENSDWSKTATNGLKKQTVNQGVSSSSNSLQSSSNSTNSTTLLVNNDCSVHASGNGNASTERNGVSFSVQNGDVCLHDFTGKQHMFNEKEDSCNGKGRMALRRTSKRGSLHFIEQM

SEQ ID NO: 47096 - protein, 1001 aa, Homo sapiens
MVFSVRQCGHVGRTEEVLLTFKIFLVIICLHVVLVTSLEEDTDNSSLSPPPEVETTSLNDVTLSLLPSNETEKTKITIVKTFNASGVKPQRNICNLSSICNDSAFFRGEIMFQYDKESTVPQNQHITNGTLTGVLSLSELKRSELNKTLQTLSETYFIMCATAEAQSTLNCTFTIKLNNTMNACAVIAALERVKIRPMEHCCCSVRIPCPSSPEELEKLQCDLQDPIVCLADHPRGPPFSSSQSIPVVPRATVLSQVPKATSFAEPPDYSPVTHNVPSPIGEIQPLSPQPSAPIASSPAIDMPPQSETISSPMPQTHVSGTPPPVKASFSSPTVSAPANVNTTSAPPVQTDIVNTSSISDLENQVLQMEKALSLGSLEPNLAGEMINQVSRLLHSPPDMLAPLAQRLLKVVDDIGLQLNFSNTTISLTSPSLALAVIRVNASSFNTTTFVAQDPANLQVSLETQAPENSIGTITLPSSLMNNLPAHDMELASRVQFNFFETPALFQDPSLENLSLISYVISSSVANLTVRNLTRNVTVTLKHINPSQDELTVRCVFWDLGRNGGRGGWSDNGCSVKDRRLNETICTCSHLTSFGVLLDLSRTSVLPAQMMALTFITYIGCGLSSIFLSVTLVTYIAFEKIRRDYPSKILIQLCAALLLLNLVFLLDSWIALYKMQGLCISVAVFLHYFLLVSFTWMGLEAFHMYLALVKVFNTYIRKYILKFCIVGWGVPAVVVTIILTISPDNYGLGSYGKFPNGSPDDFCWINNNAVFYITVVGYFCVIFLLNVSMFIVVLVQLCRIKKKKQLGAQRKTSIQDLRSIAGLTFLLGITWGFAFFAWGPVNVTFMYLFAIFNTLQGFFIFIFYCVAKENVRKQWRRYLCCGKLRLAENSDWSKTATNGLKKQTVNQGVSSSSNSLQSSSNSTNSTTLLVNNDCSVHASGNGNASTERNGVSFSVQNGDVCLHDFTGKQHMFNEKEDSCNGKGRMALRRTSKRGSLHFIEQM

SEQ ID NO: 47097 - protein, 117 aa, Homo sapiens
ILLTMQHINTGIDMLNQLGCVFFAGVKPQRNICNLSSICNDSAFFRGEIMFQYDKESTVPQNQHITNGTLTGVLSLSELKRSELNKTLQTLSETYFIMCATAEAQRHIKLYIHNKTE

SEQ ID NO: 47098 - protein, 337 aa, Homo sapiens
MNSTCIEEQHDLDHYLFPIVYIFVIIVSIPANIGSLCVSFLQAKKESELGIYLFSLSLSDLLYALTLPLWIDYTWNKDNWTFSPALCKGSAFLMYMNFYSSTAFLTCIAVDRYLAVVYPLKFFFLRTRRFALMVSLSIWILETIFNAVMLWEDETVVEYCDAEKSNFTLCYDKYPLEKWQINLNLFRTCTGYAIPLVTILICNRKVYQAVRHNKATENKEKKRIIKLLVSITVTFVLCFTPFHVMLLIRCILEHAVNFEDHSNSGKRTYTMYRITVALTSLNCVADPILYCFVTETGRYDMWNILKFCTGRCNTSQRQRKRILSVSTKDTMELEVLE

SEQ ID NO: 47099 - protein, 540 aa, Homo sapiens
MNSTGHLQDAPNATSLHVPHSQEGNSTSLQEGLQDLIHTATLVTCTFLLAVIFCLGSYGNFIVFLSFFDPAFRKFRTNFDFMILNLSFCDLFICGVTAPMFTFVLFFSSASSIPDAFCFTFHLTSSGFIIMSLKTVAVIALHRLRMVLGKQPNRTASFPCTVLLTLLLWATSFTLATLATLKTSKSHLCLPMSSLIAGKGKAILSLYVVDFTFCVAVVSVSYIMIAQTLRKNAQVRKCPPVITVDASRPQPFMGVPVQGGGDPIQCAMPALYRNQNYNKLQHVQTRGYTKSPNQLVTPAASRLQLVSAINLSTAKDSKAVVTCVIIVLSVLVCCLPLGISLVQVVLSSNGSFILYQFELFGFTLIFFKSGLNPFIYSRNSAGLRRKVLWCLQYIGLGFFCCKQKTRLRAMGKGNLEVNRNKSSHHETNSAYMLSPKPQKKFVDQACGPSHSKESMVSPKISAGHQHCGQSSSTPINTRIEPYYSIYNSSPSQEESSPCNLQPVNSFGFANSYIAMHYHTTNDLVQEYDSTSAKQIPVPSV

SEQ ID NO: 47100 - protein, 363 aa, Homo sapiens
MGPGEALLAGLLVMVLAVALLSNALVLLCCAYSAELRTRASGVLLVNLSLGHLLLAALDMPFTLLGVMRGRTPSAPGACQVIGFLDTFLASNAALSVAALSADQWLAVGFPLRYAGRLRPRYAGLLLGCAWGQSLAFSGAALGCSWLGYSSAFASCSLRLPPEPERPRFAAFTATLHAVGFVLPLAVLCLTSLQVHRVARRHCQRMDTVTMKALALLADLHPSVRQRCLIQQKRRRHRATRKIGIAIATFLICFAPYVMTRLAELVPFVTVNAQWGILSKCLTYSKAVADPFTYSLLRRPFRQVLAGMVHRLLKRTPRPASTHDSSLDVAGMVHQLLKRTPRPASTHNGSVDTENDSCLQQTH

SEQ ID NO: 47101 - protein, 336 aa, Homo sapiens
MNNNTTCIQPSMISSMALPIIYILLCIVGVFGNTLSQWIFLTKIGKKTSTHIYLSHLVTANLLVCSAMPFMSIYFLKGFQWEYQSAQCRVVNFLGTLSMHASMFVSLLILSWIAISRYATLMQKDSSQETTSCYEKIFYGHLLKKFRQPNFARKLCIYIWGVVLGIIIPVTVYYSVIEATEGEESLCYNRQMELGAMISQIAGLIGTTFIGFSFLVVLTSYYSFVSHLRKIRTCTSIMEKDLTYSSVKRHLLVIQILLIVCFLPYSIFKPIFYVLHQRDNCQQLNYLIETKNILTCLASARSSTDPIIFLLLDKTFKKTLYNLFTKSNSAHMQSYG

SEQ ID NO: 47102 - protein, 423 aa, Homo sapiens
MVPHLLLLCLLPLVRATEPHEGRADEQSAEAALAVPNASHFFSWNNYTFSDWQNFVGRRRYGAESQNPTVKALLIVAYSFIIVFSLFGNVLVCHVIFKNQRMHSATSLFIVNLAVADIMITLLNTPFTLVRFVNSTWIFGKGMCHVSRFAQYCSLHVSALTLTAIAVDRHQVIMHPLKPRISITKGVIYIAVIWTMATFFSLPHAICQKLFTFKYSEDIVRSLCLPDFPEPADLFWKYLDLATFILLYILPLLIISVAYARVAKKLWLCNMIGDVTTEQYFALRRKKKKTIKMLMLVVVLFALCWFPLNCYVLLLSSKVIRTNNALYFAFHWFAMSSTCYNPFIYCWLNENFRIELKALLSMCQRPPKPQEDRPPSPVPSFRVAWTEKNDGQRAPLANNLLPTSQLQSGKTDLSSVEPIVTMS

SEQ ID NO: 47103 - protein, 396 aa, Homo sapiens
MWNSSDANFSCYHESVLGYRYVAVSWGVVVAVTGTVGNVLTLLALAIQPKLRTRFNLLIANLTLADLLYCTLLQPFSVDTYLHLHWRTGATFCRVFGLLLFASNSVSILTLCLIALGRYLLIAHPKLFPQVFSAKGIVLALVSTWVVGVASFAPLWPIYILVPVVCTCSFDRIRGRPYTTILMGIYFVLGLSSVGIFYCLIHRQVKRAAQALDQYKLRQASIHSNHVARTDEAMPGRFQELDSRLASGGPSEGISSEPVSAATTQTLEGDSSEVGDQINSKRAKQMAEKSPPEASAKAQPIKGARRAPDSSSEFGKVTRMCFAVFLCFALSYIPFLLLNILDARVQAPRVVHMLAANLTWLNGCINPVLYAAMNRQFRQAYGSILKRGPRSFHRLH

SEQ ID NO: 47104 - protein, 396 aa, Homo sapiens; identical to SEQ ID NO: 47103

SEQ ID NO: 47105 - protein, 370 aa, Homo sapiens
MANYSHAADNILQNLSPLTAFLKLTSLGFIIGVSVVGNLLISILLVKDKTLHRAPYYFLLDLCCSDILRSAICFPFVFNSVKNGSTWTYGTLTCKVIAFLGVLSCFHTAFMLFCISVTRYLAIAHHRFYTKRLTFWTCLAVICMVWTLSVAMAFPPVLDVGTYSFIREEDQCTFQHRSFRANDSLGFMLLLALILLATQLVYLKLIFFVHDRRKMKPVQFVAAVSQNWTFHGPGASGQAAANWLAGFGRGPTPPTLLGIRQNANTTGRRRLLVLDEFKMEKRISRMFYIMTFLFLTLWGPYLVACYWRVFARGPVVPGGFLTAAVWMSFAQAGINPFVCIFSNRELRRCFSTTLLYCRKSRLPREPYCVI

SEQ ID NO: 47106 - protein, 370 aa, Homo sapiens; identical to SEQ ID NO: 47105

SEQ ID NO: 47107 - protein, 71 aa, Homo sapiens
MANYSHAADNILQNLSPLTAFLKLTSLGFIIGVSVVGNLLISILLVKDKTLHRAPYYFLLDLCCSDILRSA

SEQ ID NO: 47108 - protein, 370 aa, Homo sapiens; identical to SEQ ID NO: 47105

SEQ ID NO: 47109 - protein, 121 aa, Homo sapiens
MANYSHAADNILQNLSPLTAFLKLTSLGFIIGVSVVGNLLISILLVKDKTLHRAPYYFLLDLCCSDILRSAICFPFVFNSVKNGSTWTYGTLTCKVIAFLGVLSCFHTAFMLFCISVTRYL

SEQ ID NO: 47110 - protein, 370 aa, Homo sapiens; identical to SEQ ID NO: 47105

SEQ ID NO: 47111 - protein, 358 aa, Homo sapiens
MGFNLTLAKLPNNELHGQESHNSGNRSDGPGKNTTLHNEFDTIVLPVLYLIIFVASILLNGLAVWIFFHIRNKTSFIFYLKNIVVADLIMTLTFPFRIVHDAGFGPWYFKFILCRYTSVLFYANMYTSIVFLGLISIDRYLKVVKPFGDSRMYSITFTKVLSVCVWVIMAVLSLPNIILTNGQPTEDNIHDCSKLKSPLGVKWHTAVTYVNSCLFVAVLVILIGCYIAISRYIHKSSRQFISQSSRKRKHNQSIRVVVAVFFTCFLPYHLCRIPFTFSHLDRLLDESAQKILYYCKEITLFLSACNVCLDPIIYFFMCRSFSRRLFKKSNIRTRSESIRSLQSVRRSEVRIYYDYTDV

SEQ ID NO: 47112 - protein, 455 aa, Homo sapiens
MSFLIDSSIMITSQILFFGFGWLFFMRQLFKDYEIRQYVVQVIFSVTFAFSCTMFELIIFEILGVLNSSSRYFHWKMNLCVILLILVFMVPFYIGYFIVSNIRLLHKQRLLFSCLLWLTFMYFFWKLGDPFPILSPKHGILSIEQLISRVGVIGVTLMALLSGFGAVNCPYTYMSYFLRNVTDTDILALERRLLQTMDMIISKKKRMAMARRTMFQKGEVHNKPSGFWGMIKSVTTSASGSENLTLIQQEVDALEELSRQLFLETADLYATKERIEYSKTFKGKYFNFLGYFFSIYCVWKIFMATINIVFDRVGKTDPVTRGIEITVNYLGIQFDVKFWSQHISFILVGIIIVTSIRGLLITLTKFFYAISSSKSSNVIVLLLAQIMGMYFVSSVLLIRMSMPLEYRTIITEVLGELQFNFYHRWFDVIFLVSALSSILFLYLAHKQAPEKQMAP

SEQ ID NO: 47113 - protein, 335 aa, Homo sapiens
MYFFWKLGDPFPILSPKHGILSIEQLISRVGVIGVTLMALLSGFGAVNCPYTYMSYFLRNVTDTDILALERRLLQTMDMIISKKKRMAMARRTMFQKGEVHNKPSGFWGMIKSVTTSASGSENLTLIQQEVDALEELSRQLFLETADLYATKERIEYSKTFKGKYFNFLGYFFSIYCVWKIFMATINIVFDRVGKTDPVTRGIEITVNYLGIQFDVKFWSQHISFILVGIIIVTSIRGLLITLTKFFYAISSSKSSNVIVLLLAQIMGMYFVSSVLLIRMSMPLEYRTIITEVLGELQFNFYHRWFDVIFLVSALSSILFLYLAHKQAPEKQMAP

SEQ ID NO: 47114 - protein, 455 aa, Homo sapiens; identical to SEQ ID NO: 47112

SEQ ID NO: 47115 - protein, 6306 aa, Homo sapiens
MDIFLVLGMPSASLLVNLLSALLILFVFGETEIRFTGQTEFVVNETSTTVIRLIIERIGEPANVTAIVSLYGEDAGDFFDTYAAAFIPAGETNRTVYIAVCDDDLPEPDETFIFHLTLQKPSANVKLGWPRTVTVTILSNDNAFGIISFNMLPSIAVSEPKGRNESMPLTLIREKGTYGMVMVTFEVEGGPNPPDEDLSPVKGNITFPPGRATVIYNLTVLDDEVPENDEIFLIQLKSVEGGAEINTSRNSIEIIIKKNDSPVRFLQSIYLVPEEDHILIIPVVRGKDNNGNLIGSDEYEVSISYAVTTGNSTAHAQQNLDFIDLQPNTTVVFPPFIHESHLKFQIVDDTIPEIAESFHIMLLKDTLQGDAVLISPSVVQVTIKPNDKPYGVLSFNSVLFERTVIIDEDRISRYEEITVVRNGGTHGNVSANWVLTRNSTDPSPVTADIRPSSGVLHFAQGQMLATIPLTVVDDDLPEEAEAYLLQILPHTIRGGAEVSEPAELLFYIQDSDDVYGLITFFPMENQKIESSPGERYLSLSFTRLGGTKGDVRLLYSVLYIPAGAVDPLQAKEGILNISRRNDLIFPEQKTQVTTKLPIRNDAFLQNGAHFLVQLETVELLNIIPLIPPISPRFGEICNISLLVTPAIANGEIGFLSNLPIILHEPEDFAAEVVYIPLHRDGTDGQATVYWSLKPSGFNSKAVTPDDIGPFNGSVLFLSGQSDTTINITIKGDDIPEMNETVTLSLDRVNVENQVLKSGYTSRDLIILENDDPGGVFEFSPASRGPYVIKEGESVELHIIRSRGSLVKQFLHYRVEPRDSNEFYGNTGVLEFKPGEREIVITLLARLDGIPELDEHYWVVLSSHGERESKLGSATIVNITILKNDDPHGIIEFVSDGLIVMINESKGDAIYSAVYDVVRNRGNFGDVSVSWVVSPDFTQDVFPVQGTVVFGDQEFSKNITIYSLPDEIPEEMEEFTVILLNGTGGAKVGNRTTATLRIRRNDDPIYFAEPRVVRVQEGETANFTVLRNGSVDVTCMVQYATKDGKATARERDFIPVEKGETLIFEVGSRQQSISIFVNEDGIPETDEPFYIILLNSTGDTVVYQYGVATVIIEANDDPNGIFSLEPIDKAVEEGKTNAFWILRHRGYFGSVSVSWQLFQNDSALQPGQEFYETSGTVNFMDGEEAKPIILHAFPDKIPEFNEFYFLKLVNISGGSPGPGGQLAETNLQVTVMVPFNDDPFGVFILDPECLEREVAEDVLSEDDMSYITNFTILRQQGVFGDVQLGWEILSSEFPAGLPPMIDFLLVGIFPTTVHLQQHMRRHHSGTDALYFTGLEGAFGTVNPKYHPSRNNTIANFTFSAWVMPNANTNGFIIAKDDGNGSIYYGVKIQTNESHVTLSLHYKTLGSNATYIAKTTVMKYLEESVWLHLLIILEDGIIEFYLDGNAMPRGIKSLKGEAITDGPGILRIGAGINGNDRFTGLMQDVRSYERKLTLEEIYELHAMPAKSDLHPISGYLEFRQGETNKSFIISARDDNDEEGEELFILKLVSVYGGARISEENTTARLTIQKSDNANGLFGFTGACIPEIAEEGSTISCVVERTRGALDYVHVFYTISQIETDGINYLVDDFANASGTITFLPWQRSEVLNIYVLDDDIPELNEYFRVTLVSAIPGDGKLGSTPTSGASIDPEKETTDITIKASDHPYGLLQFSTGLPPQPKDAMTLPASSVPHITVEEEDGEIRLLVIRAQGLLGRVTAEFRTVSLTAFSPEDYQNVAGTLEFQPGERYKYIFINITDNSIPELEKSFKVELLNLEGGVAELFRVDGSGSGDGDMEFFLPTIHKRASLGVASQILVTIAASDHAHGVFEFSPESLFVSGTEPEDGYSTVTLNVIRHHGTLSPVTLHWNIDSDPDGDLAFTSGNITFEIGQTSANITVEILPDEDPELDKAFSVSVLSVSSGSLGAHINATLTVLASDDPYGIFIFSEKNRPVKVEEATQNITLSIIRLKGLMGKVLVSYATLDDMEKPPYFPPNLARATQGRDYIPASGFALFGANQSEATIAISILDDDEPERSESVFIELLNSTLVAKVQSRSIPNSPRLGPKVETIAQLIIIANDDAFGTLQLSAPIVRVAENHVGPIINVTRTGGAFADVSVKFKAVPITAIAGEDYSIASSDVVLLEGETSKAVPIYVINDIYPELEESFLVQLMNETTGGARLGALTEAVIIIEASDDPYGLFGFQITKLIVEEPEFNSVKVNLPIIRNSGTLGNVTVQWVATINGQLATGDLRVVSGNVTFAPGETIQTLLLEVLADDVPEIEEVIQVQLTDASGGGTIGLDRIANIIIPANDDPYGTVAFAQMVYRVQEPLERSSCANITVRRSGGHFGRLLLFYSTSDIDVVALAMEEGQDLLSYYESPIQGVPDPLWRTWMNVSAVGEPLYTCATLCLKEQACSAFSFFSASEGPQCFWMTSWISPAVNNSDFWTYRKNMTRVASLFSGQAVAGSDYEPVTRQWAIMQEGDEFANLTVSILPDDFPEMDESFLISLLEVHLMNISASLKNQPTIGQPNISTVVIALNGDAFGVFVIYNISPNTSEDGLFVEVQEQPQTLVELMIHRTGGSLGQVAVEWRVVGGTATEGLDFIGAGEILTFAEGETKKTVILTILDDSEPEDDESIIVSLVYTEGGSRILPSSDTVRVNILANDNVAGIVSFQTASRSVIGHEGEILQFHVIRTFPGRGNVTVNWKIIGQNLELNFANFSGQLFFPEGSLNTTLFVHLLDDNIPEEKEVYQVILYDVRTQGVPPAGIALLDAQGYAAVLTVEASDEPHGVLNFALSSRFVLLQEANITIQLFINREFGSLGAINVTYTTVPGMLSLKNQTVGNLAEPEVDFVPIIGFLILEEGETAAAINITILEDDVPELEEYFLVNLTYVGLTMAASTSFPPRLDSEGLTAQVIIDANDGARGVIEWQQSRFEVNETHGSLTLVAQRSREPLGHVSLFVYAQNLEAQVGLDYIFTPMILHFADGERYKNVNIMILDDDIPEGDEKFQLILTNPSPGLELGKNTIALIIVLANDDGPGVLSFNNSEHFFLREPTALYVQESVAVLYIVREPAQGLFGTVTVQFIVTEVNSSNESKDLTPSKGYIVLEEGVRFKALQISAILDTEPEMDEYFVCTLFNPTGGARLGVHVQTLITVLQNQAPLGLFSISAVENRATSIDIEEANRTVYLNVSRTNGIDLAVSVQWETVSETAFGMRGMDVVFSVFQSFLDESASGWCFFTLENLIYGIMLRKSSVTVYRWQGIFIPVEDLNIENPKTCEAFNIGFSPYFVITHEERNEEKPSLNSVFTFTSGFKLFLVQTIIILESSQVRYFTSDSQDYLIIASQRDDSELTQVFRWNGGSFVLHQKLPVRGVLTVALFNKGGSVFLAISQANARLNSLLFRWSGSGFINFQEVPVSGTTEVEALSSANDIYLIFAENVFLGDQNSIDIFIWEMGQSSFRYFQSVDFAAVNRIHSFTPASGIAHILLIGQDMSALYCWNSERNQFSFVLEVPSAYDVASVTVKSLNSSKNLIALVGAHSHIYELAYISSHSDFIPSSGELIFEPGEREATIAVNILDDTVPEKEESFKVQLKNPKGGAEIGINDSVTITILSNDDAYGIVAFAQNSLYKQVEEMEQDSLVTLNVERLKGTYGRITIAWEADGSISDIFPTSGVILFTEGQVLSTITLTILADNIPELSEVVIVTLTRITTEGVEDSYKGATIDQDRSKSVITTLPNDSPFGLVGWRAASVFIRVAEPKENTTTLQLQIARDKGLLGDIAIHLRAQPNFLLHVDNQATENEDYVLQETIIIMKENIKEAHAEVSILPDDLPELEEGFIVTITEVNLVNSDFSTGQPSVRRPGMEIAEIMIEENDDPRGIFMFHVTRGAGEVITAYEVPPPLNVLQVPVVRLAGSFGAVNVYWKASPDSAGLEDFKPSHGILEFADKQVTAMIEITIIDDAEFELTETFNISLISVAGGGRLGDDVVVTVVIPQNDSPFGVFGFEEKTVMIDESLSSDDPDSYVTLTVVRSPGGKGTVRLEWTIDEKAKHNLSPLNGTLHFDETESQKTIVLHTLQDTVLEEDRRFTIQLISIDEVEISPVKGSASIIIRGDKRASGEVGIAPSSRHILIGEPSAKYNGTAIISLVRGPGILGEVTVFWRIFPPSVGEFAETSGKLTMRDEQSAVIVVIQALNDDIPEEKSFYEFQLTAVSEGGVLSESSSTANITVVASDSPYGRFAFSHEQLRVSEAQRVNITIIRSSGDFGHVRLWYKTMSGTAEAGLDFVPAAGELLFEAGEMRKSLHVEILDDDYPEGPEEFSLTITKVELQGRGYDFTIQENGLQIDQPPEIGNISIVRIIIMKNDNAEGIIEFDPKYTAFEVEEDVGLIMIPVVRLHGTYGYVTADFISQSSSASPGGVDYILHGSTVTFQHGQNLSFINISIIDDNESEFEEPIEILLTGATGGAVLGRHLVSRIIIAKSDSPFGVIRFLNQSKISIANPNSTMILSLVLERTGGLLGEIQVNWETVGPNSQEALLPQNRDIADPVSGLFYFGEGEGGVRTIILTIYPHEEIEVEETFIIKLHLVKGEAKLDSRAKDVTLTIQEFGDPNGVVQFAPETLSKKTYSEPLALEGPLLITFFVRRVKGTFGEIMVYWELSSEFDITEDFLSTSGFFTIADGESEASFDVHLLPDEVPEIEEDYVIQLVSVEGGAELDLEKSITWFSVYANDDPHGVFALYSDRQSILIGQNLIRSIQINITRLAGTFGDVAVGLRISSDHKEQPIVTENAERQLVVKDGATYKVDVVPIKNQVFLSLGSNFTLQLVTVMLVGGRFYGMPTILQEAKSAVLPVSEKAANSQVGFESTAFQLMNITAGTSHVMISRRGTYGALSVAWTTGYAPGLEIPEFIVVGNMTPTLGSLSFSHGEQRKGVFLWTFPSPGWPEAFVLHLSGVQSSAPGGAQLRSGFIVAEIEPMGVFQFSTSSRNIIVSEDTQMIRLHVQRLFGFHSDLIKVSYQTTAGSAKPLEDFEPVQNGELFFQKFQTEVDFEITIINDQLSEIEEFFYINLTSVEIRGLQKFDVNWSPRLNLDFSVAVITILDNDDLAGMDISFPETTVAVAVDTTLIPVETESTTYLSTSKTTTILQPTNVVAIVTEATGVSAIPEKLVTLHGTPAVSEKPDVATVTANVSIHGTFSLGPSIVYIEEEMKNGTFNTAEVLIRRTGGFTGNVSITVKTFGERCAQMEPNALPFRGIYGISNLTWAVEEEDFEEQTLTLIFLDGERERKVSVQILDDDEPEGQEFFYVFLTNPQGGAQIVEEKDDTGFAAFAMVIITGSDLHNGIIGFSEESQSGLELREGAVMRRLHLIVTRQPNRAFEDVKVFWRVTLNKTVVVLQKDGVNLVEELQSVSGTTTCTMGQTKCFISIELKPEKVPQVEVYFFVELYEATAGAAINNSARFAQIKILESDESQSLVYFSVGSRLAVAHKKATLISLQVARDSGTGLMMSVNFSTQELRSAETIGRTIISPAISGKDFVITEGTLVFEPGQRSTVLDVILTPETGSLNSFPKRFQIVLFDPKGGARIDKVYGTANITLVSDADSQAIWGLADQLHQPVNDDILNRVLHTISMKVATENTDEQLSAMMHLIEKITTEGKIQAFSVASRTLFYEILCSLINPKRKDTRGFSHFAEVTENFAFSLLTNVTCGSPGEKSKTILDSCPYLSILALHWYPQQINGHKFEGKEGDYIRIPERLLDVQDAEIMAGKSTCKLVQFTEYSSQQWFISGNNLPTLKNKVLSLSVKGQSSQLLTNDNEVLYRIYAAEPRIIPQTSLCLLWNQAAASWLSDSQFCKVVEETADYVECACSHMSVYAVYARTDNLSSYNEAFFTSGFICISGLCLAVLSHIFCARYSMFAAKLLTHMMAASLGTQILFLASAYASPQLAEESCSAMAAVTHYLYLCQFSWMLIQSVNFWYVLVMNDEHTERRYLLFFLLSWGLPAFVVILLIVILKGIYHQSMSQIYGLIHGDLCFIPNVYAALFTAALVPLTCLVVVFVVFIHAYQVKPQWKAYDDVFRGRTNAAEIPLILYLFALISVTWLWGGLHMAYRHFWMLVLFVIFNSLQGLYVFMVYFILHNQMCCPMKASYTVEMNGHPGPSTAFFTPGSGMPPAGGEISKSTQNLIGAMEEVPPDWERASFQQGSQASPDLKPSPQNGATFPSSGGYGQGSLIADEESQEFDDLIFALKTGAGLSVSDNESGQGSQEGGTLTDSQIVELRRIPIADTHL

SEQ ID NO: 47116 - protein, 2306 aa, Homo sapiens
VDVFMFLGMPSASLLVNLLSALLILFVFGETEIRFTGQTEFVVNETSTTVIRLIIERIGEPANVTAIVSLYGEDAGDFFDTYAAAFIPAGETNRTVYIAVCDDDLPEPDETFIFHLTLQKPSANVKLGWPRTVTVTILSNDNAFGIISFNMLPSIAVSEPKGRNESMPLTLIREKGTYGMVMVTFEVEGGPNPPDEDLSPVKGNITFPPGRATVIYNLTVLDDEVPENDEIFLIQLKSVEGGAEINTSRNSIEIIIKKNDSPVRFLQSIYLVPEEDHILIIPVVRGKDNNGNLIGSDEYEVSISYAVTTGNSTAHAQQNLDFIDLQPNTTVVFPPFIHESHLKFQIVDDTIPEIAESFHIMLLKDTLQGDAVLISPSVVQVTIKPNDKPYGVLSFNSVLFERTVIIDEDRISRYEEITVVRNGGTHGNVSANWVLTRNSTDPSPVTADIRPSSGVLHFAQGQMLATIPLTVVDDDLPEEAEAYLLQILPHTIRGGAEVSEPAELLFYIQDSDDVYGLITFFPMENQKIESSPGERYLSLSFTRLGGTKGDVRLLYSVLYIPAGAVDPLQAKEGILNISRRNDLIFPEQKTQVTTKLPIRNDAFLQNGAHFLVQLETVELLNIIPLIPPISPRFGEICNISLLVTPAIANGEIGFLSNLPIILHEPEDFAAEVVYIPLHRDGTDGQATVYWSLKPSGFNSKAVTPDDIGPFNGSVLFLSGQSDTTINITIKGDDIPEMNETVTLSLDRVNVENQVLKSGYTSRDLIILENDDPGGVFEFSPASRGPYVIKEGESVELHIIRSRGSLVKQFLHYRVEPRDSNEFYGNTGVLEFKPGEREIVITLLARLDGIPELDEHYWVVLSSHGERESKLGSATIVNITILKNDDPHGIIEFVSDGLIVMINESKGDAIYSAVYDVVRNRGNFGDVSVSWVVSPDFTQDVFPVQGTVVFGDQEFSKNITIYSLPDEIPEEMEEFTVILLNGTGGAKVGNRTTATLRIRRNDDPIYFAEPRVVRVQEGETANFTVLRNGSVDVTCMVQYATKDGKATARERDFIPVEKGETLIFEVGSRQQSISIFVNEDGIPETDEPFYIILLNSTGDTVVYQYGVATVIIEANDDPNGIFSLEPIDKAVEEGKTNAFWILRHRGYFGSVSVSWQLFQNDSALQPGQEFYETSGTVNFMDGEEAKPIILHAFPDKIPEFNEFYFLKLVNISGGSPGPGGQLAETNLQVTVMVPFNDDPFGVFILDPECLEREVAEDVLSEDDMSYITNFTILRQQGVFGDVQLGWEILSSEFPAGLPPMIDFLLVGIFPTTVHLQQHMRRHHSGTDALYFTGLEGAFGTVNPKYHPSRNNTIANFTFSAWVMPNANTNGFIIAKDDGNGSIYYGVKIQTNESHVTLSLHYKTLGSNATYIAKTTVMKYLEESVWLHLLIILEDGIIEFYLDGNAMPRGIKSLKGEAITDGPGILRIGAGINGNDRFTGLMQDVRSYERKLTLEEIYELHAMPAKSDLHPISGYLEFRQGETNKSFIISARDDNDEEGEELFILKLVSVYGGARISEENTTARLTIQKSDNANGLFGFTGACIPEIAEEGSTISCVVERTRGALDYVHVFYTISQIETDGINYLVDDFANASGTITFLPWQRSEVLNIYVLDDDIPELNEYFRVTLVSAIPGDGKLGSTPTSGASIDPEKETTDITIKASDHPYGLLQFSTGLPPQPKDAMTLPASSVPHITVEEEDGEIRLLVIRAQGLLGRVTAEFRTVSLTAFSPEDYQNVAGTLEFQPGERYKYIFINITDNSIPELEKSFKVELLNLEGGVAELFRVDGSGSGDGDMEFFLPTIHKRASLGVASQILVTIAASDHAHGVFEFSPESLFVSGTEPEDGYSTVTLNVIRHHGTLSPVTLHWNIDSDPDGDLAFTSGNITFEIGQTSANITVEILPDEDPELDKAFSVSVLSVSSGSLGAHINATLTVLASDDPYGIFIFSEKNRPVKVEEATQNITLSIIRLKGLMGKVLVSYATLDDMEKPPYFPPNLARATQGRDYIPASGFALFGANQSEATIAISILDDDEPERSESVFIELLNSTLVAKVQSRSIPNSPRLGPKVETIAQLIIIANDDAFGTLQLSAPIVRVAENHVGPIINVTRTGGAFADVSVKFKAVPITAIAGEDYSIASSDVVLLEGETSKAVPIYVINDIYPELEESFLVQLMNETTGGARLGALTEAVIIIEASDDPYGLFGFQITKLIVEEPEFNSVKVNLPIIRNSGTLGNVTVQWVATINGQLATGDLRVVSGNVTFAPGMSSYPSATN

SEQ ID NO: 47117 - protein, 6306 aa, Homo sapiens
MSVFLGPGMPSASLLVNLLSALLILFVFGETEIRFTGQTEFVVNETSTTVIRLIIERIGEPANVTAIVSLYGEDAGDFFDTYAAAFIPAGETNRTVYIAVCDDDLPEPDETFIFHLTLQKPSANVKLGWPRTVTVTILSNDNAFGIISFNMLPSIAVSEPKGRNESMPLTLIREKGTYGMVMVTFEVEGGPNPPDEDLSPVKGNITFPPGRATVIYNLTVLDDEVPENDEIFLIQLKSVEGGAEINTSRNSIEIIIKKNDSPVRFLQSIYLVPEEDHILIIPVVRGKDNNGNLIGSDEYEVSISYAVTTGNSTAHAQQNLDFIDLQPNTTVVFPPFIHESHLKFQIVDDTIPEIAESFHIMLLKDTLQGDAVLISPSVVQVTIKPNDKPYGVLSFNSVLFERTVIIDEDRISRYEEITVVRNGGTHGNVSANWVLTRNSTDPSPVTADIRPSSGVLHFAQGQMLATIPLTVVDDDLPEEAEAYLLQILPHTIRGGAEVSEPAELLFYIQDSDDVYGLITFFPMENQKIESSPGERYLSLSFTRLGGTKGDVRLLYSVLYIPAGAVDPLQAKEGILNISRRNDLIFPEQKTQVTTKLPIRNDAFLQNGAHFLVQLETVELLNIIPLIPPISPRFGEICNISLLVTPAIANGEIGFLSNLPIILHEPEDFAAEVVYIPLHRDGTDGQATVYWSLKPSGFNSKAVTPDDIGPFNGSVLFLSGQSDTTINITIKGDDIPEMNETVTLSLDRVNVENQVLKSGYTSRDLIILENDDPGGVFEFSPASRGPYVIKEGESVELHIIRSRGSLVKQFLHYRVEPRDSNEFYGNTGVLEFKPGEREIVITLLARLDGIPELDEHYWVVLSSHGERESKLGSATIVNITILKNDDPHGIIEFVSDGLIVMINESKGDAIYSAVYDVVRNRGNFGDVSVSWVVSPDFTQDVFPVQGTVVFGDQEFSKNITIYSLPDEIPEEMEEFTVILLNGTGGAKVGNRTTATLRIRRNDDPIYFAEPRVVRVQEGETANFTVLRNGSVDVTCMVQYATKDGKATARERDFIPVEKGETLIFEVGSRQQSISIFVNEDGIPETDEPFYIILLNSTGDTVVYQYGVATVIIEANDDPNGIFSLEPIDKAVEEGKTNAFWILRHRGYFGSVSVSWQLFQNDSALQPGQEFYETSGTVNFMDGEEAKPIILHAFPDKIPEFNEFYFLKLVNISGGSPGPGGQLAETNLQVTVMVPFNDDPFGVFILDPECLEREVAEDVLSEDDMSYITNFTILRQQGVFGDVQLGWEILSSEFPAGLPPMIDFLLVGIFPTTVHLQQHMRRHHSGTDALYFTGLEGAFGTVNPKYHPSRNNTIANFTFSAWVMPNANTNGFIIAKDDGNGSIYYGVKIQTNESHVTLSLHYKTLGSNATYIAKTTVMKYLEESVWLHLLIILEDGIIEFYLDGNAMPRGIKSLKGEAITDGPGILRIGAGINGNDRFTGLMQDVRSYERKLTLEEIYELHAMPAKSDLHPISGYLEFRQGETNKSFIISARDDNDEEGEELFILKLVSVYGGARISEENTTARLTIQKSDNANGLFGFTGACIPEIAEEGSTISCVVERTRGALDYVHVFYTISQIETDGINYLVDDFANASGTITFLPWQRSEVLNIYVLDDDIPELNEYFRVTLVSAIPGDGKLGSTPTSGASIDPEKETTDITIKASDHPYGLLQFSTGLPPQPKDAMTLPASSVPHITVEEEDGEIRLLVIRAQGLLGRVTAEFRTVSLTAFSPEDYQNVAGTLEFQPGERYKYIFINITDNSIPELEKSFKVELLNLEGGVAELFRVDGSGSGDGDMEFFLPTIHKRASLGVASQILVTIAASDHAHGVFEFSPESLFVSGTEPEDGYSTVTLNVIRHHGTLSPVTLHWNIDSDPDGDLAFTSGNITFEIGQTSANITVEILPDEDPELDKAFSVSVLSVSSGSLGAHINATLTVLASDDPYGIFIFSEKNRPVKVEEATQNITLSIIRLKGLMGKVLVSYATLDDMEKPPYFPPNLARATQGRDYIPASGFALFGANQSEATIAISILDDDEPERSESVFIELLNSTLVAKVQSRSIPNSPRLGPKVETIAQLIIIANDDAFGTLQLSAPIVRVAENHVGPIINVTRTGGAFADVSVKFKAVPITAIAGEDYSIASSDVVLLEGETSKAVPIYVINDIYPELEESFLVQLMNETTGGARLGALTEAVIIIEASDDPYGLFGFQITKLIVEEPEFNSVKVNLPIIRNSGTLGNVTVQWVATINGQLATGDLRVVSGNVTFAPGETIQTLLLEVLADDVPEIEEVIQVQLTDASGGGTIGLDRIANIIIPANDDPYGTVAFAQMVYRVQEPLERSSCANITVRRSGGHFGRLLLFYSTSDIDVVALAMEEGQDLLSYYESPIQGVPDPLWRTWMNVSAVGEPLYTCATLCLKEQACSAFSFFSASEGPQCFWMTSWISPAVNNSDFWTYRKNMTRVASLFSGQAVAGSDYEPVTRQWAIMQEGDEFANLTVSILPDDFPEMDESFLISLLEVHLMNISASLKNQPTIGQPNISTVVIALNGDAFGVFVIYNISPNTSEDGLFVEVQEQPQTLVELMIHRTGGSLGQVAVEWRVVGGTATEGLDFIGAGEILTFAEGETKKTVILTILDDSEPEDDESIIVSLVYTEGGSRILPSSDTVRVNILANDNVAGIVSFQTASRSVIGHEGEILQFHVIRTFPGRGNVTVNWKIIGQNLELNFANFSGQLFFPEGSLNTTLFVHLLDDNIPEEKEVYQVILYDVRTQGVPPAGIALLDAQGYAAVLTVEASDEPHGVLNFALSSRFVLLQEANITIQLFINREFGSLGAINVTYTTVPGMLSLKNQTVGNLAEPEVDFVPIIGFLILEEGETAAAINITILEDDVPELEEYFLVNLTYVGLTMAASTSFPPRLDSEGLTAQVIIDANDGARGVIEWQQSRFEVNETHGSLTLVAQRSREPLGHVSLFVYAQNLEAQVGLDYIFTPMILHFADGERYKNVNIMILDDDIPEGDEKFQLILTNPSPGLELGKNTIALIIVLANDDGPGVLSFNNSEHFFLREPTALYVQESVAVLYIVREPAQGLFGTVTVQFIVTEVNSSNESKDLTPSKGYIVLEEGVRFKALQISAILDTEPEMDEYFVCTLFNPTGGARLGVHVQTLITVLQNQAPLGLFSISAVENRATSIDIEEANRTVYLNVSRTNGIDLAVSVQWETVSETAFGMRGMDVVFSVFQSFLDESASGWCFFTLENLIYGIMLRKSSVTVYRWQGIFIPVEDLNIENPKTCEAFNIGFSPYFVITHEERNEEKPSLNSVFTFTSGFKLFLVQTIIILESSQVRYFTSDSQDYLIIASQRDDSELTQVFRWNGGSFVLHQKLPVRGVLTVALFNKGGSVFLAISQANARLNSLLFRWSGSGFINFQEVPVSGTTEVEALSSANDIYLIFAENVFLGDQNSIDIFIWEMGQSSFRYFQSVDFAAVNRIHSFTPASGIAHILLIGQDMSALYCWNSERNQFSFVLEVPSAYDVASVTVKSLNSSKNLIALVGAHSHIYELAYISSHSDFIPSSGELIFEPGEREATIAVNILDDTVPEKEESFKVQLKNPKGGAEIGINDSVTITILSNDDAYGIVAFAQNSLYKQVEEMEQDSLVTLNVERLKGTYGRITIAWEADGSISDIFPTSGVILFTEGQVLSTITLTILADNIPELSEVVIVTLTRITTEGVEDSYKGATIDQDRSKSVITTLPNDSPFGLVGWRAASVFIRVAEPKENTTTLQLQIARDKGLLGDIAIHLRAQPNFLLHVDNQATENEDYVLQETIIIMKENIKEAHAEVSILPDDLPELEEGFIVTITEVNLVNSDFSTGQPSVRRPGMEIAEIMIEENDDPRGIFMFHVTRGAGEVITAYEVPPPLNVLQVPVVRLAGSFGAVNVYWKASPDSAGLEDFKPSHGILEFADKQVTAMIEITIIDDAEFELTETFNISLISVAGGGRLGDDVVVTVVIPQNDSPFGVFGFEEKTVMIDESLSSDDPDSYVTLTVVRSPGGKGTVRLEWTIDEKAKHNLSPLNGTLHFDETESQKTIVLHTLQDTVLEEDRRFTIQLISIDEVEISPVKGSASIIIRGDKRASGEVGIAPSSRHILIGEPSAKYNGTAIISLVRGPGILGEVTVFWRIFPPSVGEFAETSGKLTMRDEQSAVIVVIQALNDDIPEEKSFYEFQLTAVSEGGVLSESSSTANITVVASDSPYGRFAFSHEQLRVSEAQRVNITIIRSSGDFGHVRLWYKTMSGTAEAGLDFVPAAGELLFEAGEMRKSLHVEILDDDYPEGPEEFSLTITKVELQGRGYDFTIQENGLQIDQPPEIGNISIVRIIIMKNDNAEGIIEFDPKYTAFEVEEDVGLIMIPVVRLHGTYGYVTADFISQSSSASPGGVDYILHGSTVTFQHGQNLSFINISIIDDNESEFEEPIEILLTGATGGAVLGRHLVSRIIIAKSDSPFGVIRFLNQSKISIANPNSTMILSLVLERTGGLLGEIQVNWETVGPNSQEALLPQNRDIADPVSGLFYFGEGEGGVRTIILTIYPHEEIEVEETFIIKLHLVKGEAKLDSRAKDVTLTIQEFGDPNGVVQFAPETLSKKTYSEPLALEGPLLITFFVRRVKGTFGEIMVYWELSSEFDITEDFLSTSGFFTIADGESEASFDVHLLPDEVPEIEEDYVIQLVSVEGGAELDLEKSITWFSVYANDDPHGVFALYSDRQSILIGQNLIRSIQINITRLAGTFGDVAVGLRISSDHKEQPIVTENAERQLVVKDGATYKVDVVPIKNQVFLSLGSNFTLQLVTVMLVGGRFYGMPTILQEAKSAVLPVSEKAANSQVGFESTAFQLMNITAGTSHVMISRRGTYGALSVAWTTGYAPGLEIPEFIVVGNMTPTLGSLSFSHGEQRKGVFLWTFPSPGWPEAFVLHLSGVQSSAPGGAQLRSGFIVAEIEPMGVFQFSTSSRNIIVSEDTQMIRLHVQRLFGFHSDLIKVSYQTTAGSAKPLEDFEPVQNGELFFQKFQTEVDFEITIINDQLSEIEEFFYINLTSVEIRGLQKFDVNWSPRLNLDFSVAVITILDNDDLAGMDISFPETTVAVAVDTTLIPVETESTTYLSTSKTTTILQPTNVVAIVTEATGVSAIPEKLVTLHGTPAVSEKPDVATVTANVSIHGTFSLGPSIVYIEEEMKNGTFNTAEVLIRRTGGFTGNVSITVKTFGERCAQMEPNALPFRGIYGISNLTWAVEEEDFEEQTLTLIFLDGERERKVSVQILDDDEPEGQEFFYVFLTNPQGGAQIVEEKDDTGFAAFAMVIITGSDLHNGIIGFSEESQSGLELREGAVMRRLHLIVTRQPNRAFEDVKVFWRVTLNKTVVVLQKDGVNLVEELQSVSGTTTCTMGQTKCFISIELKPEKVPQVEVYFFVELYEATAGAAINNSARFAQIKILESDESQSLVYFSVGSRLAVAHKKATLISLQVARDSGTGLMMSVNFSTQELRSAETIGRTIISPAISGKDFVITEGTLVFEPGQRSTVLDVILTPETGSLNSFPKRFQIVLFDPKGGARIDKVYGTANITLVSDADSQAIWGLADQLHQPVNDDILNRVLHTISMKVATENTDEQLSAMMHLIEKITTEGKIQAFSVASRTLFYEILCSLINPKRKDTRGFSHFAEVTENFAFSLLTNVTCGSPGEKSKTILDSCPYLSILALHWYPQQINGHKFEGKEGDYIRIPERLLDVQDAEIMAGKSTCKLVQFTEYSSQQWFISGNNLPTLKNKVLSLSVKGQSSQLLTNDNEVLYRIYAAEPRIIPQTSLCLLWNQAAASWLSDSQFCKVVEETADYVECACSHMSVYAVYARTDNLSSYNEAFFTSGFICISGLCLAVLSHIFCARYSMFAAKLLTHMMAASLGTQILFLASAYASPQLAEESCSAMAAVTHYLYLCQFSWMLIQSVNFWYVLVMNDEHTERRYLLFFLLSWGLPAFVVILLIVILKGIYHQSMSQIYGLIHGDLCFIPNVYAALFTAALVPLTCLVVVFVVFIHAYQVKPQWKAYDDVFRGRTNAAEIPLILYLFALISVTWLWGGLHMAYRHFWMLVLFVIFNSLQGLYVFMVYFILHNQMCCPMKASYTVEMNGHPGPSTAFFTPGSGMPPAGGEISKSTQNLIGAMEEVPPDWERASFQQGSQASPDLKPSPQNGATFPSSGGYGQGSLIADEESQEFDDLIFALKTGAGLSVSDNESGQGSQEGGTLTDSQIVELRRIPIADTHL

SEQ ID NO: 47118 - protein, 1395 aa, Homo sapiens
MTGAEIESGAQVKPEKKPGEEVVGGAEIENDVPLVVRPKVRTQAQIMPGARPKNKSKVMPGASTKVETSAVGGARPKSKAKAIPVSRFKEEAQMWAQPRFGAERLSKTERNSQTNIIASPLVSTDSVLVAKTKYLSEDRELVNTDTESFPRRKAHYQAGFQPSFRSKEETNMGSWCCPRPTSKQEASPNSDFKWVDKSVSSLFWSGDEVTAKFHPGNRVKDSNRSMHMANQEANTMSRSQTNQELYIASSSGSEDESVKTPWFWARDKTNTWSGPREDPNSRSRFRSKKEVYVESSSGSEHEDHLESWFGAGKEAKFRSKMRAGKEANNRARHRAKREACIDFMPGSIDVIKKESCFWPEENANTFSRPMIKKEARARAMTKEEAKTKARARAKQEARSEEEALIGTWFWATDESSMADEASIESSLQVEDESIIGSWFWTEEEASMGTGASSKSRPRTDGERIGDSLFGAREKTSMKTGAEATSESILAADDEQVIIGSWFWAGEEVNQEAEEETIFGSWFWVIDAASVESGVGVSCESRTRSEEEEVIGPWFWSGEQVDIEAGIGEEARPGAEEETIFGSWFWAENQTYMDCRAETSCDTMQGAEEEEPIIGSWFWTRVEACVEGDVNSKSSLEDKEEAMIPCFGAKEEVSMKHGTGVRCRFMAGAEETNNKSCFWAEKEPCMYPAGGGSWKSRPEEEEDIVNSWFWSRKYTKPEAIIGSWLWATEESNIDGTGEKAKLLTEEETIINSWFWKEDEAISEATDREESRPEAEEGDIIGSWFWAGEEDRLEPAAETREEDRLAAEKEGIVGSWFGAREETIRREAGSCSKSSPKAEEEEVIIGSWFWEEEASPEAVAGVGFESKPGTEEEEITVGSWFWPEEEASIQAGSQAVEEMESETEEETIFGSWFWDGKEVSEEAGPCCVSKPEDDEEMIVESWFWSRDKAIKETGTVATCESKPENEEGAIVGSWFEAEDEVDNRTDNGSNCGSRTLADEDEAIVGSWFWAGDEAHFESNPSPVFRAICRSTCSVEQEPDPSRRPQSWEEVTVQFKPGPWGRVGFPSISPFRFPKEAASLFCEMFGGKPRNMVLSPEGEDQESLLQPDQPSPEFPFQYDPSYRSVQEIREHLRAKESTEPESSSCNCIQCELKIGSEEFEELLLLMEKIRDPFIHEISKIAMGMRSASQFTRDFIRDSGVVSLIETLLNYPSSRVRTSFLENMIRMAPPYPNLNIIQTYICKVCEETLAYSVDSPEQLSGIRMIRHLTTTTDYHTLVANYMSGFLSLLATGNAKTRFHVLKMLLNLSENLFMTKELLSAEAVSEFIGLFNREETNDNIQIVLAIFENIGNNIKKETVFSDDDFNIEPLISAFHKVEKFAKELQGKTDNQNDPEGDQEN

SEQ ID NO: 47119 - protein, 1395 aa, Homo sapiens; identical to SEQ ID NO: 47118

SEQ ID NO: 47120 - protein, 1395 aa, Homo sapiens; identical to SEQ ID NO: 47118

SEQ ID NO: 47121 - protein, 1395 aa, Homo sapiens; identical to SEQ ID NO: 47118

SEQ ID NO: 47122 - protein, 563 aa, Homo sapiens
MDFGSLETVVANSAFIAARGSFDGSSSQPSRDKKYLAKLKLPPLSKCESLRDSLSLEFESVCLEQPIGKKLFQQFLQSAEKHLPALELWKDIEDYDTADNDLQPQKAQTILAQYLDPQAKLFCSFLDEGIVAKFKEGPVEIQDGLFQPLLQATLAHLGQAPFQEYLGSLYFLRFLQWKWLEAQPMGEDWFLDFRVLGKGGFGEVSACQMKATGKLYACKKLNKKRLKKRKGYQGAMVEKKILMKVHSRFIVSLAYAFETKADLCLVMTIMNGGDIRYHIYNVNEENPGFPEPRALFYTAQIICGLEHLHQRRIVYRDLKPENVLLDNDGNVRISDLGLAVELLDGQSKTKGYAGTPGFMAPELLQGEEYDFSVDYFALGVTLYEMIAARGPFRARGEKVENKELKHRIISEPVKYPDKFSQASKDFCEALLEKDPEKRLGFRDETCDKLRAHPLFKDLNWRQLEAGMLMPPFIPDSKTVYAKDIQDVGAFSTVKGVAFDKTDTEFFQEFATGNCPIPWQEEMIETGIFGELNVWRSDGQMPDDMKGISGGSSSSSKSGMCLVS

SEQ ID NO: 47123 - protein, 94 aa, Homo sapiens
MIAARGPFRARGEKVENKELKHRIISEPVKYPDKFSQASKDFCEALLEKDPEKRLGFRDETCDKLRAHPLFKDLNWRQLEAGMLMPPFIPDSKT

SEQ ID NO: 47124 - protein, 75 aa, Homo sapiens
MELENIVANTVLLKAREGGGGKRKGKSKKWKEILKFPHISQCEDLRRTIGELSGSLISWSSSTKEHGRPTEIKMR

SEQ ID NO: 47125 - protein, 485 aa, Homo sapiens [sequence omitted]

SEQ ID NO: 47126 - protein, 590 aa, Homo sapiens
MELENIVANTVLLKAREGGGGKRKGKSKKWKEILKFPHISQCEDLRRTIDRDYCSLCDKQPIGRLLFRQFCETRPGLECYIQFLDSVAEYEVTPDEKLGEKGKEIMTKYLTPKSPVFIAQVGQDLVSQTEEKLLQKPCKELFSACAQSVHEYLRGEPFHEYLDSMFFDRFLQWKWLERQPVTKNTFRQYRVLGKGGFGEVCACQVRATGKMYACKRLEKKRIKKRKGESMALNEKQILEKVNSQFVVNLAYAYETKDALCLVLTIMNGGDLKFHIYNMGNPGFEEERALFYAAEILCGLEDLHRENTVYRDLKPENILLDDYGHIRISDLGLAVKIPEGDLIRGRVGTVGYMAPEVLNNQRYGLSPDYWGLGCLIYEMIEGQSPFRGRKEKVKREEVDRRVLETEEVYSHKFSEEAKSICKMLLTKDAKQRLGCQEEGAAEVKRHPFFRNMNFKRLEAGMLDPPFVPDPRAVYCKDVLDIEQFSTVKGVNLDHTDDDFYSKFSTGSVSIPWQNEMIETECFKELNVFGPNGTLPPDLNRNHPPEPPKKGLLQRLFKRQHQNNSKSSPSSKTSFNHHINSNHVSSNSTGSS

SEQ ID NO: 47127 - protein, 399 aa, Homo sapiens
MTKYLTPKSPVFIAQVGQDLVSQTEEKLLQKPCKELFSACAQSVHEYLRGEPFHEYLDSMFFDRFLQWKWLERQPVTKNTFRQYRVLGKGGFGEVCACQVRATGKMYACKRLEKKRIKKRKGESMALNEKQILEKVNSQFVVNLAYAYETKDALCLVLTIMNGGDLKFHIYNMGNPGFEEGAAEVKRHPFFRNMNFKRLEAGMLDPPFVPDPRAVYCKDVLDIEQFSTVKGVNLDHTDDDFYSKFSTGSVSIPWQNEMIETECFKELNVFGPNGTLPPDLNRNHPPEPPKKGLLQRLFKRQHQNNSKSSPSSKSTVEPAQTLLLRSGSSGAPALVGLPGETPGAGEGGRPSRRRRTSRFLKEISTQVCFPRRPRPGWIGFVFGEHCNRNPIGYDNLHVF

SEQ ID NO: 47128 - protein, 576 aa, Homo sapiens
MELENIVANTVLLKAREGGGGNRKGKSKKWRQMLQFPHISQCEELRLSLERDYHSLCERQPIGRLLFREFCATRPELSRCVAFLDGVAEYEVTPDDKRKACGRQLTQNFLSHTGPDLIPEVPRQLVTNCTQRLEQGPCKDLFQELTRLTHEYLSVAPFADYLDSIYFNRFLQWKWLERQPVTKNTFRQYRVLGKGGFGEVCACQVRATGKMYACKKLEKKRIKKRKGEAMALNEKQILEKVNSRFVVSLAYAYETKDALCLVLTLMNGGDLKFHIYHMGQAGFPEARAVFYAAEICCGLEDLHRERIVYRDLKPENILLDDHGHIRISDLGLAVHVPEGQTIKGRVGTVGYMAPEVVKNERYTFSPDWWALGCLLYEMIAGQSPFQQRKKKIKREEVERLVKEVPEEYSERFSPQARSLCSQLLCKDPAERLGCRGGSAREVKEHPLFKKLNFKRLGAGMLEPPFKPDPQAIYCKDVLDIEQFSTVKGVELEPTDQDFYQKFATGSVPIPWQNEMVETECFQELNVFGLDGSVPPDLDWKGQPPAPPKKGLLQRLFSRQDCCGNCSDSEEELPTRL

SEQ ID NO: 47129 - protein, 560 aa, Homo sapiens
MELENIVANTVLLKAREGGGGNRKGKSKKWRQMLQFPHISQCEELRLSLERDYHSLCERQPIGRLLFREFCATRPELSRCVAFLDGVAEYEVTPDDKRKACGRQLTQNFLSHTGPDLIPEVPRQLVTNCTQRLEQGPCKDLFQELTRLTHEYLSVAPFADYLDSIYFNRFLQWKWLERQPVTKNTFRQYRVLGKGGFGEVCACQVRATGKMYACKKLEKKRIKKRKGEAMALNEKQILEKVNSRFVVSLAYAYETKDALCLVLTLMNGGDLKFHIYHMGQAGFPEARAVFYAAEICCGLEDLHRERIVYRDLKPENILLDDHGHIRISDLGLAVHVPEGQTIKGRVGTVGYMAPEVVKNERYTFSPDWWALGCLLYEMIAGQSPFQQRKKKIKREEVERLVKEVPEEYSERFSPQARSLCSQLLCKDPAERLGCRGGSAREVKEHPLFKKLNFKRLGAGMLEPPFKPDPQAIYCKDVLDIEQFSTVKGVELEPTDQDFYQKFATGSVPIPWQNEMVETECFQELNVFGLDGSVPPDLDWKGQPPAPPKKGLLQRLFSRQR

SEQ ID NO: 47130 - protein, 589 aa, Homo sapiens
MELENIVANTVLLKAREGGGGNRKGKSKKWRQMLQFPHISQCEELRLSLERDYHSLCERQPIGRLLFREFCATRPELSRCVAFLDGVAEYEVTPDDKRKACGRQLTQNFLSHTGPDLIPEVPRQLVTNCTQRLEQGPCKDLFQELTRLTHEYLSVAPFADYLDSIYFNRFLQWKWLERQPVTKNTFRQYRVLGKGGFGEVCACQVRATGKMYACKKLEKKRIKKRKGEAMALNEKQILEKVNSRFVVSLAYAYETKDALCLVLTLMNGGDLKFHIYHMGQAGFPEARAVFYAAEICCGLEDLHRERIVYRDLKPENILLDDHGHIRISDLGLAVHVPEGQTIKGRVGTVGYMAPEVVKNERYTFSPDWWALGCLLYEMIAGQSPFQQRKKKIKREEVERLVKEVPEEYSERFSPQARSLCSQLLCKDPAERLGCRGGSAREVKEHPLFKKLNFKRLGAGMLEPPFKPDPQAIYCKDVLDIEQFSTVKGVELEPTDQDFYQKFATGSVPIPWQNEMVETECFQELNVFGLDGSVPPDLDWKGQPPAPPKKGLLQRLFSRQRIAVETAATARKSSPPASSPQPEAPTSSWR

SEQ ID NO: 47131 - protein, 553 aa, Homo sapiens
MVDMGALDNLIANTAYLQARKPSDCDSKELQRRRRSLALPGLQGCAELRQKLSLNFHSLCEQQPIGRRLFRDFLATVPTFRKAATFLEDVQNWELAEEGPTKDSALQGLVATCASAPAPGNPQPFLSQAVATKCQAATTEEERVAAVTLAKAEAMAFLQEQPFKDFVTSAFYDKFLQWKLFEMQPVSDKYFTEFRVLGKGGFGEVCAVQVKNTGKMYACKKLDKKRLKKKGGEKMALLEKEILEKVSSPFIVSLAYAFESKTHLCLVMSLMNGGDLKFHIYNVGTRGLDMSRVIFYSAQIACGMLHLHELGIVYRDMKPENVLLDDLGNCRLSDLGLAVEMKGGKPITQRAGTNGYMAPEILMEKVSYSYPVDWFAMGCSIYEMVAGRTPFKDYKEKVSKEDLKQRTLQDEVKFQHDNFTEEAKDICRLFLAKKPEQRLGSREKSDDPRKHHFFKTINFPRLEAGLIEPPFVPDPSVVYAKDIAEIDDFSEVRGVEFDDKDKQFFKNFATGAVPIAWQEEIIETGLFEELNDPNRPTGCEEGNSSKSGVCLLL

SEQ ID NO: 47132 - protein, 761 aa, Homo sapiens
MSRKGPRAEVCADCSAPDPGWASISRGVLVCDECCSVHRSLGRHISIVKHLRHSAWPPTLLQMVHTLASNGANSIWEHSLLDPAQVQSGRRKANPQDKVHPIKSEFIRAKYQMLAFVHKLPCRDDDGVTAKDLSKQLHSSVRTGNLETCLRLLSLGAQANFFHPEKGTTPLHVAAKAGQTLQAELLVVYGADPGSPDVNGRTPIDYARQAGHHELAERLVECQYELTDRLAFYLCGRKPDHKNGHYIIPQMADSLDLSELAKAAKKKLQALSNRLFEELAMDVYDEVDRRENDAVWLATQNHSTLVTERSAVPFLPVNPEYSATRNQGRQKLARFNAREFATLIIDILSEAKRRQQGKSLSSPTDNLELSLRSQSDLDDQHDYDSVASDEDTDQEPLRSTGATRSNRARSMDSSDLSDGAVTLQEYLELKKALATSEAKVQQLMKVNSSLSDELRRLQREIHKLQAENLQLRQPPGPVPTPPLPSERAEHTPMAPGGSTHRRDRQAFSMYEPGSALKPFGGPPGDELTTRLQPFHSTELEDDAIYSVHVPAGLYRIRKGVSASAVPFTPSSPLLSCSQEGSRHTSKLSRHGSGADSDYENTQSGDPLLGLEGKRFLELGKEEDFHPELESLDGDLDPGLPSTEDVILKTEQVTKNIQELLRAAQEFKHDSFVPCSEKIHLAVTEMASLFPKRPALEPVRSSLRLLNASAYRLQSECRKTVPPEPGAPVDFQLLTQQVIQCAYDIAKAAKQLVTITTREKKQ

SEQ ID NO: 47133 - protein, 177 aa, Homo sapiens
MSRKGPRAEVCADCSAPDPGWASISRGVLVCDECCSVHRSLGRHISIVKHLRHSAWPPTLLQMVHTLASNGANSIWEHSLLDPAQVQSGRRKANPQDKVHPIKSEFIRAKYQMLAFVHKLPCRDDDGVTAKDDLTGHRSWATPDINPHPNRATGTSALSAATLPGSQVPWCPPLSSP

SEQ ID NO: 47134 - protein, 770 aa, Homo sapiens
MSRKGPRAEVCADCSAPDPGWASISRGVLVCDECCSVHRSLGRHISIVKHLRHSAWPPTLLQMVHTLASNGANSIWEHSLLDPAQVQSGRRKANPQDKVHPIKSEFIRAKYQMLAFVHKLPCRDDDGVTAKDLSKQLHSSVRTGNLETCLRLLSLGAQANFFHPEKGTTPLHVAAKAGQTLQAELLVVYGADPGSPDVNGRTPIDYARQAGHHELAERLVECQYELTDRLAFYLCGRKPDHKNGHYIIPQMADRSRQKCMSQSLDLSELAKAAKKKLQALSNRLFEELAMDVYDEVDRRENDAVWLATQNHSTLVTERSAVPFLPVNPEYSATRNQGRQKLARFNAREFATLIIDILSEAKRRQQGKSLSSPTDNLELSLRSQSDLDDQHDYDSVASDEDTDQEPLRSTGATRSNRARSMDSSDLSDGAVTLQEYLELKKALATSEAKVQQLMKVNSSLSDELRRLQREIHKLQAENLQLRQPPGPVPTPPLPSERAEHTPMAPGGSTHRRDRQAFSMYEPGSALKPFGGPPGDELTTRLQPFHSTELEDDAIYSVHVPAGLYRIRKGVSASAVPFTPSSPLLSCSQEGSRHTSKLSRHGSGADSDYENTQSGDPLLGLEGKRFLELGKEEDFHPELESLDGDLDPGLPSTEDVILKTEQVTKNIQELLRAAQEFKHDSFVPCSEKIHLAVTEMASLFPKRPALEPVRSSLRLLNASAYRLQSECRKTVPPEPGAPVDFQLLTQQVIQCAYDIAKAAKQLVTITTREKKQ

SEQ ID NO: 47135 - protein, 403 aa, Homo sapiens
MFVASERKMRAHQVLTFLLLFVITSVASENASTSRGCGLDLLPQYVSLCDLDAIWGIVVEAVAGAGALITLLLMLILLVRLPFIKEKEKKSPVGLHFLFLLGTLGLFGLTFAFIIQEDETICSVRRFLWGVLFALCFSCLLSQAWRVRRLVRHGTGPAGWQLVGLALCLMLVQVIIAVEWLVLTVLRDTRPACAYEPMDFVMALIYDMVLLVVTLGLALFTLCGKFKRWKLNGAFLLITAFLSVLIWVAWMTMYLFGNVKLQQGDAWNDPTLAITLAASGWVFVIFHAIPEIHCTLLPALQENTPNYFDTSQPRMRETAFEEDVQLPRAYMENKAFSMDEHNAALRTAGFPNGSLGKRPSGSLGKRPSAPFRSNVYQPTEMAVVLNGGTIPTAPPSHTGRHLW

SEQ ID NO: 47136 - protein, 404 aa, Homo sapiens
MFVASERKMRAHQVLTFLLLFVITSVASENASTSRGCGLDLLPQYVSLCDLDAIWGIVVEAVAGAGALITLLLMLILLVRLPFIKEKEKKSPVGLHFLFLLGTLGLFGLTFAFIIQEDETICSVRRFLWGVLFALCFSCLLSQAWRVRRLVRHGTGPAGWQLVGLALCLMLVQVIIAVEWLVLTVLRDTRPACAYEPMDFVMALIYDMVLLVVTLGLALFTLCGKFKRWKLNGAFLLITAFLSVLIWVAWMTMYLFGNVKLQQGDAWNDPTLAITLAASGWVFVIFHAIPEIHCTLLPALQENTPNYFDTSQPRMRETAFEEDVQLPRAYMENKAFSMDEHNAALRTAGFPNGSLGKRPSGSLGKRPSAPFRSNVYQPTEMAVVLNGGTEMVTHPRSLESFGAF

SEQ ID NO: 47137 - protein, 429 aa, Homo sapiens
MNPPWSVAWGQEGFRAGTPGSRYLPRMFVASERKMRAHQVLTFLLLFVITSVASENASTSRGCGLDLLPQYVSLCDLDAIWGIVVEAVAGAGALITLLLMLILLVRLPFIKEKEKKSPVGLHFLFLLGTLGLFGLTFAFIIQEDETICSVRRFLWGVLFALCFSCLLSQAWRVRRLVRHGTGPAGWQLVGLALCLMLVQVIIAVEWLVLTVLRDTRPACAYEPMDFVMALIYDMVLLVVTLGLALFTLCGKFKRWKLNGAFLLITAFLSVLIWVAWMTMYLFGNVKLQQGDAWNDPTLAITLAASGWVFVIFHAIPEIHCTLLPALQENTPNYFDTSQPRMRETAFEEDVQLPRAYMENKAFSMDEHNAALRTAGFPNGSLGKRPSGSLGKRPSAPFRSNVYQPTEMAVVLNGGTIPTAPPSHTGRHLW

SEQ ID NO: 47138 - protein, 252 aa, Homo sapiens
MFVASERKMRAHQVLTFLLLFVITSVASENASTSRGCGLDLLPQYVSLCDLDAIWGIVVEAVAGAGALITLLLMLILLVRLPFFLLITAFLSVLIWVAWMTMYLFGNVKLQQGDAWNDPTLAITLAASGWVFVIFHAIPEIHCTLLPALQENTPNYFDTSQPRMRETAFEEDVQLPRAYMENKAFSMDEHNAALRTAGFPNGSLGKRPSGSLGKRPSAPFRSNVYQPTEMAVVLNGGTIPTAPPSHTGRHLW

SEQ ID NO: 47139 - protein, 162 aa, Homo sapiens
MAIHKALVMCLGLPLFLFPEQSYQGDMYPTRGVGYETILKEQKGQSMFVENKAFSMDEPVAAKRPVSPYSGYNGQLLTSVYQPTEMALMHKVPSEGAYDIILPRATANSQVMGSANSTLRAEDMYSAQSHQAATPPKDGKNSQVSELTQRGQANTNQVFLRL

SEQ ID NO: 47140 - protein, 486 aa, Homo sapiens
MRGRGSQQQQPTRRQGQKLPSPSPAGKYESAQPGGTQPEPGLGARMAIHKALVMCLGLPLFLFPGAWAQGHVPPGCSQGLNPLYYNLCDRSGAWGIVLEAVAGAGIVTTFVLTIILVASLPFVQDTKKRSLLGTQVFFLLGTLGLFCLVFACVVKPDFSTCASRRFLFGVLFAICFSCLAAHVFALNFLARKNHGPRGWVIFTVALLLTLVEVIINTEWLIITLVRGSGEGGPQGNSSAGWAVASPCAIANMDFVMALIYVMLLLLGAFLGAWPALCGRYKRWRKHGVFVLLTTATSVAIWVVWIVMYTYGNKQHNSPTWDDPTLAIALAANAWAFVLFYVIPEVSQVTKSSPEQSYQGDMYPTRGVGYETILKEQKGQSMFVENKAFSMDEPVAAKRPVSPYSGYNGQLLTSVYQPTEMALMHKVPSEGAYDIILPRATANSQVMGSANSTLRAEDMYSAQSHQAATPPKDGKNSQVFRNPYVWD

SEQ ID NO: 47141 - protein, 441 aa, Homo sapiens
MAIHKALVMCLGLPLFLFPGAWAQGHVPPGCSQGLNPLYYNLCDRSGAWGIVLEAVAGAGIVTTFVLTIILVASLPFVQDTKKRSLLGTQVFFLLGTLGLFCLVFACVVKPDFSTCASRRFLFGVLFAICFSCLAAHVFALNFLARKNHGPRGWVIFTVALLLTLVEVIINTEWLIITLVRGSGEGGPQGNSSAGWAVASPCAIANMDFVMALIYVMLLLLGAFLGAWPALCGRYKRWRKHGVFVLLTTATSVAIWVVWIVMYTYGNKQHNSPTWDDPTLAIALAANAWAFVLFYVIPEVSQVTKSSPEQSYQGDMYPTRGVGYETILKEQKGQSMFVENKAFSMDEPVAAKRPVSPYSGYNGQLLTSVYQPTEMALMHKVPSEGAYDIILPRATANSQVMGSANSTLRAEDMYSAQSHQAATPPKDGKNSQVFRNPYVWD

SEQ ID NO: 47142 - protein, 442 aa, Homo sapiens
MAIHKALVMCLGLPLFLFPGAWAQGHVPPGCSQGLNPLYYNLCDRSGAWGIVLEAVAGAGIVTTFVLTIILVASLPFVQDTKKRSLLGTQVFFLLGTLGLFCLVFACVVKPDFSTCASRRFLFGVLFAICFSCLAAHVFALNFLARKNHGPRGWVIFTVALLLTLVEVIINTEWLIITLVRGSGEGGPQGNSSAGWAVASPCAIANMDFVMALIYVMLLLLGAFLGAWPALCGRYKRWRKHGVFVLLTTATSVAIWVVWIVMYTYGNKQHNSPTWDDPTLAIALAANAWAFVLFYVIPEVSQVTKSSPEQSYQGDMYPTRGVGYETILKEQKGQSMFVENKAFSMDEPVAAKRPVSPYSGYNGQLLTSVYQPTEMALMHKVPSEGAYDIILPRATANSQVMGSANSTLRAEDMYSAQSHQAATPPKDGKNSQAQSPQSKTRW

SEQ ID NO: 47143 - protein, 453 aa, Homo sapiens
MGTQPEPGLGARMAIHKALVMCLGLPLFLFPGAWAQGHVPPGCSQGLNPLYYNLCDRSGAWGIVLEAVAGAGIVTTFVLTIILVASLPFVQDTKKRSLLGTQVFFLLGTLGLFCLVFACVVKPDFSTCASRRFLFGVLFAICFSCLAAHVFALNFLARKNHGPRGWVIFTVALLLTLVEVIINTEWLIITLVRGSGEGGPQGNSSAGWAVASPCAIANMDFVMALIYVMLLLLGAFLGAWPALCGRYKRWRKHGVFVLLTTATSVAIWVVWIVMYTYGNKQHNSPTWDDPTLAIALAANAWAFVLFYVIPEVSQVTKSSPEQSYQGDMYPTRGVGYETILKEQKGQSMFVENKAFSMDEPVAAKRPVSPYSGYNGQLLTSVYQPTEMALMHKVPSEGAYDIILPRATANSQVMGSANSTLRAEDMYSAQSHQAATPPKDGKNSQVFRNPYVWD

SEQ ID NO: 47144 - protein, 345 aa, Homo sapiens
MYKDCIESTGDYFLLCDAEGPWGIILESLAILGIVVTILLLLAFLFLMRKIQDCSQWNVLPTQLLFLLSVLGLFGLAFAFIIELNQQTAPVRYFLFGVLFALCFSCLLAHASNLVKLVRGCVSFSWTTILCIAIGCSLLQIIIATEYVTLIMTRGMMFVNMTPCQLNVDFVVLLVYVLFLMALTFFVSKATFCGPCENWKQHGRLIFITVLFSIIIWVVWISMLLRGNPQFQRQPQWDDPVVCIALVTNAWVFLLLYIVPELCILYRSCRQECPLQGNACPVTAYQHSFQVENQELSRARDSDGAEEDVALTSYGTPIQPQTVDPTQECFIPQAKLSPQQDAGGV

SEQ ID NO: 47145 - protein, 300 aa, Homo sapiens
MYKDCIESTGDYFLLCDAEGPWGIILESLAILGIVVTILLLLAFLFLMRKIQDCSQWNVLPTQLLFLLSVLGLFGLAFAFIIELNQQTAPVRYFLFGVLFALCFSCLLAHASNLVKLVRGCVSFSWTTILCIAIGCSLLQIIIATEYVTLIMTRGMMFVNMTPCQLNVDFVVLLVYVLFLMALTFFVSKATFCGPCENWKQHGRLIFITVLFSIIIWVVWISMLLRGNPQFQRQPQWDDPVVCIALVTNAWVFLLLYIVPELCILYRSCRQECPLQGNACPVTAYQHSFQVENQELSRDC

SEQ ID NO: 47146 - protein, 120 aa, Homo sapiens
MYKDCIESTGDYFLLCDAEGPWGIILESLAILGIVVTILLLLAFLFLMRKIQDCSQWNVLPTQLLFLLSVLGLFGLAFAFIIELNQQTAPVRYFLFGVLFALCFSCLLAHASNLVKLVRG

SEQ ID NO: 47147 - protein, 103 aa, Homo sapiens
METVQELIPLAKEMMAQKRKGKMVKLYVLGSVLALFGVVLGLMETVCSPFTAARRLRDQEAAVAELQAALERQALQKQALQEKGKQQDTVLGGRALSNRQHAS

SEQ ID NO: 47148 - protein, 499 aa, Homo sapiens
MELSEPIVENGETEMSPEESWEHKEEISEAEPGGGSLGDGRPPEESAHEMMEEEEEIPKPKSVVAPPGAPKKEHVNVVFIGHVDAGKSTIGGQIMYLTGMVDKRTLEKYEREAKEKNRETWYLSWALDTNQEERDKGKTVEVGRAYFETEKKHFTILDAPGHKSFVPNMIGGASQADLAVLVISARKGEFETGFEKGGQTREHAMLAKTAGVKHLIVLINKMDDPTVNWSNERYEECKEKLVPFLKKVGFNPKKDIHFMPCSGLTGANLKEQSDFCPWYIGLPFIPYLDNLPNFNRSVDGPIRLPIVDKYKDMGTVVLGKLESGSICKGQQLVMMPNKHNVEVLGILSDDVETDTVAPGENLKIRLKGIEEEEILPGFILCDPNNLCHSGRTFDAQIVIIEHKSIICPGYNAVLHIHTCIEEVEITALICLVDKKSGEKSKTRPRFVKQDQVCIARLRTAGTICLETFKDFPQMGRFTLRDEGKTIAIGKVLKLVPEKD

SEQ ID NO: 47149 - protein, 637 aa, Homo sapiens
MDPGSGGGGGGGGGGGSSSGSSSSDSAPDCWDQADMEAPGPGPCGGGGSLAAAAEAQRENLSAAFSRQLNVNAKPFVPNVHAAEFVPSFLRGPAAPPPPVGGAANNHGAGSGAGGRAAPVESSQEEQSLCEGSNSAVSMELSEPIVENGETEMSPEESWEHKEEISEAEPGGGSLGDGRPPEESAHEMMEEEEEIPKPKSVVAPPGAPKKEHVNVVFIGHVDAGKSTIGGQIMYLTGMVDKRTLEKYEREAKEKNRETWYLSWALDTNQEERDKGKTVEVGRAYFETEKKHFTILDAPGHKSFVPNMIGGASQADLAVLVISARKGEFETGFEKGGQTREHAMLAKTAGVKHLIVLINKMDDPTVNWSNERYEECKEKLVPFLKKVGFNPKKDIHFMPCSGLTGANLKEQSDFCPWYIGLPFIPYLDNLPNFNRSVDGPIRLPIVDKYKDMGTVVLGKLESGSICKGQQLVMMPNKHNVEVLGILSDDVETDTVAPGENLKIRLKGIEEEEILPGFILCDPNNLCHSGRTFDAQIVIIEHKSIICPGYNAVLHIHTCIEEVEITALICLVDKKSGEKSKTRPRFVKQDQVCIARLRTAGTICLETFKDFPQMGRFTLRDEGKTIAIGKVLKLVPEKD

SEQ ID NO: 47150 - protein, 636 aa, Homo sapiens
MDPGSGGGGGGGGGGGSSSGSSSSDSAPDCWDQADMEAPGPGPCGGGGSLAAAAEAQRENLSAAFSRQLNVNAKPFVPNVHAAEFVPSFLRGPAAPPPPVGGAANNHGAGSGAGGRAAPVESSQEEQSLCEGSNSAVSMELSEPIENGETEMSPEESWEHKEEISEAEPGGGSLGDGRPPEESAHEMMEEEEEIPKPKSVVAPPGAPKKEHVNVVFIGHVDAGKSTIGGQIMYLTGMVDKRTLEKYEREAKEKNRETWYLSWALDTNQEERDKGKTVEVGRAYFETEKKHFTILDAPGHKSFVPNMIGGASQADLAVLVISARKGEFETGFEKGGQTREHAMLAKTAGVKHLIVLINKMDDPTVNWSNERYEECKEKLVPFLKKVGFNPKKDIHFMPCSGLTGANLKEQSDFCPWYIGLPFIPYLDNLPNFNRSVDGPIRLPIVDKYKDMGTVVLGKLESGSICKGQQLVMMPNKHNVEVLGILSDDVETDTVAPGENLKIRLKGIEEEEILPGFILCDPNNLCHSGRTFDAQIVIIEHKSIICPGYNAVLHIHTCIEEVEITALICLVDKKSGEKSKTRPRFVKQDQVCIARLRTAGTICLETFKDFPQMGRFTLRDEGKTIAIGKVLKLVPEKD

SEQ ID NO: 47151 - protein, 628 aa, Homo sapiens
MDSGSSSSDSAPDCWDQVDMESPGSAPSGDGVSSAVAEAQREPLSSAFSRKLNVNAKPFVPNVHAAEFVPSFLRGPTQPPTLPAGSGSNDETCTGAGYPQGKRMGRGAPVEPSREEPLVSLEGSNSAVTMELSEPVVENGEVEMALEESWEHSKEVSEAEPGGGSSGDSGPPEESGQEMMEEKEEIRKSKSVIVPSGAPKKEHVNVVFIGHVDAGKSTIGGQIMFLTGMVDKRTLEKYEREAKEKNRETWYLSWALDTNQEERDKGKTVEVGRAYFETERKHFTILDAPGHKSFVPNMIGGASQADLAVLVISARKGEFETGFEKGGQTREHAMLAKTAGVKHLIVLINKMDDPTVNWSIERYEECKEKLVPFLKKVGFSPKKDIHFMPCSGLTGANIKEQSDFCPWYTGLPFIPYLDNLPNFNRSIDGPIRLPIVDKYKDMGTVVLGKLESGSIFKGQQLVMMPNKHNVEVLGILSDDTETDFVAPGENLKIRLKGIEEEEILPGFILCDPSNLCHSGRTFDVQIVIIEHKSIICPGYNAVLHIHTCIEEVEITALISLVDKKSGEKSKTRPRFVKQDQVCIARLRTAGTICLETFKDFPQMGRFTLRDEGKTIAIGKVLKLVPEKD

SEQ ID NO: 47152 - protein, 545 aa, Homo sapiens
MDSGSNDETCTGAGYPQGKRMGRGAPVEPSREEPLVSLEGSNSAVTMELSEPVVENGEVEMALEESWEHSKEVSEAEPGGGSSGDSGPPEESGQEMMEEKEEIRKSKSVIVPSGAPKKEHVNVVFIGHVDAGKSTIGGQIMFLTGMVDKRTLEKYEREAKEKNRETWYLSWALDTNQEERDKGKTVEVGRAYFETERKHFTILDAPGHKSFVPNMIGGASQADLAVLVISARKGEFETGFEKGGQTREHAMLAKTAGVKHLIVLINKMDDPTVNWSIERYEECKEKLVPFLKKVGFSPKKDIHFMPCSGLTGANIKEQSDFCPWYTGLPFIPYLDNLPNFNRSIDGPIRLPIVDKYKDMGTVVLGKLESGSIFKGQQLVMMPNKHNVEVLGILSDDTETDFVAPGENLKIRLKGIEEEEILPGFILCDPSNLCHSGRTFDVQIVIIEHKSIICPGYNAVLHIHTCIEEVEITALISLVDKKSGEKSKTRPRFVKQDQVCIARLRTAGTICLETFKDFPQMGRFTLRDEGKTIAIGKVLKLVPEKD

SEQ ID NO: 47153 - protein, 454 aa, Homo sapiens
MTKREAEELIEIEIDGTEKAECTEESIVEQTYAPAECVSQAIDINEPIGNLKKLLEPRLQCSLDAHEICLQDIQLDPERSLFDQGVKTDGTVQLSVQVISYQGIEPKLNILEIVKPADTVEVVIDPDAHHAESEAHLVEEAQVITLDGTKHITTISDETSEQVTRWAAALEGYRKEQERLGIPYDPIQWSTDQVLHWVVWVMKEFSMTDIDLTTLNISGRELCSLNQEDFFQRVPRGEILWSHLELLRKYVLASQEQQMNEIVTIDQPVQIIPASVQSATPTTIKVINSSAKAAKVQRAPRISGEDRSSPGNRTGNNGQIQLWQFLLELLTDKDARDCISWVGDEGEFKLNQPELVAQKWGQRKNKPTMNYEKLSRALRYYYDGDMICKVQGKRFVYKFVCDLKTLIGYSAAELNRLVTECEQKKLAKMQLHGIAQPVTAVALATASLQTEKDN

SEQ ID NO: 47154 - protein, 454 aa, Homo sapiens; identical to SEQ ID NO: 47153

SEQ ID NO: 47155 - protein, 395 aa, Homo sapiens
MSLVDLGKKLLEAARAGQDDEVRILMANGAPFTTDWLGTSPLHLAAQYGHYSTTEVLLRAGVSRDARTKVDRTPLHMAASEGHASIVEVLLKHGADVNAKDMLKMTALHWATEHNHQEVVELLIKYGADVHTQSKFCKTAFDISIDNGNEDLAEILQIAMQNQINTNPESPDTVTIHAATPQFIIGPGGVVNLTGLVSSENSSKATDETGVSAVQFGNSSTSVLATLAALAEASAPLSNSSETPVVATEEVVTAESVDGAIQQVVSSGGQQVITIVTDGIQLGNLHSIPTSGIGQPIIVTMPDGQQVLTVPATDIAEETVISEEPPAKRQCIEIIENRVESAEIEEREALQKQLDEANREAQKYRQQLLKKEQEAEAYRQKLEAMTRLQTNKEAV

SEQ ID NO: 47156 - protein, 348 aa, Homo sapiens
MSLVDLGKKLLEAARAGQDDEVRILMANGAPFTTDWLGTSPLHLAAQYGHYSTTEVLLRAGVSRDARTKVDRTPLHMAASEGHASIVEVLLKHGADVNAKDMLKMTALHWATEHNHQEVVELLIKYGADVHTQSKFCKTAFDISIDNGNEDLAEILQIAMQNQINTNPESPDTVTIHAATPQFIIGPGGVVNLTDETGVSAVQFGNSSTSVLATLAALAEASAPLSNSSETPVVATEEVVTAESVDGAIQQVVSSGGQQVITIVTDGIQLGNLHSIPTSGIGQPIIVTMPDGQQVLTVPATDIAEETVISEEPPAKRQCIEIIENRVESAEIEVRSLLPGVLCRSHPK

SEQ ID NO: 47157 - protein, 383 aa, Homo sapiens
MSLVDLGKKLLEAARAGQDDEVRILMANGAPFTTDWLGTSPLHLAAQYGHYSTTEVLLRAGVSRDARTKVDRTPLHMAASEGHASIVEVLLKHGADVNAKDMLKMTALHWATEHNHQEVVELLIKYGADVHTQSKFCKTAFDISIDNGNEDLAEILQIAMQNQINTNPESPDTVTIHAATPQFIIGPGGVVNLTDETGVSAVQFGNSSTSVLATLAALAEASAPLSNSSETPVVATEEVVTAESVDGAIQQVVSSGGQQVITIVTDGIQLGNLHSIPTSGIGQPIIVTMPDGQQVLTVPATDIAEETVISEEPPAKRQCIEIIENRVESAEIEEREALQKQLDEANREAQKYRQQLLKKEQEAEAYRQKLEAMTRLQTNKEAV

SEQ ID NO: 47158 - protein, 348 aa, Homo sapiens; identical to SEQ ID NO: 47156

SEQ ID NO: 47159 - protein, 360 aa, Homo sapiens
MSLVDLGKKLLEAARAGQDDEVRILMANGAPFTTDWLGTSPLHLAAQYGHYSTTEVLLRAGVSRDARTKVDRTPLHMAASEGHASIVEVLLKHGADVNAKDMLKMTALHWATEHNHQEVVELLIKYGADVHTQSKFCKTAFDISIDNGNEDLAEILQIAMQNQINTNPESPDTVTIHAATPQFIIGPGGVVNLTGLVSSENSSKATDETGVSAVQFGNSSTSVLATLAALAEASAPLSNSSETPVVATEEVVTAESVDGAIQQVVSSGGQQVITIVTDGIQLGNLHSIPTSGIGQPIIVTMPDGQQVLTVPATDIAEETVISEEPPAKRQCIEIIENRVESAEIEVRSLLPGVLCRSHPK

SEQ ID NO: 47160 - protein, 89 aa, Homo sapiens
MSLVDLGKKLLEAARAGQDDEVRILMANGAPFTTDWLGTSPLHLAAQYGHYSTTEVLLRAGVSRDARTKVDRTPLHMAASEGHASIVEV

SEQ ID NO: 47161 - protein, 89 aa, Homo sapiens; identical to SEQ ID NO: 47160

SEQ ID NO: 47162 - protein, 117 aa, Homo sapiens
MKFVYKEEHPFEKRRSEGEKIRKKYPDRVPVIVEKAPKARIGDLDKKKYLVPSDLTVGQFYFLIRKRIHLRAEDALFFFVNNVIPPTSATMGQLYQEHHEEDFFLYIAYSDESVYGL

SEQ ID NO: 47163 - protein, 117 aa, Homo sapiens
MKFQYKEDHPFEYRKKEGEKIRKKYPDRVPVIVEKAPKARVPDLDKRKYLVPSDLTVGQFYFLIRKRIHLRPEDALFFFVNNTIPPTSATMGQLYEDNHEEDYFLYVAYSDESVYGK

SEQ ID NO: 47164 - protein, 146 aa, Homo sapiens
MKFQYKEDHPFEYRKKEGEKIRKKYPDRVPVIVEKAPKARVPDLDKRKYLVPSDLTVGQFYFLIRKRIHLRPEDALFFFVNNTIPPTSATMGQLYEVMVLVAQYWMPSSAVWHPLALVLDALITHLRSGAEGVIYPDPLTYGSVRL

SEQ ID NO: 47165 - protein, 146 aa, Homo sapiens; identical to SEQ ID NO: 47164

SEQ ID NO: 47166 - protein, 70 aa, Homo sapiens
MKFQYKEDHPFEYRKKEGEKIRKKYPDRVPVIVEKAPKARVPDLDKRKYLVPSDLTVGQFYFLIRKRIHL

SEQ ID NO: 47167 - protein, 117 aa, Homo sapiens; identical to SEQ ID NO: 47163

SEQ ID NO: 47168 - protein, 117 aa, Homo sapiens
MKWMFKEDHSLEHRCVESAKIRAKYPDRVPVIVEKVSGSQIVDIDKRKYLVPSDITVAQFMWIIRKRIQLPSEKAIFLFVDKTVPQSSLTMGQLYEKEKDEDGFLYVAYSGENTFGF

SEQ ID NO: 47169 - protein, 447 aa, Homo sapiens
MPVLYDRLLKLKEMFNSKFGSIPKFYVRAPGRVNIIGEHIDYCGYSVLPMAVEQDVLIAVEPVKTYALQLANTNPLYPDFSTSANNIQIDKTKPLWHNYFLCGLKGIQEHFGLSNLTGMNCLVDGNIPPSSGLSSSSALVCCAGLVTLTVLGRNLSKVELAEICAKSERYIGTEGGGMDQSISFLAEEGTAKLIEFSPLRATDVKLPSGAVFVIANSCVEMNKAATSHFNIRVMECRLAAKLLAKYKSLQWDKVLRLEEVQAKLGISLEEMLLVTEDALHPEPYNPEEICRCLGISLEELRTQILSPNTQDVLIFKLYQRAKHVYSEAARVLQFKKICEEAPENMVQLLGELMNQSHMSCRDMYECSCPELDQLVDICRKFGAQGSRLTGAGWGGCTVSMVPADKLPSFLANVHKAYYQRSDGSLAPEKQSLFATKPGGGALVLLEA

SEQ ID NO: 47170 - protein, 434 aa, Homo sapiens
MFNSKFGSIPKFYVRAPGRVNIIGEHIDYCGYSVLPMAVEQDVLIAVEPVKTYALQLANTNPLYPDFSTSANNIQIDKTKPLWHNYFLCGLKGIQEHFGLSNLTGMNCLVDGNIPPSSGLSSSSALVCCAGLVTLTVLGRNLSKVELAEICAKSERYIGTEGGGMDQSISFLAEEGTAKLIEFSPLRATDVKLPSGAVFVIANSCVEMNKAATSHFNIRVMECRLAAKLLAKYKSLQWDKVLRLEEVQAKLGISLEEMLLVTEDALHPEPYNPEEICRCLGISLEELRTQILSPNTQDVLIFKLYQRAKHVYSEAARVLQFKKICEEAPENMVQLLGELMNQSHMSCRDMYECSCPELDQLVDICRKFGAQGSRLTGAGWGGCTVSMVPADKLPSFLANVHKAYYQRSDGSLAPEKQSLFATKPGGGALVLLEA

SEQ ID NO: 47171 - protein, 207 aa, Homo sapiens
MNCLVDGNIPPSSGLSSSSALVCCAGLVTLTVLGRNLSKVELAEICAKSERYIGTEGGGMDQSISFLAEEGTAKLIEFSPLRATDVKLPSGAVFVIANSCVEMNKAATSHFNIRVMECRLAAKLLAKYKSLQWDKVLRLEEVQAKLGISLEEMLLVTEDALHPEPYNPEEICRCLGISLEELRTQILSPNTQDDGVVLYRPGWSATA

SEQ ID NO: 47172 - protein, 434 aa, Homo sapiens; identical to SEQ ID NO: 47170

SEQ ID NO: 47173 - protein, 434 aa, Homo sapiens; identical to SEQ ID NO: 47170

SEQ ID NO: 47174 - protein, 458 aa, Homo sapiens
MATESPATRRVQVAEHPRLLKLKEMFNSKFGSIPKFYVRAPGRVNIIGEHIDYCGYSVLPMAVEQDVLIAVEPVKTYALQLANTNPLYPDFSTSANNIQIDKTKPLWHNYFLCGLKGIQEHFGLSNLTGMNCLVDGNIPPSSGLSSSSALVCCAGLVTLTVLGRNLSKVELAEICAKSERYIGTEGGGMDQSISFLAEEGTAKLIEFSPLRATDVKLPSGAVFVIANSCVEMNKAATSHFNIRVMECRLAAKLLAKYKSLQWDKVLRLEEVQAKLGISLEEMLLVTEDALHPEPYNPEEICRCLGISLEELRTQILSPNTQDVLIFKLYQRAKHVYSEAARVLQFKKICEEAPENMVQLLGELMNQSHMSCRDMYECSCPELDQLVDICRKFGAQGSRLTGAGWGGCTVSMVPADKLPSFLANVHKAYYQRSDGSLAPEKQSLFATKPGGGALVLLEA

SEQ ID NO: 47175 - protein, 423 aa, Homo sapiens
MLPPQKKPWESMAKGLVLGALFTSFLLLVYSYAVPPLHAGLASTTPEAAASCSPPALEPEAVIRANGSAGECQPRRNIVFLKTHKTASSTLLNILFRFGQKHRLKFAFPNGRNDFDYPTFFARSLVQDYRPGACFNIICNHMRFHYDEVRGLVPTNAIFITVLRDPARLFESSFHYFGPVVPLTWKLSAGDKLTEFLQDPDRYYDPNGFNAHYLRNLLFFDLGYDNSLDPSSPQVQEHILEVERRFHLVLLQEYFDESLVLLKDLLCWELEDVLYFKLNARRDSPVPRLSGELYGRATAWNMLDSHLYRHFNASFWRKVEAFGRERMAREVAALRHANERMRTICIDGGHAVDAAAIQDEAMQPWQPLGTKSILGYNLKKSIGQRHAQLCRRMLTPEIQYLMDLGANLWVTKLWKFIRDFLRW

SEQ ID NO: 47176 - protein, 423 aa, Homo sapiens; identical to SEQ ID NO: 47175

SEQ ID NO: 47177 - protein, 423 aa, Homo sapiens; identical to SEQ ID NO: 47175

SEQ ID NO: 47178 - protein, 423 aa, Homo sapiens; identical to SEQ ID NO: 47175

SEQ ID NO: 47179 - protein, 423 aa, Homo sapiens; identical to SEQ ID NO: 47175

SEQ ID NO: 47180 - protein, 423 aa, Homo sapiens; identical to SEQ ID NO: 47175

SEQ ID NO: 47181 - protein, 85 aa, Homo sapiens
MLPPQKKPWESMAKGLVLGALFTSFLLLVYSYAVPPLHAGLASTTPEAAASCSPPALEPEAVIRANGSAGECQPRRNIVFLKTHK

SEQ ID NO: 47182 - protein, 170 aa, Homo sapiens
MLPPQKKPWESMAKGLVLGALFTSFLLLVYSYAVPPLHAGLASTTPEAAASCSPPALEPEAVIRANGSAGECQPRRNIVFLKTHKTASSTLLNILFRFGQKHRLKFAFPNGRNDFDYPTFFARSLVQDYRPGACFNIICNHMRFHYDEVRGLVPTNAIFITVLRDPARLF

SEQ ID NO: 47183 - protein, 149 aa, Homo sapiens
MLPPQKKPWESMAKGLVLGALFTSFLLLVYSYAVPPLHAGLASTTPEAAASCSPPALEPEAVIRANGSAGECQPRRNIVFLKTHKTASSTLLNILFRFGQKHRLKFAFPNGRNDFDYPTFFARSLVQDYRPGACFNIICNHMRFHYDEV

SEQ ID NO: 47184 - protein, 99 aa, Homo sapiens
MLPPQKKPWESMAKGLVLGALFTSFLLLVYSYAVPPLHAGLASTTPEAAASCSPPALEPEAVIRANGSAGECQPRRNIVFLKTHKTASSTLLNILFRFG

SEQ ID NO: 47185 - protein, 103 aa, Homo sapiens
MLPPQKKPWESMAKGLVLGALFTSFLLLVYSYAVPPLHAGLASTTPEAAASCSPPALEPEAVIRANGSAGECQPRRNIVFLKTHKTASSTLLNILFRFGQKHR

SEQ ID NO: 47186 - protein, 199 aa, Homo sapiens
MLPPQKKPWESMAKGLVLGALFTSFLLLVYSYAVPPLHAGLASTTPEAAASCSPPALEPEAVIRANGSAGECQPRRNIVFLKTHKTASSTLLNILFRFGQKHRLKFAFPNGRNDFDYPTFFARSLVQDYRPGACFNIICNHMRFHYDEVRGLVPTNAIFITVLRDPARLFESSFHYFGPVVPLTWKLSAGDKLTEFLQD

SEQ ID NO: 47187 - protein, 279 aa, Homo sapiens
MLPPQKKPWESMAKGLVLGALFTSFLLLVYSYAVPPLHAGLASTTPEAAASCSPPALEPEAVIRANGSAGECQPRRNIVFLKTHKTASSTLLNILFRFGQKHRLKFAFPNGRNDFDYPTFFARSLVQDYRPGACFNIICNHMRFHYDEVRGLVPTNAIFITVLRDPARLFESSFHYFGPVVPLTWKLSAGDKLTEFLQDPDRYYDPNGFNAHYLRNLLFFDLGYDNSLDPSSPQVQEHILEVERRFHLVLLQEYFDESLVLLKDLLCWELEDVLYFKLN

SEQ ID NO: 47188 - protein, 423 aa, Homo sapiens; identical to SEQ ID NO: 47175

SEQ ID NO: 47189 - protein, 143 aa, Homo sapiens
MLPPQKKPWESMAKGLVLGALFTSFLLLVYSYAVPPLHAGLASTTPEAAASCSPPALEPEAVIRANGSAGECQPRRNIVFLKTHKTASSTLLNILFRFGQKHRLKFAFPNGRNDFDYPTFFARSLVQDYRPGACFNIICNHMR

SEQ ID NO: 47190 - protein, 76 aa, Homo sapiens
MLPPQKKPWESMAKGLVLGALFTSFLLLVYSYAVPPLHAGLASTTPEAAASCSPPALEPEAVIRANGSAGECQPRR

SEQ ID NO: 47191 - protein, 95 aa, Homo sapiens
MLPPQKKPWESMAKGLVLGALFTSFLLLVYSYAVPPLHAGLASTTPEAAASCSPPALEPEAVIRANGSAGECQPRRNIVFLKTHKTASSTLLNIL

SEQ ID NO: 47192 - protein, 71 aa, Homo sapiens
MLPPQKKPWESMAKGLVLGALFTSFLLLVYSYAVPPLHAGLASTTPEAAASCSPPALEPEAVIRANGSAGE

SEQ ID NO: 47193 - protein, 242 aa, Homo sapiens
MLPPQKKPWESMAKGLVLGALFTSFLLLVYSYAVPPLHAGLASTTPEAAASCSPPALEPEAVIRANGSAGECQPRRNIVFLKTHKTASSTLLNILFRFGQKHRLKFAFPNGRNDFDYPTFFARSLVQDYRPGACFNIICNHMRFHYDEVRGLVPTNAIFITVLRDPARLFESSFHYFGPVVPLTWKLSAGDKLTEFLQDPDRYYDPNGFNAHYLRNLLFFDLGYDNSLDPSSPQVQEHILEV

SEQ ID NO: 47194 - protein, 100 aa, Homo sapiens
MLPPQKKPWESMAKGLVLGALFTSFLLLVYSYAVPPLHAGLASTTPEAAASCSPPALEPEAVIRANGSAGECQPRRNIVFLKTHKTASSTLLNILFRFGQ

SEQ ID NO: 47195 - protein, 398 aa, Homo sapiens
MMSMLGGLQRYFRVILLLLLALTLLLLAGFLHSDLELDTPLFGGQAEGPPVTNIMFLKTHKTASSTVLNILYRFAETHNLSVALPAGSRVHLGYPWLFLARYVEGVGSQQRFNIMCNHLRFNLPQVQKVMPNDTFYFSILRNPVFQLESSFIYYKTYAPAFRGAPSLDAFLASPRTFYNDSRHLRNVYAKNNMWFDFGFDPNAQCEEGYVRARIAEVERRFRLVLIAEHLDESLVLLRRRLRWALDDVVAFRLNSRSARSVARLSPETRERARSWCALDWRLYEHFNRTLWAQLRAELGPRRLRGEVERLRARRRELASLCLQDGGALKNHTQIRDPRLRPYQSGKADILGYNLRPGLDNQTLGVCQRLVMPELQYMARLYALQFPEKPLKNIPFLGA

SEQ ID NO: 47196 - protein, 431 aa, Homo sapiens
MPPILQRLQQATKMMSRRKILLLVLGCSTVSLLIHQGAQLSWYPKLFPLSCPPLRNSPPRPKHMTVAFLKTHKTAGTTVQNILFRFAERHNLTVALPHPSCEHQFCYPRNFSAHFVHPATRPPHVLASHLRFDRAELERLMPPSTVYVTILREPAAMFESLFSYYNQYCPAFRRVPNASLEAFLRAPEAYYRAGEHFAMFAHNTLAYDLGGDNERSPRDDAAYLAGLIRQVEEVFSLVMIAEYFDESLVLLRRLLAWDLDDVLYAKLNARAASSRLAAIPAALARAARTWNALDAGLYDHFNATFWRHVARAGRACVEREARELREARQRLLRRCFGDEPLLRPAAQIRTKQLQPWQPSRKVDIMGYDLPGGGAGPATEACLKLAMPEVQYSNYLLRKQKRRGGARARPEPVLDNPPPRPIRVLPRGPQGP

SEQ ID NO: 47197 - protein, 431 aa, Homo sapiens; identical to SEQ ID NO: 47196

SEQ ID NO: 47198 - protein, 486 aa, Homo sapiens
MGPLSPARTLRLWGPRSLGVALGVFMTIGFALQLLGGPFQRRLPGLQLRQPSAPSLRPALPSCPPRQRLVFLKTHKSGSSSVLSLLHRYGDQHGLRFALPARYQFGYPKLFQASRVKGYRPQGGGTQLPFHILCHHMRFNLKEVLQVMPSDSFFFSIVRDPAALARSAFSYYKSTSSAFRKSPSLAAFLANPRGFYRPGARGDHYARNLLWFDFGLPFPPEKRAKRGNIHPPRDPNPPQLQVLPSGAGPRAQTLNPNALIHPVSTVTDHRSQISSPASFDLGSSSFIQWGLAWLDSVFDLVMVAEYFDESLVLLADALCWGLDDVVGFMHNAQAGHKQGLSTVSNSGLTAEDRQLTARARAWNNLDWALYVHFNRSLWARIEKYGQGRLQTAVAELRARREALAKHCLVGGEASDPKYITDRRFRPFQFGSAKVLGYILRSGLSPQDQEECERLATPELQYKDKLDAKQFPPTVSLPLKTSRPLSP

SEQ ID NO: 47199 - protein, 486 aa, Homo sapiens; identical to SEQ ID NO: 47198

SEQ ID NO: 47200 - protein, 424 aa, Homo sapiens
MTPRSPTSAFRSCTAVSSCLCPSSWPWLHLSVTSPFPVPHGPSLSCQDAAALGTSEPGGGSGSLHDHWLCTPALGRALPEEVLQVMPSDSFFFSIVRDPAALARSAFSYYKSTSSAFRKSPSLAAFLANPRGFYRPGARGDHYARNLLWFDFGLPFPPEKRAKRGNIHPPRDPNPPQLQVLPSGAGPRAQTLNPNALIHPVSTVTDHRSQISSPASFDLGSSSFIQWGLAWLDSVFDLVMVAEYFDESLVLLADALCWGLDDVVGFMHNAQAGHKQGLSTVSNSGLTAEDRQLTARARAWNNLDWALYVHFNRSLWARIEKYGQGRLQTAVAELRARREALAKHCLVGGEASDPKYITDRRFRPFQFGSAKVLGYILRSGLSPQDQEECERLATPELQYKDKLDAKQFPPTVSLPLKTSRPLSP

SEQ ID NO: 47201 - protein, 546 aa, Homo sapiens
MPGFLVRILPLLLVLLLLGPTRGLRNATQRMFEIDYSRDSFLKDGQPFRYISGSIHYSRVPRFYWKDRLLKMKMAGLNAIQTLPGSCGQVVGSPSAQDEASPLSEWRASYNSAGSNITDAFLSQRKCEPKGPLINSEFYTGWLDHWGQPHSTIKTEAVASSLYDILARGASVNLYMFIGGTNFAYWNGANSPYAAQPTSYDYDAPLSEAGDLTEKYFALRNIIQKFEKVPEGPIPPSTPKFAYGKVTLEKLKTVGAALDILCPSGPIKSLYPLTFIQVKQHYGFVLYRTTLPQDCSNPAPLSSPLNGVHDRAYVAVDGIPQGVLERNNVITLNITGKAGATLDLLVENMGRVNYGAYINDFKGLVSNLTLSSNILTDWTIFPLDTEDAVCSHLGGWGHRDSGHHDEAWAHNSSNYTLPAFYMGNFSIPSGIPDLPQDTFIQFPGWTKGQVWINGFNLGRYWPARGPQLTLFVPQHILMTSAPNTITVLELEWAPCSSDDPELCAVTFVDRPVIGSSVTYDHPSKPVEKRLMPPPPQKNKDSWLDHV

SEQ ID NO: 47202 - protein, 647 aa, Homo sapiens
MFEIDYSRDSFLKDGQPFRYISGSIHYSRVPRFYWKDRLLKMKMAGLNAIQTYVPWNFHEPWPGQYQFSEDHDVEYFLRLAHELGLLVILRPGPYICAEWEMGGLPAWLLEKESILLRSSDPDYLAAVDKWLGVLLPKMKPLLYQNGGPVITVQVENEYGSYFACDFDYLRFLQKRFRHHLGDDVVLFTTDGAHKTFLKCGALQGLYTTVDFGTGSNITDAFLSQRKCEPKGPLINSEFYTGWLDHWGQPHSTIKTEAVASSLYDILARGASVNLYMFIGGTNFAYWNGANSPYAAQPTSYDYDAPLSEAGDLTEKYFALRNIIQKFEKVPEGPIPPSTPKFAYGKVTLEKLKTVGAALDILCPSGPIKSLYPLTFIQVKQHYGFVLYRTTLPQDCSNPAPLSSPLNGVHDRAYVAVDGIPQGVLERNNVITLNITGKAGATLDLLVENMGRVNYGAYINDFKGLVSNLTLSSNILTDWTIFPLDTEDAVCSHLGGWGHRDSGHHDEAWAHNSSNYTLPAFYMGNFSIPSGIPDLPQDTFIQFPGWTKGQVWINGFNLGRYWPARGPQLTLFVPQHILMTSAPNTITVLELEWAPCSSDDPELCAVTFVDRPVIGSSVTYDHPSKPVEKRLMPPPPQKNKDSWLDHV

SEQ ID NO: 47203 - protein, 677 aa, Homo sapiens
MPGFLVRILPLLLVLLLLGPTRGLRNATQRMFEIDYSRDSFLKDGQPFRYISGSIHYSRVPRFYWKDRLLKMKMAGLNAIQTYVPWNFHEPWPGQYQFSEDHDVEYFLRLAHELGLLVILRPGPYICAEWEMGGLPAWLLEKESILLRSSDPDYLAAVDKWLGVLLPKMKPLLYQNGGPVITVQVENEYGSYFACDFDYLRFLQKRFRHHLGDDVVLFTTDGAHKTFLKCGALQGLYTTVDFGTGSNITDAFLSQRKCEPKGPLINSEFYTGWLDHWGQPHSTIKTEAVASSLYDILARGASVNLYMFIGGTNFAYWNGANSPYAAQPTSYDYDAPLSEAGDLTEKYFALRNIIQKFEKVPEGPIPPSTPKFAYGKVTLEKLKTVGAALDILCPSGPIKSLYPLTFIQVKQHYGFVLYRTTLPQDCSNPAPLSSPLNGVHDRAYVAVDGIPQGVLERNNVITLNITGKAGATLDLLVENMGRVNYGAYINDFKGLVSNLTLSSNILTDWTIFPLDTEDAVCSHLGGWGHRDSGHHDEAWAHNSSNYTLPAFYMGNFSIPSGIPDLPQDTFIQFPGWTKGQVWINGFNLGRYWPARGPQLTLFVPQHILMTSAPNTITVLELEWAPCSSDDPELCAVTFVDRPVIGSSVTYDHPSKPVEKRLMPPPPQKNKDSWLDHV

SEQ ID NO: 47204 - protein, 725 aa, Homo sapiens
MPGFLVRILPLLLVLLLLGPTRGLRSRFLPWAFHLPRQAPKSQLPLHKRGTKTAPNEHASSNRSGRRRRRQQWNATQRMFEIDYSRDSFLKDGQPFRYISGSIHYSRVPRFYWKDRLLKMKMAGLNAIQTYVPWNFHEPWPGQYQFSEDHDVEYFLRLAHELGLLVILRPGPYICAEWEMGGLPAWLLEKESILLRSSDPDYLAAVDKWLGVLLPKMKPLLYQNGGPVITVQVENEYGSYFACDFDYLRFLQKRFRHHLGDDVVLFTTDGAHKTFLKCGALQGLYTTVDFGTGSNITDAFLSQRKCEPKGPLINSEFYTGWLDHWGQPHSTIKTEAVASSLYDILARGASVNLYMFIGGTNFAYWNGANSPYAAQPTSYDYDAPLSEAGDLTEKYFALRNIIQKFEKVPEGPIPPSTPKFAYGKVTLEKLKTVGAALDILCPSGPIKSLYPLTFIQVKQHYGFVLYRTTLPQDCSNPAPLSSPLNGVHDRAYVAVDGIPQGVLERNNVITLNITGKAGATLDLLVENMGRVNYGAYINDFKGLVSNLTLSSNILTDWTIFPLDTEDAVCSHLGGWGHRDSGHHDEAWAHNSSNYTLPAFYMGNFSIPSGIPDLPQDTFIQFPGWTKGQVWINGFNLGRYWPARGPQLTLFVPQHILMTSAPNTITVLELEWAPCSSDDPELCAVTFVDRPVIGSSVTYDHPSKPVEKRLMPPPPQKNKDSWLDHV

SEQ ID NO: 47205 - protein, 685 aa, Homo sapiens
MAEWLLSASWQRRAKAMTAAAGSAGRAAVPLLLCALLAPGGAYVLDDSDGLGREFDGIGAVSGGGATSRLLVNYPEPYRSQILDYLFKPNFGASLHILKVEIGGDGQTTDGTEPSHMHYALDENYFRGYEWWLMKEAKKRNPNITLIGLPWSFPGWLGKGFDWPYVNLQLTAYYVVTWIVGAKRYHDLDIDYIGIWNERSYNANYIKILRKMLNYQGLQRVKIIASDNLWESISASMLLDAELFKVVDVIGAHYPGTHSAKDAKLTGKKLWSSEDFSTLNSDMGAGCWGRILNQNYINGYMTSTIAWNLVASYYEQLPYGRCGLMTAQEPWSGHYVVESPVWVSAHTTQFTQPGWYYLKTVGHLEKGGSYVALTDGLGNLTIIIETMSHKHSKCIRPFLPYFNVSQQFATFVLKGSFSEIPELQVWYTKLGKTSERFLFKQLDSLWLLDSDGSFTLSLHEDELFTLTTLTTGRKGSYPLPPKSQPFPSTYKDDFNVDYPFFSEAPNFADQTGVFEYFTNIEDPGEHHFTLRQVLNQRPITWAADASNTISIIGDYNWTNLTIKCDVYIETPDTGGVFIAGRVNKGGILIRSARGIFFWIFANGSYRVTGDLAGWIIYALGRVEVTAKKWYTLTLTIKGHFTSGMLNDKSLWTDIPVNFPKNGWAAIGTHSFEFAQFDNFLVEATR

SEQ ID NO: 47206 - protein, 662 aa, Homo sapiens
MAEWLLSASWQRRAKAMTAAAGSAGRAAVPLLLCALLAPGGAYVLDDSDGLGREFDGIGAVSGGGPNFGASLHILKVEIGGDGQTTDGTEPSHMHYALDENYFRGYEWWLMKEAKKRNPNITLIGLPWSFPGWLGKGFDWPYVNLQLTAYYVVTWIVGAKRYHDLDIDYIGIWNERSYNANYIKILRKMLNYQGLQRVKIIASDNLWESISASMLLDAELFKVVDVIGAHYPGTHSAKDAKLTGKKLWSSEDFSTLNSDMGAGCWGRILNQNYINGYMTSTIAWNLVASYYEQLPYGRCGLMTAQEPWSGHYVVESPVWVSAHTTQFTQPGWYYLKTVGHLEKGGSYVALTDGLGNLTIIIETMSHKHSKCIRPFLPYFNVSQQFATFVLKGSFSEIPELQVWYTKLGKTSERFLFKQLDSLWLLDSDGSFTLSLHEDELFTLTTLTTGRKGSYPLPPKSQPFPSTYKDDFNVDYPFFSEAPNFADQTGVFEYFTNIEDPGEHHFTLRQVLNQRPITWAADASNTISIIGDYNWTNLTIKCDVYIETPDTGGVFIAGRVNKGGILIRSARGIFFWIFANGSYRVTGDLAGWIIYALGRVEVTAKKWYTLTLTIKGHFTSGMLNDKSLWTDIPVNFPKNGWAAIGTHSFEFAQFDNFLVEATR

SEQ ID NO: 47207 - protein, 659 aa, Homo sapiens
MLGKSHGRATHGPLPLADLGIHLPCVKVLHQVTPEEKPAATSRLLVNYPEPYRSQILDYLFKPNFGASLHILKVEIGGDGQTTDGTEPSHMHYALDENYFRGYEWWLMKEAKKRNPNITLIGLPWSFPGWLGKGFDWPYVNLQLTAYYVVTWIVGAKRYHDLDIDYIGIWNERSYNANYIKILRKMLNYQGLQRVKIIASDNLWESISASMLLDAELFKVVDVIGAHYPGTHSAKDAKLTGKKLWSSEDFSTLNSDMGAGCWGRILNQNYINGYMTSTIAWNLVASYYEQLPYGRCGLMTAQEPWSGHYVVESPVWVSAHTTQFTQPGWYYLKTVGHLEKGGSYVALTDGLGNLTIIIETMSHKHSKCIRPFLPYFNVSQQFATFVLKGSFSEIPELQVWYTKLGKTSERFLFKQLDSLWLLDSDGSFTLSLHEDELFTLTTLTTGRKGSYPLPPKSQPFPSTYKDDFNVDYPFFSEAPNFADQTGVFEYFTNIEDPGEHHFTLRQVLNQRPITWAADASNTISIIGDYNWTNLTIKCDVYIETPDTGGVFIAGRVNKGGILIRSARGIFFWIFANGSYRVTGDLAGWIIYALGRVEVTAKKWYTLTLTIKGHFTSGMLNDKSLWTDIPVNFPKNGWAAIGTHSFEFAQFDNFLVEATR

SEQ ID NO: 47208 - protein, 474 aa, Homo sapiens
MLNYQGLQRVKIIASDNLWESISASMLLDAELFKVVDVIGAHYPGTHSAKDAKLTGKKLWSSEDFSTLNSDMGAGCWGRILNQNYINGYMTSTIAWNLVASYYEQLPYGRCGLMTAQEPWSGHYVVESPVWVSAHTTQFTQPGWYYLKTVGHLEKGGSYVALTDGLGNLTIIIETMSHKHSKCIRPFLPYFNVSQQFATFVLKGSFSEIPELQVWYTKLGKTSERFLFKQLDSLWLLDSDGSFTLSLHEDELFTLTTLTTGRKGSYPLPPKSQPFPSTYKDDFNVDYPFFSEAPNFADQTGVFEYFTNIEDPGEHHFTLRQVLNQRPITWAADASNTISIIGDYNWTNLTIKCDVYIETPDTGGVFIAGRVNKGGILIRSARGIFFWIFANGSYRVTGDLAGWIIYALGRVEVTAKKWYTLTLTIKGHFTSGMLNDKSLWTDIPVNFPKNGWAAIGTHSFEFAQFDNFLVEATR

SEQ ID NO: 47209 - protein, 589 aa, Homo sapiens
MGFMVADLWATSRLLVNYPEPYRSQILDYLFKPNFGASLHILKVEIGGDGQTTDGTEPSHMHYALDENYFRGYEWWLMKEAKKRNPNITLIGLPWSFPGWLGKGFDWPYVNLQLTAYYVVTWIVGAKRYHDLDIDYIGIWNERSYNANYIKILRKMLNYQGLQRVKIIASDNLWESISASMLLDAELFKVVDVIGAHYPGTHSAKDAKLTGKKLWSSEDFSTLNSDMGAGCWGRILNQNYINGYMTSTIAWNLVASYYEQLPYGRCGLMTAQEPWSGHYVVESPVWVSAHTTQFTQPGWYYLKTVGHLEKGGSYVALTDGLGNLTIIIETMSHKHSKCIRPFLPYFNVSQQFATFVLKGSFSEIPELQVWYTKLGKTSERFLFKQLDSLWLLDSDGSFTLSLHEDELFTLTTLTTGRKGSYPLPPKSQPFPSTYKDDFNVDYPFFSEAPNFADQTGVFEYFTNIEDPGEHHFTLRQVLNQRPITWAADASNTISIIGDYNWTNLTIKCDVYIETPDTGGVFIAGRVNKGGILIRSARGIFFWIFANGSYRVTGDLAGWIIYALGRVEVTAKKWYTLTLTIKVAGRRKKT

SEQ ID NO: 47210 - protein, 123 aa, Homo sapiens
MARGSALLLASLLLAAALSASAGLWSPAKEKRGWTLNSAGYLLGPHAVGNHRSFSDKNGLTSKRELRPEDDMKPGSFDRSIPENNIMRTIIEFLSFLHLKEAGALDRLLDLPAAASSEDIERS

SEQ ID NO: 47211 - protein, 349 aa, Homo sapiens
MELAVGNLSEGNASWPEPPAPEPGPLFGIGVENFVTLVVFGLIFALGVLGNSLVITVLARSKPGKPRSTTNLFILNLSIADLAYLLFCIPFQATVYALPTWVLGAFICKFIHYFFTVSMLVSIFTLAAMSVDRYVAIVHSRRSSSLRVSRNALLGVGCIWALSIAMASPVAYHQGLFHPRASNQTFCWEQWPDPRHKKAYVVCTFVFGYLLPLLLICFCYAKVLNHLHKKLKNMSKKSEASKKKTAQTVLVVVVVFGISWLPHHIIHLWAEFGVFPLTPASFLFRITAHCLAYSNSSVNPIIYAFLSENFRKAYKQVFKCHIRKDSHLSDTKESKSRIDTPPSTNCTHV

SEQ ID NO: 47212 - protein, 387 aa, Homo sapiens
MNVSGCPGAGNASQAGGGGGWHPEAVIVPLLFALIFLVGTVGNTLVLAVLLRGGQAVSTTNLFILNLGVADLCFILCCVPFQATIYTLDGWVFGSLLCKAVHFLIFLTMHASSFTLAAVSLDRYLAIRYPLHSRELRTPRNALAAIGLIWGLSLLFSGPYLSYYRQSQLANLTVCHPAWSAPRRRAMDICTFVFSYLLPVLVLGLTYARTLRYLWRAVDPVAAGSGARRAKRKVTRMILIVAALFCLCWMPHHALILCVWFGQFPLTRATYALRILSHLVSYANSCVNPIVYALVSKHFRKGFRTICAGLLGRAPGRASGRVCAAARGTHSGSVLERESSDLLHMSEAAGALRPCPGASQPCILEPCPGPSWQGPKAGDSILTVDVA

SEQ ID NO: 47213 - protein, 368 aa, Homo sapiens
MADAQNISLDSPGSVGAVAVPVVFALIFLLGTVGNGLVLAVLLQPGPSAWQEPGSTTDLFILNLAVADLCFILCCVPFQATIYTLDAWLFGALVCKAVHLLIYLTMYASSFTLAAVSVDRYLAVRHPLRSRALRTPRNARAAVGLVWLLAALFSAPYLSYYGTVRYGALELCVPAWEDARRRALDVATFAAGYLLPVAVVSLAYGRTLRFLWAAVGPAGAAAAEARRRATGRAGRAMLAVAALYALCWGPHHALILCFWYGRFAFSPATYACRLASHCLAYANSCLNPLVYALASRHFRARFRRLWPCGRRRRHRARRALRRVRPASSGPPGCPGDARPSGRLLAGGGQGPEPREGPVHGGEAARGPE

SEQ ID NO: 47214 - protein, 652 aa, Homo sapiens
MGNLQSEPSAGGGSRKVQPSDRAPDSRRTSLVEPEMTSQAMRLTRGLGVWFPGSATPPGLMVPREPQASPSTLPLTLERPSPVMPPPEEAAAVSAPPPAPAGTLLPGPSKWQKPAGTPVPRIRRLLEASHRGQGDPPSLRPLKPPPPPRQLSVKDTVPRAPSQFPPPLETWKPPPPLPSERQPADRRITPALATPASPPTESQAGPRNQGQTAGRARGGAPPHAGEGEMAQPADSESGLSLLCKITFKSRPSLAPPAASSSLAAKASLGGGGGGGLFAASGAISYAEVLKQGPLPPGAARPLGEVSRGAQEAEGGDGDGEGCSGPPSAPASQARALPPPPYTTFPGSKPKFDWVSAPDGPERHFRFNGAGGGIGAPRRRAAALSGPWGSPPPPPEQIHSAPGPRRPAPALLAPPTFIFPAPTNGEPMRPGPPGLQELPPLPPPTPPPTLQPPALQPTPLPVAPPLTPGLGHKESALAPTAAPALPPALAADQAPAPSPAPAPTVAEPSPPVSAPAPAAAPIKTRTRRNKGSRAARGATRKDGLHGDGPRERATATVPDSSGGGGGGSGASQTGAANTRAARHWLPFQVLNSCPCKCYCHHQPRHRRLPRNVSAWLSTSTNHLGEPPWVATIKLSGSLVAKLEHYDLQATHSN

SEQ ID NO: 47215 - protein, 224 aa, Homo sapiens
MGNLQSEPSAGGGSRKVQPSDRAPDSRRTSLVEPEMTSQAMRLTRGLGVWFPGSATPPGLMVPREPQASPSTLPLTLERPSPVMPPPEEAAAVSAPPPAPAGTLLPGPSKWQKPAGTPVPRIRRLLEASHRGQGDPPSLRPLKPPPPPRQLSVKDTVPRAPSQFPPPLETWKPPPPLPSERQPADRRITPALATPACVRARTRGCAHQDPHAQEQGFPCSPGRD

SEQ ID NO: 47216 - protein, 697 aa, Homo sapiens
MARLVAVCRDGEEEFPFERRQIPLYIDDTLTMVMEFPDNVLNLDGHQNNGAQLKQFIQRHGMLKQQDLSIAMVVTSREVLSALSQLVPCVGCRRSVERLFSQLVESGNPALEPLTVGPKGVLSVTRSCMTDAKKLYTLFYVHGSKLNDMIDAIPKSKKNKRCQLHSLDTHKPKPLGGCWMDVWELMSQECRDEVVLIDSSCLLETLETYLRKHRFCTDCKNKVLRAYNILIGELDCSKEKGYCAALYEGLRCCPHERHIHVCCETDFIAHLLGRAEPEFAGGRRERHAKTIDIAQEEVLTCLGIHLYERLHRIWQKLRAEEQTWQMLFYLGVDALRKSFEMTVEKVQGISRLEQLCEEFSEEERVRELKQEKKRQKRKNRRKNKCVCDIPTPLQTADEKEVSQEKETDFIENSSCKACGSTEDGNTCVEVIVTNENTSCTCPSSGNLLGSPKIKKGLSPHCNGSDCGYSSSMEGSETGSREGSDVACTEGICNHDEHGDDSCVHHCEDKEDDGDSCVECWANSEENDTKGKNKKKKKKSKILKCDEHIQKLGSCITDPGNRETSGNTMHTVFHRDKTKDTHPESCCSSEKGGQPLPWFEHRKNVPQFAEPTETLFGPDSGKGAKSLVELLDESECTSDEEIFISQDEIQSFMANNQSFYSNREQYRQHLKEKFNKYCRLNDHKRPICSGWLTTAGAN

SEQ ID NO: 47217 - protein, 515 aa, Homo sapiens
MSSPNIWSTGSSVYSTPVFSQKMTVWILLLLSLYPGFTSQKSDDDYEDYASNKTWVLTPKVPEGDVTVILNNLLEGYDNKLRPDIGVKPTLIHTDMYVNSIGPVNAINMEYTIDIFFAQTWYDRRLKFNSTIKVLRLNSNMVGKIWIPDTFFRNSKKADAHWITTPNRMLRIWNDGRVLYTLRLTIDAECQLQLHNFPMDEHSCPLEFSSWSRSIAQAGMCSGVISAHYSLRFWGSTDPPTLASRVAGISDGYPREEIVYQWKRSSVEVGDTRSWRLYQFSFVGLRNTTEVVKTTSGDYVVMSVYFDLSRRMGYFTIQTYIPCTLIVVLSWVSFWINKDAVPARTSLGITTVLTMTTLSTIARKSLPKVSYVTAMDLFVSVCFIFVFSALVEYGTLHYFVSNRKPSKDKDKKKKNPLLRMFSFKAPTIDIRPRSATIQMNNATHLQERDEEYGYECLDGKDCASFFCCFEDCRTGAWRHGRIHIRIAKMDSYARIFFPTAFCLFNLVYWVSYLYL

SEQ ID NO: 47218 - protein, 253 aa, Homo sapiens
MAPKLLLLLCLFSGLHARSRKVEEDEYEDSSSNQKWVLAPKSQDTDVTLILNKLLREYDKKLRPDIGIKPTVIDVDIYVNSIGPVSSINMEYQIDIFFAQTWTDSRLRFNSTMKILTLNSNMVGLIWIPDTIFRNSKTAEAHWITTPNQLLRIWNDGKILYTLRLTINAECQLQLHNFPMDEHSCPLIFSSYGYPKEEMIYRWRKNSVEAADQKSWRLYQFDFMGLRNTTEIVTTSAGRNLLKEAQLSKAREA

SEQ ID NO: 47219 - protein, 456 aa, Homo sapiens
MRKSPGLSDCLWAWILLLSTLTGRSYGQPSLQDELKDNTTVFTRILDRLLDGYDNRLRPGLGERVTEVKTDIFVTSFGPVSDHDMEYTIDVFFRQSWKDERLKFKGPMTVLRLNNLMASKIWTPDTFFHNGKKSVAHNMTMPNKLLRITEDGTLLYTMRLTVRAECPMHLEDFPMDAHACPLKFGSYAYTRAEVVYEWTREPARSVVVAEDGSRLNQYDLLGQTVDSGIVQSSTGEYVVMTTHFHLKRKIGYFVIQTYLPCIMTVILSQVSFWLNRESVPARTVFGVTTVLTMTTLSISARNSLPKVAYATAMDWFIAVCYAFVFSALIEFATVNYFTKRGYAWDGKSVVPEKPKKVKDPLIKKNNTYAPTATSYTPNLARGDPGLATIAKSATIEPKEVKPETKPPEPKKTFNSVSKIDRLSRIAFPLLFGIFNLVYWATYLNREPQLKAPTPHQ

SEQ ID NO: 47220 - protein, 456 aa, Homo sapiens; identical to SEQ ID NO: 47219

SEQ ID NO: 47221 - protein, 456 aa, Homo sapiens; identical to SEQ ID NO: 47219

SEQ ID NO: 47222 - protein, 456 aa, Homo sapiens; identical to SEQ ID NO: 47219

SEQ ID NO: 47223 - protein, 456 aa, Homo sapiens; identical to SEQ ID NO: 47219

SEQ ID NO: 47224 - protein, 456 aa, Homo sapiens; identical to SEQ ID NO: 47219

SEQ ID NO: 47225 - protein, 123 aa, Homo sapiens
MRKSPGLSDCLWAWILLLSTLTGRSYGQPSLQDELKDNTTVFTRILDRLLDGYDNRLRPGLGERVTEVKTDIFVTSFGPVSDHDMEYTIDVFFRQSWKDERLKFKGPMTVLRLNNLMASKIWT

SEQ ID NO: 47226 - protein, 451 aa, Homo sapiens
MKTKLNIYNMQFLLFVFLVWDPARLVLANIQEDEAKNNITIFTRILDRLLDGYDNRLRPGLGDSITEVFTNIYVTSFGPVSDTDMEYTIDVFFRQKWKDERLKFKGPMNILRLNNLMASKIWTPDTFFHNGKKSVAHNMTMPNKLLRIQDDGTLLYTMRLTVQAECPMHLEDFPMDAHSCPLKFGSYAYTTSEVTYIWTYNASDSVQVAPDGSRLNQYDLLGQSIGKETIKSSTGEYTVMTAHFHLKRKIGYFVIQTYLPCIMTVILSQVSFWLNRESVPARTVFGVTTVLTMTTLSISARNSLPKVAYATAMDWFIAVCYAFVFSALIEFATVNYFTKRGWAWDGKSVVNDKKKEKASVMIQNNAYAVAVANYAPNLSKDPVLSTISKSATTPEPNKKPENKPAEAKKTFNSVSKIDRMSRIVFPVLFGTFNLVYWATYLNREPVLGVSP

SEQ ID NO: 47227 - protein, 451 aa, Homo sapiens; identical to SEQ ID NO: 47226

SEQ ID NO: 47228 - protein, 152 aa, Homo sapiens
MKTKLNIYNMQFLLFVFLVWDPARLVLANIQEDEAKNNITIFTRILDRLLDGYDNRLRPGLGDSITEVFTNIYVTSFGPVSDTDMEYTIDVFFRQKWKDERLKFKGPMNILRLNNLMASKIWTPDTFFHNGKKSVAHNMTMPNKLLRIQDDG

SEQ ID NO: 47229 - protein, 137 aa, Homo sapiens
MKTKLNIYNMQFLLFVFLVWDPARLVLANIQEDEAKNNITIFTRILDRLLDGYDNRLRPGLGDSITEVFTNIYVTSFGPVSDTDMEYTIDVFFRQKWKDERLKFKGPMNILRLNNLMASKIWTPDTFFHNGKKSVAH

SEQ ID NO: 47230 - protein, 511 aa, Homo sapiens
MKTKLNIYNMQFLLFVFLVWDPARLVLANIQEDEAKNNITIFTRILDRLLDGYDNRLRPGLGDSITEVFTNIYVTSFGPVSDTDMEYTIDVFFRQKWKDERLKFKGPMNILRLNNLMASKIWTPDTFFHNGKKSVAHNMTMPNKLLRIQDDGTLLYTMRLTVQAECPMHLEDFPMDAHSCPLKFGSYAYTTSEVTYIWTYNASDSVQVAPDGSRLNQYDLLGQSIGKETIKSSTGEYTVMTAHFHLKRKIGYFVIQTYLPCIMTVILSQVSFWLNRESVPARTVFGVTTVLTMTTLSISARNSLPKVAYATAMDWFIAVCYAFVFSALIEFATVNYFTKRGWAWDGKSVVNDKSPSIKAEGITLTYNSVKAILQGAKLIWSKYIAFSWPSLFQEKTLEYLEKWMDCLTFKQSSKKEKASVMIQNNAYAVAVANYAPNLSKDPVLSTISKSATTPEPNKKPENKPAEAKKTFNSVSKIDRMSRIVFPVLFGTFNLVYWATYLNREPVLGVSP

SEQ ID NO: 47231 - protein, 451 aa, Homo sapiens; identical to SEQ ID NO: 47226

SEQ ID NO: 47232 - protein, 451 aa, Homo sapiens; identical to SEQ ID NO: 47226

SEQ ID NO: 47233 - protein, 367 aa, Homo sapiens
MKTKLNIYNMQFLLFVFLVWDPARLVLANIQEDEAKNNITIFTRILDRLLDGYDNRLRPGLGDSITEVFTNIYVTSFGPVSDTDMEYTIDVFFRQKWKDERLKFKGPMNILRLNNLMASKIWTPDTFFHNGKKSVAHNMTMPNKLLRIQDDGTLLYTMRLTVQAECPMHLEDFPMDAHSCPLKFGSYAYTTSEVTYIWTYNASDSVQVAPDGSRLNQYDLLGQSIGKETIKSSTGEYTVMTAHFHLKRKIGYFVIQTYLPCIMTVILSQVSFWLNRESVPARTVFGVTTVLTMTTLSISARNSLPKVAYATAMDWFIAVCYAFVFSALIEFATVNYFTKRGWAWDGKSVVNDKVSESFRVIIIKKIP

SEQ ID NO: 47234 - protein, 456 aa, Homo sapiens
MRLKITLPSLREFLTDFWMVTIIGLDQDWEEYTIDVFFRQKWKDERLKFKGPMNILRLNNLMASKIWTPDTFFHNGKKSVAHNMTMPNKLLRIQDDGTLLYTMRLTVQAECPMHLEDFPMDAHSCPLKFGSYAYTTSEVTYIWTYNASDSVQVAPDGSRLNQYDLLGQSIGKETIKSSTGEYTVMTAHFHLKRKIGYFVIQTYLPCIMTVILSQVSFWLNRESVPARTVFGVTTVLTMTTLSISARNSLPKVAYATAMDWFIAVCYAFVFSALIEFATVNYFTKRGWAWDGKSVVNDKSPSIKAEGITLTYNSVKAILQGAKLIWSKYIAFSWPSLFQEKTLEYLEKWMDCLTFKQSSKKEKASVMIQNNAYAVAVANYAPNLSKDPVLSTISKSATTPEPNKKPENKPAEAKKTFNSVSKIDRMSRIVFPVLFGTFNLVYWATYLNREPVLGVSP

SEQ ID NO: 47235 - protein, 492 aa, Homo sapiens
MIITQTSHCYMTSLGILFLINILPGTTGQGESRRQEPGDFVKQDIGGLSPKHAPDIPDDSTDNITIFTRILDRLLDGYDNRLRPGLGDAVTEVKTDIYVTSFGPVSDTDMEYTIDVFFRQTWHDERLKFDGPMKILPLNNLLASKIWTPDTFFHNGKKSVAHNMTTPNKLLRLVDNGTLLYTMRLTIHAECPMHLEDFPMDVHACPLKFGSYAYTTAEVVYSWTLGKNKSVEVAQDGSRLNQYDLLGHVVGTEIIRSSTGEYVVMTTHFHLKRKIGYFVIQTYLPCIMTVILSQVSFWLNRESVPARTVFGVTTVLTMTTLSISARNSLPKVAYATAMDWFIAVCYAFVFSALIEFATVNYFTKRSWAWEGKKVPEALEMKKKTPAAPAKKTSTTFNIVGTTYPINLAKDTEFSTISKGAAPSASSTPTIIASPKATYVQDSPTETKTYNSVSKVDKISRIIFPVLFAIFNLVYWATYVNRESAIKGMIRKQ

SEQ ID NO: 47236 - protein, 492 aa, Homo sapiens; identical to SEQ ID NO: 47235

SEQ ID NO: 47237 - protein, 112 aa, Homo sapiens
EYTIDVFFRQTWHDERLKFDGPMKILPLNNLLASKIWTPDTFFHNGKKSVAHNMTTPNKLLRLVDNGTLLYTMRIEEVQKHRSMMKPSVSYTVAPWIQEGGPGGRHRLKMEK

SEQ ID NO: 47238 - protein, 492 aa, Homo sapiens; identical to SEQ ID NO: 47235

SEQ ID NO: 47239 - protein, 554 aa, Homo sapiens [sequence omitted]

SEQ ID NO: 47240 - protein, 462 aa, Homo sapiens
MDNGMFSGFIMIKNLLLFCISMNLSSHFGFSQMPTSSVKDETNDNITIFTRILDGLLDGYDNRLRPGLGERITQVRTDIYVTSFGPVSDTEMEYTIDVFFRQSWKDERLRFKGPMQRLPLNNLLASKIWTPDTFFHNGKKSIAHNMTTPNKLLRLEDDGTLLYTMRLTISAECPMQLEDFPMDAHACPLKFGSYAYPNSEVVYVWTNGSTKSVVVAEDGSRLNQYHLMGQTVGTENISTSTGEYTIMTAHFHLKRKIGYFVIQTYLPCIMTVILSQVSFWLNRESVPARTVFGVTTVLTMTTLSISARNSLPKVAYATAMDWFIAVCYAFVFSALIEFATVNYFTKRGWAWDGKKALEAAKIKKKREVILNKSTNAFTTGKMSHPPNIPKEQTPAGTSNTTSVSVKPSEEKTSESKKTYNSISKIDKMSRIVFPVLFGTFNLVYWATYLNREPVIKGAASPK

SEQ ID NO: 47241 - protein, 462 aa, Homo sapiens; identical to SEQ ID NO: 47240

SEQ ID NO: 47242 - protein, 462 aa, Homo sapiens; identical to SEQ ID NO: 47240

SEQ ID NO: 47243 - protein, 86 aa, Homo sapiens
MDNGMFSGFIMIKNLLLFCISMNLSSHFGFSQMPTSSVKDETNDNITIFTRILDGLLDGYDNRLRPGLGERITQVRTDIYVTSFGP

SEQ ID NO: 47244 - protein, 149 aa, Homo sapiens
MDNGMFSGFIMIKNLLLFCISMNLSSHFGFSQMPTSSVKDETNDNITIFTRILDGLLDGYDNRLRPGLGERITQVRTDIYVTSFGPVSDTEMEYTIDVFFRQSWKDERLRFKGPMQRLPLNNLLASKIWTPDTFFHNGKKSIAHNMTTP

SEQ ID NO: 47245 - protein, 166 aa, Homo sapiens
MDNGMFSGFIMIKNLLLFCISMNLSSHFGFSQMPTSSVKDETNDNITIFTRILDGLLDGYDNRLRPGLGERITQVRTDIYVTSFGPVSDTEMEYTIDVFFRQSWKDERLRFKGPMQRLPLNNLLASKIWTPDTFFHNGKKSIAHNMTTPNKLLRLEDDGTLLYTMR

SEQ ID NO: 47246 - protein, 16 aa, Homo sapiens
MDNGMFSGFIMIKNLL

SEQ ID NO: 47247 - protein, 453 aa, Homo sapiens
MASSLPWLCIILWLENALGKLEVEGNFYSENVSRILDNLLEGYDNRLRPGFGGAVTEVKTDIYVTSFGPVSDVEMEYTMDVFFRQTWTDERLKFGGPTEILSLNNLMVSKIWTPDTFFRNGKKSIAHNMTTPNKLFRIMQNGTILYTMRLTINADCPMRLVNFPMDGHACPLKFGSYAYPKSEIIYTWKKGPLYSVEVPEESSSLLQYDLIGQTVSSETIKSNTGEYVIMTVYFHLQRKMGYFMIQIYTPCIMTVILSQVSFWINKESVPARTVFGITTVLTMTTLSISARHSLPKVSYATAMDWFIAVCFAFVFSALIEFAAVNYFTNLQTQKAKRKAQFAAPPTVTISKATEPLEAEIVLHPDSKYHLKKRITSLSLPIVSSSEANKVLTRAPILQSTPVTPPPLSPAFGGTSKIDQYSRILFPVAFAGFNLVYWVVYLSKDTMEVSSSVE

SEQ ID NO: 47248 - protein, 443 aa, Homo sapiens
MASSLPWLCIILWLENALGKLEVEGNFYSENVSRILDNLLEGYDNRLRPGFGGAVTEVKTDIYVTSFGPVSDVEMTWTDERLKFGGPTEILSLNNLMVSKIWTPDTFFRNGKKSIAHNMTTPNKLFRIMQNGTILYTMRLTINADCPMRLVNFPMDGHACPLKFGSYAYPKSEIIYTWKKGPLYSVEVPEESSSLLQYDLIGQTVSSETIKSNTGEYVIMTVYFHLQRKMGYFMIQIYTPCIMTVILSQVSFWINKESVPARTVFGITTVLTMTTLSISARHSLPKVSYATAMDWFIAVCFAFVFSALIEFAAVNYFTNLQTQKAKRKAQFAAPPTVTISKATEPLEAEIVLHPDSKYHLKKRITSLSLPIVSSSEANKVLTRAPILQSTPVTPPPLSPAFGGTSKIDQYSRILFPVAFAGFNLVYWVVYLSKDTMEVSSSVE

SEQ ID NO: 47249 - protein, 474 aa, Homo sapiens
MWTVQNRESLGLLSFPVMITMVCCAHSTNEPSNMSYVKETVDRLLKGYDIRLRPDFGGPPVDVGMRIDVASIDMVSEVNMDYTLTMYFQQSWKDKRLSYSGIPLNLTLDNRVADQLWVPDTYFLNDKKSFVHGVTVKNRMIRLHPDGTVLYGLRITTTAACMMDLRRYPLDEQNCTLEIESYGYTTDDIEFYWNGGEGAVTGVNKIELPQFSIVDYKMVSKKVEFTTGAYPRLSLSFRLKRNIGYFILQTYMPSTLITILSWVSFWINYDASAARVALGITTVLTMTTISTHLRETLPKIPYVKAIDIYLMGCFVFVFLALLEYAFVNYIFFGKGPQKKGASKQDQSANEKNKLEMNKVQVDAHGNILLSTLEIRNETSGSEVLTSVSDPKATMYSYDSASIQYRKPLSSREAYGRALDRHGVPSKGRIRRRASQLKVKIPDLTDVNSIDKWSRMFFPITFSLFNVVYWLYYVH

SEQ ID NO: 47250 - protein, 404 aa, Homo sapiens
MTFACGRTSEDYTLTMYFQQSWKDKRLSYSGIPLNLTLDNRVADQLWVPDTYFLNDKKSFVHGVTVKNRMIRLHPDGTVLYGLRITTTAACMMDLRRYPLDEQNCTLEIESYGYTTDDIEFYWNGGEGAVTGVNKIELPQFSIVDYKMVSKKVEFTTGAYPRLSLSFRLKRNIGYFILQTYMPSTLITILSWVSFWINYDASAARVALGITTVLTMTTISTHLRETLPKIPYVKAIDIYLMGCFVFVFLALLEYAFVNYIFFGKGPQKKGASKQDQSANEKNKLEMNKVQVDAHGNILLSTLEIRNETSGSEVLTSVSDPKATMYSYDSASIQYRKPLSSREAYGRALDRHGVPSKGRIRRRASQLKVKIPDLTDVNSIDKWSRMFFPITFSLFNVVYWLYYVH

SEQ ID NO: 47251 - protein, 512 aa, Homo sapiens
MWRVRKRGYFGIWSFPLIIAAVCAQSVNDPSNMSLVKETVDRLLKGYDIRLRPDFGGPPVAVGMNIDIASIDMVSEVNMDYTLTMYFQQAWRDKRLSYNVIPLNLTLDNRVADQLWVPDTYFLNDKKSFVHGVTVKNRMIRLHPDGTVLYGLRITTTAACMMDLRRYPLDEQNCTLEIESYGYTTDDIEFYWRGDDNAVTGVTKIELPQFSIVDYKLITKKVVFSTGSYPRLSLSFKLKRNIGYFILQTYMPSILITILSWVSFWINYDASAARVALGITTVLTMTTINTHLRETLPKIPYVKAIDMYLMGCFVFVFMALLEYALVNYIFFGRGPQRQKKAAEKAASANNEKMRLDVNKIFYKDIKQNGTQYRSLWDPTGNLSPTRRTTNYDFSLYTMDPHENILLSTLEIKNEMATSEAVMGLGDPRSTMLAYDASSIQYRKAGLPRHSFGRNALERHVAQKKSRLRRRASQLKITIPDLTDVNAIDRWSRIFFPVVFSFFNIVYWLYYVN

SEQ ID NO: 47252 - protein, 474 aa, Homo sapiens
MWRVRKRGYFGIWSFPLIIAAVCAQSVNDPSNMSLVKETVDRLLKGYDIRLRPDFGGPPVAVGMNIDIASIDMVSEVNMDYTLTMYFQQAWRDKRLSYNVIPLNLTLDNRVADQLWVPDTYFLNDKKSFVHGVTVKNRMIRLHPDGTVLYGLRITTTAACMMDLRRYPLDEQNCTLEIESYGYTTDDIEFYWRGDDNAVTGVTKIELPQFSIVDYKLITKKVVFSTGSYPRLSLSFKLKRNIGYFILQTYMPSILITILSWVSFWINYDASAARVALGITTVLTMTTINTHLRETLPKIPYVKAIDMYLMGCFVFVFMALLEYALVNYIFFGRGPQRQKKAAEKAASANNEKMRLDVNKMDPHENILLSTLEIKNEMATSEAVMGLGDPRSTMLAYDASSIQYRKAGLPRHSFGRNALERHVAQKKSRLRRRASQLKITIPDLTDVNAIDRWSRIFFPVVFSFFNIVYWLYYVN

SEQ ID NO: 47253 - protein, 512 aa, Homo sapiens; identical to SEQ ID NO: 47251

SEQ ID NO: 47254 - protein, 314 aa, Homo sapiens
MMDLRRYPLDEQNCTLEIESYGYTTDDIEFYWRGDDNAVTGVTKIELPQFSIVDYKLITKKVVFSTGSYPRLSLSFKLKRNIGYFILQTYMPSILITILSWVSFWINYDASAARVALGITTVLTMTTINTHLRETLPKIPYVKAIDMYLMGCFVFVFMALLEYALVNYIFFGRGPQRQKKAAEKAASANNEKMRLDVNKMDPHENILLSTLEIKNEMATSEAVMGLGDPRSTMLAYDASSIQYRKAGLPRHSFGRNALERHVAQKKSRLRRRASQLKITIPDLTDVNAIDRWSRIFFPVVFSFFNIVYWLYYVN

SEQ ID NO: 47255 - protein, 411 aa, Homo sapiens
MNIDIASIDMVSEVNMDYTLTMYFQQAWRDKRLSYNVIPLNLTLDNRVADQLWVPDTYFLNDKKSFVHGVTVKNRMIRLHPDGTVLYGLRITTTAACMMDLRRYPLDEQNCTLEIESYGYTTDDIEFYWRGDDNAVTGVTKIELPQFSIVDYKLITKKVVFSTGSYPRLSLSFKLKRNIGYFILQTYMPSILITILSWVSFWINYDASAARVALGITTVLTMTTINTHLRETLPKIPYVKAIDMYLMGCFVFVFMALLEYALVNYIFFGRGPQRQKKAAEKAASANNEKMRLDVNKMDPHENILLSTLEIKNEMATSEAVMGLGDPRSTMLAYDASSIQYRKAGLPRHSFGRNALERHVAQKKSRLRRRASQLKITIPDLTDVNAIDRWSRIFFPVVFSFFNIVYWLYYVN

SEQ ID NO: 47256 - protein, 474 aa, Homo sapiens; identical to SEQ ID NO: 47252

SEQ ID NO: 47257 - protein, 473 aa, Homo sapiens
MCSGLLELLLPIWLSWTLGTRGSEPRSVNDPGNMSFVKETVDKLLKGYDIRLRPDFGGPPVCVGMNIDIASIDMVSEVNMDYTLTMYFQQYWRDKRLAYSGIPLNLTLDNRVADQLWVPDTYFLNDKKSFVHGVTVKNRMIRLHPDGTVLYGLRITTTAACMMDLRRYPLDEQNCTLEIESYGYTTDDIEFYWRGGDKAVTGVERIELPQFSIVEHRLVSRNVVFATGAYPRLSLSFRLKRNIGYFILQTYMPSILITILSWVSFWINYDASAARVALGITTVLTMTTINTHLRETLPKIPYVKAIDMYLMGCFVFVFLALLEYAFVNYIFFGRGPQRQKKLAEKTAKAKNDRSKSESNRVDAHGNILLTSLEVHNEMNEVSGGIGDTRNSAISFDNSGIQYRKQSMPREGHGRFLGDRSLPHKKTHLRRRSSQLKIKIPDLTDVNAIDRWSRIVFPFTFSLFNLVYWLYYVN

SEQ ID NO: 47258 - protein, 473 aa, Homo sapiens [sequence omitted]

SEQ ID NO: 47259 - protein, 402 aa, Homo sapiens
MWATYQTEEDYTLTMYFQQYWRDKRLAYSGIPLNLTLDNRVADQLWVPDTYFLNDKKSFVHGVTVKNRMIRLHPDGTVLYGLRITTTAACMMDLRRYPLDEQNCTLEIESYGYTTDDIEFYWRGGDKAVTGVERIELPQFSIVEHRLVSRNVVFATGAYPRLSLSFRLKRNIGYFILQTYMPSILITILSWVSFWINYDASAARVALGITTVLTMTTINTHLRETLPKIPYVKAIDMYLMGCFVFVFLALLEYAFVNYIFFGRGPQRQKKLAEKTAKAKNDRSKSESNRVDAHGNILLTSLEVHNEMNEVSGGIGDTRNSAISFDNSGIQYRKQSMPREGHGRFLGDRSLPHKKTHLRRRSSQLKIKIPDLTDVNAIDRWSRIVFPFTFSLFNLVYWLYYVN

SEQ ID NO: 47260 - protein, 388 aa, Homo sapiens
MYFQQYWRDKRLAYSGIPLNLTLDNRVADQLWVPDTYFLNDKKSFVHGVTVKNRMIRLHPDGTVLYGLRITTTAACMMDLRRYPLDEQNCTLEIESYGYTTDDIEFYWRGGDKAVTGVERIELPQFSIVEHRLVSRNVVFATGAYPRLSLSFRLKRNIGYFILQTYMPSILITILSWVSFWINYDASAARVALGITTVLTMTTINTHLRETLPKIPYVKAIDMYLMGCFVFVFLALLEYAFVNYIFFGRGPQRQKKLAEKTAKAKNDRSKSESNRVDAHGNILLTSLEVHNEMNEVSGGIGDTRNSAISFDNSGIQYRKQSMPREGHGRFLGDRSLPHKKTHLRRRSSQLKIKIPDLTDVNAIDRWSRIVFPFTFSLFNLVYWLYYVN

SEQ ID NO: 47261 - protein, 138 aa, Homo sapiens
MYFQQYWRDKRLAYSGIPLNLTLDNRVADQLWVPDTYFLNDKKSFVHGVTVKNRMIRLHPDGTVLYGLRITTTAACMMDLRRYPLDEQNCTLEIESYGYTTDDIEFYWRGGDKAVTGVERIELPQFSIVEHRLVSRNV

SEQ ID NO: 47262 - protein, 452 aa, Homo sapiens [sequence omitted]

SEQ ID NO: 47263 - protein, 506 aa, Homo sapiens
MLSKVLPVLLGILLILQSRVEGPQTESKNEASSRDVVYGPQPQPLENQLLSEETKSTETETGSRVGKLPEASRILNTILSNYDHKLRPGIGEKPTVVTVEISVNSLGPLSILDMEYTIDIIFSQTWYDERLCYNDTFESLVLNGNVVSQLWIPDTFFRNSKRTHEHEITMPNQMVRIYKDGKVLYTIRMTIDAGCSLHMLRFPMDSHSCPLSFSSFSYPENEMIYKWENFKLEINEKNSWKLFQFDFTGVSNKTEIITTPVGDFMVMTIFFNVSRRFGYVAFQNYVPSSVTTMLSWVSFWIKTESAPARTSLGITSVLTMTTLGTFSRKNFPRVSYITALDFYIAICFVFCFCALLEFAVLNFLIYNQTKAHASPKLRHPRINSRAHARTRARSRACARQHQEAFVCQIVTTEGSDGEERPSCSAQQPPSPGSPEGPRSLCSKLACCEWCKRFKKYFCMVPDCEGSTWQQGRLCIHVYRLDNYSRVVFPVTFFFFNVLYWLVCLNL

SEQ ID NO: 47264 - protein, 139 aa, Homo sapiens
MRSPCPTRWSASTRMARCCTQLVSYPENEMIYKWENFKLEINEKNSWKLFQFDFTGVSNKTEIITTPVGDLNEEPRDLPRVAPRATLETLFTHPDQVQGSEGTALIVSRMWMEPVTQPAICRERHLVLLPFKIPRQEDF

SEQ ID NO: 47265 - protein, 465 aa, Homo sapiens
MGPLKAFLFSPFLLRSQSRGVRLVFLLLTLHLGNCVDKADDEDDEDLTVNKTWVLAPKIHEGDITQILNSLLQGYDNKLRPDIGVRPTVIETDVYVNSIGPVDPINMEYTIDIIFAQTWFDSRLKFNSTMKVLMLNSNMVGKIWIPDTFFRNSRKSDAHWITTPNRLLRIWNDGRVLYTLRLTINAECYLQLHNFPMDEHSCPLEFSSYGYPKNEIEYKWKKPSVEVADPKYWRLYQFAFVGLRNSTEITHTISGDYVIMTIFFDLSRRMGYFTIQTYIPCILTVVLSWVSFWINKDAVPARTSLGITTVLTMTTLSTIARKSLPKVSYVTAMDLFVSVCFIFVFAALMEYGTLHYFTSNQKGKTATKDRKLKNKASMTPGLHPGSTLIPMNNISVPQEDDYGYQCLEGKDCASFFCCFEDCRTGSWREGRIHIRIAKIDSYSRIFFPTAFALFNLVYWVGYLYL

SEQ ID NO: 47266 - protein, 419 aa, Homo sapiens
MGPLKAFLFSPFLLRSQSRGVRLVFLLLTLHLGNCVDKADDEDDEDLTVNKTWVLAPKIHEGDITQILNSLLQGYDNKLRPDIGVRPTVIETDVYVNSIGPVDPINMEYTIDIIFAQTWFDSRLKFNSTMKVLMLNSNMVGKIWIPDTFFRNSRKSDAHWITTPNRLLRIWNDGRVLYTLRLTINAECYLQLHNFPMDEHSCPLEFSSYGYPKNEIEYKWKKPSVEVADPKYWRLYQFAFVGLRNSTEITHTISGDYVIMTIFFDLSRRMGYFTIQTYIPCILTVVLSWVSFWINKDAVPARTSLGITTVLTMTTLSTIARKSLPKVSYVTAMDLFVSVCFIFVFAALMEYGTLHYFTSNQKGKTATKDRKLKNKASMTPGLHPGSTLIPMNNISVPQEDDYGYQCLEGRKDTHTHCQN

SEQ ID NO: 47267 - protein, 475 aa, Homo sapiens
MSSPNIWSTGSSVYSTPVFSQKMTVWILLLLSLYPGFTSQKSDDDYEDYASNKTWVLTPKVPEGDVTVILNNLLEGYDNKLRPDIGVKPTLIHTDMYVNSIGPVNAINMEYTIDIFFAQTWYDRRLKFNSTIKVLRLNSNMVGKIWIPDTFFRNSKKADAHWITTPNRMLRIWNDGRVLYTLRLTIDAECQLQLHNFPMDEHSCPLEFSSYGYPREEIVYQWKRSSVEVGDTRSWRLYQFSFVGLRNTTEVVKTTSGDYVVMSVYFDLSRRMGYFTIQTYIPCTLIVVLSWVSFWINKDAVPARTSLGITTVLTMTTLSTIARKSLPKVSYVTAMDLFVSVCFIFVFSALVEYGTLHYFVSNRKPSKDKDKKKKNPLLRMFSFKAPTIDIRPRSATIQMNNATHLQERDEEYGYECLDGKDCASFFCCFEDCRTGAWRHGRIHIRIAKMDSYARIFFPTAFCLFNLVYWVSYLYL

SEQ ID NO: 47268 - protein, 467 aa, Homo sapiens
MSSPNIWSTGSSVYSTPVFSQKMTVWILLLLSLYPGFTSQKSDDDYEDYASNKTWVLTPKVPEGDVTVILNNLLEGYDNKLRPDIGVKPTLIHTDMYVNSIGPVNAINMEYTIDIFFAQTWYDRRLKFNSTIKVLRLNSNMVGKIWIPDTFFRNSKKADAHWITTPNRMLRIWNDGRVLYTLRLTIDAECQLQLHNFPMDEHSCPLEFSSYGYPREEIVYQWKRSSVEVGDTRSWRLYQFSFVGLRNTTEVVKTTSGDYVVMSVYFDLSRRMGYFTIQTYIPCTLIVVLSWVSFWINKDAVPARTSLGITTVLTMTTLSTIARKSLPKVSYVTAMDLFVSVCFIFVFSALVEYGTLHYFVSNRKPSKDKDKKKKNPAPTIDIRPRSATIQMNNATHLQERDEEYGYECLDGKDCASFFCCFEDCRTGAWRHGRIHIRIAKMDSYARIFFPTAFCLFNLVYWVSYLYL

SEQ ID NO: 47269 - protein, 372 aa, Homo sapiens
MYVNSIGPVNAINMEYTIDIFFAQTWYDRRLKFNSTIKVLRLNSNMVGKIWIPDTFFRNSKKADAHWITTPNRMLRIWNDGRVLYTLRLTIDAECQLQLHNFPMDEHSCPLEFSSYGYPREEIVYQWKRSSVEVGDTRSWRLYQFSFVGLRNTTEVVKTTSGDYVVMSVYFDLSRRMGYFTIQTYIPCTLIVVLSWVSFWINKDAVPARTSLGITTVLTMTTLSTIARKSLPKVSYVTAMDLFVSVCFIFVFSALVEYGTLHYFVSNRKPSKDKDKKKKNPAPTIDIRPRSATIQMNNATHLQERDEEYGYECLDGKDCASFFCCFEDCRTGAWRHGRIHIRIAKMDSYARIFFPTAFCLFNLVYWVSYLYL

SEQ ID NO: 47270 - protein, 467 aa, Homo sapiens
MAPKLLLLLCLFSGLHARSRKVEEDEYEDSSSNQKWVLAPKSQDTDVTLILNKLLREYDKKLRPDIGIKPTVIDVDIYVNSIGPVSSINMEYQIDIFFAQTWTDSRLRFNSTMKILTLNSNMVGLIWIPDTIFRNSKTAEAHWITTPNQLLRIWNDGKILYTLRLTINAECQLQLHNFPMDEHSCPLIFSSYGYPKEEMIYRWRKNSVEAADQKSWRLYQFDFMGLRNTTEIVTTSAGDYVVMTIYFELSRRMGYFTIQTYIPCILTVVLSWVSFWIKKDATPARTALGITTVLTMTTLSTIARKSLPRVSYVTAMDLFVTVCFLFVFAALMEYATLNYYSSCRKPTTTKKTTSLLHPDSSRWIPERISLQAPSNYSLLDMRPPPTAMITLNNSVYWQEFEDTCVYECLDGKDCQSFFCCYEECKSGSWRKGRIHIDILELDSYSRVFFPTSFLLFNLVYWVGYLYL

SEQ ID NO: 47271 - protein, 440 aa, Homo sapiens
MNYSLHLAFVCLSLFTERMCIQGSQFNVEVGRSDKLSLPGFENLTAGYNKFLRPNFGGEPVQIALTLDIASISSISESNMDYTATIYLRQRWMDQRLVFEGNKSFTLDARLVEFLWVPDTYIVESKKSFLHEVTVGNRLIRLFSNGTVLYALRITTTVACNMDLSKYPMDTQTCKLQLESWGYDGNDVEFTWLRGNDSVRGLEHLRLAQYTIERYFTLVTRSQQETGNYTRLVLQFELRRNVLYFILETYVPSTFLVVLSWVSFWISLDSVPARTCIGVTTVLSMTTLMIGSRTSLPNTNCFIKAIDVYLGICFSFVFGALLEYAVAHYSSLQQMAAKDRGTTKEVEEVSITNIINSSISSFKRKISFASIEISSDNVDYSDLTMKTSDKFKFVFREKMGRIVDYFTIQNPSNVDHYSKLLFPLIFMLANVFYWAYYMYF

SEQ ID NO: 47272 - protein, 52 aa, Homo sapiens
MNYSLHLAFVCLSLFTERMCIQGSQFNVEVGRSDKLSLPGFENLTAGYNKFL

SEQ ID NO: 47273 - protein, 440 aa, Homo sapiens; identical to SEQ ID NO: 47271

SEQ ID NO: 47274 - protein, 59 aa, Homo sapiens
MNYSLHLAFVCLSLFTERMCIQGSQFNVEVGRSDKLSLPGFENLTAGYNKFLRPNFGGE

SEQ ID NO: 47275 - protein, 92 aa, Homo sapiens
MNYSLHLAFVCLSLFTERMCIQGSQFNVEVGRSDKLSLPGFENLTAGYNKFLRPNFGGEPVQIALTLDIASISSISESNMDYTATIYLRQRW

SEQ ID NO: 47276 - protein, 171 aa, Homo sapiens
MNYSLHLAFVCLSLFTERMCIQGSQFNVEVGRSDKLSLPGFENLTAGYNKFLRPNFGGEPVQIALTLDIASISSISESNMDYTATIYLRQRWMDQRLVFEGNKSFTLDARLVEFLWVPDTYIVESKKSFLHEVTVGNRLIRLFSNGTVLYALRITTTVACNMDLSKYPMDT

SEQ ID NO: 47277 - protein, 189 aa, Homo sapiens
MNYSLHLAFVCLSLFTERMCIQGSQFNVEVGRSDKLSLPGFENLTAGYNKFLRPNFGGEPVQIALTLDIASISSISESNMDYTATIYLRQRWMDQRLVFEGNKSFTLDARLVEFLWVPDTYIVESKKSFLHEVTVGNRLIRLFSNGTVLYALRITTTVACNMDLSKYPMDTQTCKLQLESWGYDGNDVE

SEQ ID NO: 47278 - protein, 187 aa, Homo sapiens
MDYTATIYLRQRWMDQRLVFEGNKSFTLDEVTVGNRLIRLFSNGTVLYALRITTTVACNMDLSKYPMDTQTCKLQLESWGYDGNDVEFTWLRGNDSVRGLEHLRLAQYTIERYFTLVTRSQQETGNYTRLVLQFELRRNVLYFILETYVPSTFLVVLSWVSFWISLDSVPARTCIGDNKGSRRSQYY

SEQ ID NO: 47279 - protein, 941 aa, Homo sapiens
MASPRSSGQPGPPPPPPPPPARLLLLLLLPLLLPLAPGAWGWARGAPRPPPSSPPLSIMGLMPLTKEVAKGSIGRGVLPAVELAIEQIRNESLLRPYFLDLRLYDTECDNAKGLKAFYDAIKYGPNHLMVFGGVCPSVTSIIAESLQGWNLVQLSFAATTPVLADKKKYPYFFRTVPSDNAVNPAILKLLKHYQWKRVGTLTQDVQRFSEVRNDLTGVLYGEDIEISDTESFSNDPCTSVKKLKGNDVRIILGQFDQNMAAKVFCCAYEENMYGSKYQWIIPGWYEPSWWEQVHTEANSSRCLRKNLLAAMEGYIGVDFEPLSSKQIKTISGKTPQQYEREYNNKRSGVGPSKFHGYAYDGIWVIAKTLQRAMETLHASSRHQRIQDFNYTDHTLGRIILNAMNETNFFGVTGQVVFRNGERMGTIKFTQFQDSREVKVGEYNAVADTLEIINDTIRFQGSEPPKDKTIILEQLRKISLPLYSILSALTILGMIMASAFLFFNIKNRNQKLIKMSSPYMNNLIILGGMLSYASIFLFGLDGSFVSEKTFETLCTVRTWILTVGYTTAFGAMFAKTWRVHAIFKNVKMKKKIIKDQKLLVIVGGMLLIDLCILICWQAVDPLRRTVEKYSMEPDPAGRDISIRPLLEHCENTHMTIWLGIVYAYKGLLMLFGCFLAWETRNVSIPALNDSKYIGMSVYNVGIMCIIGAAVSFLTRDQPNVQFCIVALVIIFCSTITLCLVFVPKLITLRTNPDAATQNRRFQFTQNQKKEDSKTSTSVTSVNQASTSRLEGLQSENHRLRMKITELDKDLEEVTMQLQDTPEKTTYIKQNHYQELNDILNLGNFTESTDGGKAILKNHLDQNPQLQWNTTEPSRTCKDPIEDINSPEHIQRRLSLQLPILHHAYLPSIGGVDASCVSPCVSPTASPRHRHVPPSFRVMVSGL

SEQ ID NO: 47280 - protein, 392 aa, Homo sapiens
MRPGFGGPAIPVGVDVQVESLDSISEVDMDFTMTLYLRHYWKDERLSFPSTNNLSMTFDGRLVKKIWVPDMFFVHSKRSFIHDTTTDNVMLRVQPDGKVLYSLRVTVTAMCNMDFSRFPLDTQTCSLEIESYAYTEDDLMLYWKKGNDSLKTDERISLSQFLIQEFHTTTKLAFYSSTGWYNRLYINFTLRRHIFFFLLQTYFPATLMVMLSWVSFWIDRRAVPARVPLGITTVLTMSTIITGVNASMPRVSYIKAVDIYLWVSFVFVFLSVLEYAAVNYLTTVQERKEQKLREKLPCTSGLPPPRTAMLDGNYSDGEVNDLDNYMPENGEKPDRMMVQLTLASERSSPQRKSQRSSYVSMRIDTHAIDKYSRIIFPAAYILFNLIYWSIFS

SEQ ID NO: 47281 - protein, 462 aa, Homo sapiens
MLAVPNMRFGIFLLWWGWVLATESRMHWPGREVHEMSKKGSPILRRSPDITKSPLTKSEQLLRIDDHDFSMRPGFGGPAIPVGVDVQVESLDSISEVDMDFTMTLYLRHYWKDERLSFPSTNNLSMTFDGRLVKKIWVPDMFFVHSKRSFIHDTTTDNVMLRVQPDGKVLYSLRVTVTAMCNMDFSRFPLDTQTCSLEIESYAYTEDDLMLYWKKGNDSLKTDERISLSQFLIQEFHTTTKLAFYSSTGWYNRLYINFTLRRHIFFFLLQTYFPATLMVMLSWVSFWIDRRAVPARVPLGITTVLTMSTIITGVNASMPRVSYIKAVDIYLWVSFVFVFLSVLEYAAVNYLTTVQERKEQKLREKLPCTSGLPPPRTAMLDGNYSDGEVNDLDNYMPENGEKPDRMMVQLTLASERSSPQRKSQRSSYVSMRIDTHAIDKYSRIIFPAAYILFNLIYWSIFS

SEQ ID NO: 47282 - protein, 392 aa, Homo sapiens; identical to SEQ ID NO: 47280

SEQ ID NO: 47283 - protein, 479 aa, Homo sapiens
MLAVPNMRFGIFLLWWGWVLATESRMHWPGREVHEMSKKGRPQRQRREVHEDAHKQVSPILRRSPDITKSPLTKSEQLLRIDDHDFSMRPGFGGPAIPVGVDVQVESLDSISEVDMDFTMTLYLRHYWKDERLSFPSTNNLSMTFDGRLVKKIWVPDMFFVHSKRSFIHDTTTDNVMLRVQPDGKVLYSLRVTVTAMCNMDFSRFPLDTQTCSLEIESYAYTEDDLMLYWKKGNDSLKTDERISLSQFLIQEFHTTTKLAFYSSTGWYNRLYINFTLRRHIFFFLLQTYFPATLMVMLSWVSFWIDRRAVPARVPLGITTVLTMSTIITGVNASMPRVSYIKAVDIYLWVSFVFVFLSVLEYAAVNYLTTVQERKEQKLREKLPCTSGLPPPRTAMLDGNYSDGEVNDLDNYMPENGEKPDRMMVQLTLASERSSPQRKSQRSSYVSMRIDTHAIDKYSRIIFPAAYILFNLIYWSIFS

SEQ ID NO: 47284 - protein, 490 aa, Homo sapiens
MVKPGGICSATGYWKAAFCLTDVHKMPYFTRLILFLFCLMVLVESRKPKRKRWTGQVEMPKPSHLYKKNLDVTKIRKGKPQQLLRVDEHDFSMRPAFGGPAIPVGVDVQVESLDSISEVDMDFTMTLYLRHYWKDERLAFSSASNKSMTFDGRLVKKIWVPDVFFVHSKRSFTHDTTTDNIMLRVFPDGHVLYSMRITVTAMCNMDFSHFPLDSQTCSLELESYAYTDEDLMLYWKNGDESLKTDEKISLSQFLIQKFHTTSRLAFYSSTGWYNRLYINFTLRRHIFFFLLQTYFPATLMVMLSWVSFWIDRRAVPARVSLGITTVLTMTTIITGVNASMPRVSYVKAVDIYLWVSFVFVFLSVLEYAAVNYLTTVQERKERKLREKFPCMCGMLHSKTMMLDGSYSESEANSLAGYPRSHILTEEERQDKIVVHLGLSGEANAARKKGLLKGQTGFRIFQNTHAIDKYSRLIFPASYIFFNLIYWSVFS

SEQ ID NO: 47285 - protein, 150 aa, Homo sapiens
MLRAAVILLLIRTWLAEGNYPSPIPKFHFEFSSAVPEVVLNLFNCKNCANEAVVQKILDRVLSRYDVRLRPNFGGVLETNSTWGLNDDELMAHGQEKDSSSESEDSCPPSPGCSFTEGFSFDLFNPDYVPKVDKWSRFLFPLAFGLFNIV

SEQ ID NO: 47286 - protein, 632 aa, Homo sapiens
MGIRGMLRAAVILLLIRTWLAEGNYPSPIPKFHFEFSSAVPEVVLNLFNCKNCANEAVVQKILDRVLSRYDVRLRPNFGGAPVPVRISIYVTSIEQISEMNMDYTITMFFHQTWKDSRLAYYETTLNLTLDYRMHEKLWVPDCYFLNSKDAFVHDVTVENRVFQLHPDGTVRYGIRLTTTAACSLDLHKFPMDKQACNLVVESYGYTVEDIILFWDDNGNAIHMTEELHIPQFTFLGRTITSKEVYFYTGSYIRLILKFQVQREVNSYLVQVYWPTVLTTITSWISFWMNYDSSAARVTIGLTSMLILTTIDSHLRDKLPNISCIKAIDIYILVCLFFVFLSLLEYVYINYLFYSRGPRRQPRRHRRPRRVIARYRYQQVVVGNVQDGLINVEDGVSSLPITPAQAPLASPESLGSLTSTSEQAQLATSESLSPLTSLSGQAPLATGESLSDLPSTSEQARHSYGVRFNGFQADDSIFPTEIRNRVEAHGHGVTHDHEDSNESLSSDERHGHGPSGKPMLHHGEKGVQEAGWDLDDNNDKSDCLAIKEQFKCDTNSTWGLNDDELMAHGQEKDSSSESEDSCPPSPGCSFTEGFSFDLFNPDYVPKVDKWSRFLFPLAFGLFNIVYWVYHMY

SEQ ID NO: 47287 - protein, 758 aa, Homo sapiens
MAVSAGSARTSPSSDKVQKDKAELISGPRQDSRIGKLLGFEWTDLSSWRRLVTLLNRPTDPASLAVFRFLFGFLMVLDIPQERGLSSLDRKYLDGLDVCRFPLLDALRPLPLDWMYLVYTIMFLGALGMMLGLCYRISCVLFLLPYWYVFLLDKTSWNNHSYLYGLLAFQLTFMDANHYWSVDGLLNAHRRNAHVPLWNYAVLRGQIFIVYFIAGVKKLDADWVEGYSMEYLSRHWLFSPFKLLLSEELTSLLVVHWGGLLLDLSAGFLLFFDVSRSIGLFFVSYFHCMNSQLFSIGMFSYVMLASSPLFCSPEWPRKLVSYCPRRLQQLLPLKAAPQPSVSCVYKRSRGKSGQKPGLRHQLGAAFTLLYLLEQLFLPYSHFLTQGYNNWTNGLYGYSWDMMVHSRSHQHVKITYRDGRTGELGYLNPGVFTQSRRWKDHADMLKQYATCLSRLLPKYNVTEPQIYFDIWVSINDRFQQRIFDPRVDIVQAAWSPFQRTSWVQPLLMDLSPWRAKLQEIKSSLDNHTEVVFIADFPGLHLENFVSEDLGNTSIQLLQGEVTVELVAEQKNQTLREGEKMQLPAGEYHKVYTTSPSPSCYMYVYVNTTELALEQDLAYLQELKEKVENGSETGPLPPELQPLLEGEVKGGPEPTPLVQTFLRRQQRLQEIERRRNTPFHERFFRFLLRKLYVFRRSFLMTCISLRNLILGRPSLEQLAQEVTYANLRPFEAVGELNPSNTDSSHSNPPESNPDPVHSEF

SEQ ID NO: 47288 - protein, 701 aa, Homo sapiens
MAVSAGSARTSPSSGFLMVLDIPQERGLSSLDRKYLDGLDVCRFPLLDALRPLPLDWMYLVYTIMFLGALGMMLGLCYRISCVLFLLPYWYVFLLDKTSWNNHSYLYGLLAFQLTFMDANHYWSVDGLLNAHRRNAHVPLWNYAVLRGQIFIVYFIAGVKKLDADWVEGYSMEYLSRHWLFSPFKLLLSEELTSLLVVHWGGLLLDLSAGFLLFFDVSRSIGLFFVSYFHCMNSQLFSIGMFSYVMLASSPLFCSPEWPRKLVSYCPRRLQQLLPLKAAPQPSVSCVYKRSRGKSGQKPGLRHQLGAAFTLLYLLEQLFLPYSHFLTQGYNNWTNGLYGYSWDMMVHSRSHQHVKITYRDGRTGELGYLNPGVFTQSRRWKDHADMLKQYATCLSRLLPKYNVTEPQIYFDIWVSINDRFQQRIFDPRVDIVQAAWSPFQRTSWVQPLLMDLSPWRAKLQEIKSSLDNHTEVVFIADFPGLHLENFVSEDLGNTSIQLLQGEVTVELVAEQKNQTLREGEKMQLPAGEYHKVYTTSPSPSCYMYVYVNTTELALEQDLAYLQELKEKVENGSETGPLPPELQPLLEGEVKGGPEPTPLVQTFLRRQQRLQEIERRRNTPFHERFFRFLLRKLYVFRRSFLMTCISLRNLILGRPSLEQLAQEVTYANLRPFEAVGELNPSNTDSSHSNPPESNPDPVHSEF

SEQ ID NO: 47289 - protein, 318 aa, Homo sapiens
MASPGCLLCVLGLLLCGAASLELSRPHGDTAKKPIIGILMQKCRNKVMKNYGRYYIAASYVKYLESAGARVVPVRLDLTEKDYEILFKSINGILFPGGSVDLRRSDYAKVAKIFYNLSIQSFDDGDYFPVWGTCLGFEELSLLISGECLLTATDTVDVAMPLNFTGGQLHSRMFQNFPTELLLSLAVEPLTANFHKWSLSVKNFTMNEKLKKFFNVLTTNTDGKIEFISTMEGYKYPVYGVQWHPEKAPYEWKNLDGISHAPNAVKTAFYLAEFFVNEARKNNHHFKSESEEEKALIYQFSPIYTGNISSFQQCYIFD

SEQ ID NO: 47290 - protein, 114 aa, Homo sapiens
MANSGCKDVTGPDEESFLYFAYGSNLLTERIHLRNPSAAFFCVARLQDFKLDFGNSQGKTSQTWHGGIATIFQSPGDEVWGVVWKMNKSNLNSLDELFAWVQKKMVCRWSIKRS

SEQ ID NO: 47291 - protein, 188 aa, Homo sapiens
MANSGCKDVTGPDEESFLYFAYGSNLLTERIHLRNPSAAFFCVARLQDFKLDFGNSQGKTSQTWHGGIATIFQSPGDEVWGVVWKMNKSNLNSLDEQEGVKSGMYVVIEVKVATQEGKEITCRSYLMTNYESAPPSPQYKKIICMGAKENGLPLEYQEKLKAIEPNDYTGKVSEEIEDIIKKGETQTL

SEQ ID NO: 47292 - protein, 127 aa, Homo sapiens [sequence omitted]

SEQ ID NO: 47293 - protein, 94 aa, Homo sapiens
MANSGCKDVTGPDEESFLYFAYGSNLLTERIHLRNPSAAFFCVARLQIICMGAKENGLPLEYQEKLKAIEPNDYTGKVSEEIEDIIKKGETQTL

SEQ ID NO: 47294 - protein, 166 aa, Homo sapiens
MANSGCKDVTGPDEESFLYFAYGSNLLTERIHLRNPSAAFFCVARLQDFKLDFGNSQGKTSQTWHGGIATIFQSPGDEVWGVVWKMNKSNLNSLDEWRKKRHTAFQNQGNHPCKHKTRMWDRDPKIPVQNLSLALCWQAQSGHGTCNRLFAWVQKKMVCRWSIKRS

SEQ ID NO: 47295 - protein, 569 aa, Homo sapiens
MKKKLVVLGLLAVVLVLVIVGLCLWLPSASKEPDNHVYTRAAVAADAKQCSKIGRDALRDGGSAVDAAIAALLCVGLMNAHSMGIGGGLFLTIYNSTTRKAEVINAREVAPRLAFATMFNSSEQSQKGGLSVAVPGEIRGYELAHQRHGRLPWARLFQPSIQLARQGFPVGKGLAAALENKRTVIEQQPVLCEVFCRDRKVLREGERLTLPQLADTYETLAIEGAQAFYNGSLTAQIVKDIQAAGGIVTAEDLNNYRAELIEHPLNISLGDVVLYMPSAPLSGPVLALILNILKGYNFSRESVESPEQKGLTYHRIVEAFRFAYAKRTLLGDPKFVDVTEVVRNMTSEFFAAQLRAQISDDTTHPISYYKPEFYTPDDGGTAHLSVVAEDGSAVSATSTINLYFGSKVRSPVSGILFNNEMDDFSSPSITNEFGVPPSPANFIQPGKQPLSSMCPTIMVGQDGQVRMVVGAAGGTQITTATALAIIYNLWFGYDVKRAVEEPRLHNQLLPNVTTVERNIDQAVTAALETRHHHTQIASTFIAVVQAIVRTAGGWAAASDSRKGGEPAGY

SEQ ID NO: 47296 - protein, 569 aa, Homo sapiens; identical to SEQ ID NO: 47295

SEQ ID NO: 47297 - protein, 569 aa, Homo sapiens; identical to SEQ ID NO: 47295

SEQ ID NO: 47298 - protein, 569 aa, Homo sapiens; identical to SEQ ID NO: 47295

SEQ ID NO: 47299 - protein, 225 aa, Homo sapiens
MTSEFFAAQLRAQISDDTTHPISYYKPEFYTPDDGGTAHLSVVAEDGSAVSATSTINLYFGSKVRSPVSGILFNNEMDDFSSPSITNEFGVPPSPANFIQPGKQPLSSMCPTIMVGQDGQVRMVVGAAGGTQITTATALAIIYNLWFGYDVKRAVEEPRLHNQLLPNVTTVERNIDQAVTAALETRHHHTQIASTFIAVVQAIVRTAGGWAAASDSRKGGEPAGY

SEQ ID NO: 47300 - protein, 225 aa, Homo sapiens; identical to SEQ ID NO: 47299

SEQ ID NO: 47301 - protein, 225 aa, Homo sapiens; identical to SEQ ID NO: 47299

SEQ ID NO: 47302 - protein, 569 aa, Homo sapiens; identical to SEQ ID NO: 47295

SEQ ID NO: 47303 - protein, 120 aa, Homo sapiens
MKKKLVVLGLLAVVLVLVIVGLCLWLPSASKEPDNHVYTRAAVAADAKQCSKIGRDALRDGGSAVDAAIAALLCVGLMNAHSMGIGGGLFLTIYNSTTRKAEVINAREVAPRLAFATMFN

SEQ ID NO: 47304 - protein, 463 aa, Homo sapiens
MKKKLVVLGLLAVVLVLVIVGLCLWLPSASKEPDNHVYTRAAVAADAKQCSKIGRDALRDGGSAVDAAIAALLCVGLMNAHSMGIGGGLFLTIYNSTTRKAEVINAREVAPRLAFATMFNSSEQSQKGGLSVAVPGEIRGYELAHQRHGRLPWARLFQPSIQLARQGFPVGKGLAAALENKRTVIEQQPVLCEVFCRDRKVLREGERLTLPQLADTYETLAIEGAQAFYNGSLTAQIVKDIQAAGGIVTAEDLNNYRAELIEHPLNISLGDVVLYMPSAPLSGPVLALILNILKGYNFSRESVESPEQKGLTYHRIVEAFRFAYAKRTLLGDPKFVDVTEVVRNMTSEFFAAQLRAQISDDTTHPISYYKPEFYTPDDGGTAHLSVVAEDGSAVSATSTINLYFGSKVRSPVSGILFNNEMDDFSSPSITNEFGVPPSPANFIQPGKQPLSSMCPTIMVGQDG

SEQ ID NO: 47305 - protein, 80 aa, Homo sapiens
MKKKLVVLGLLAVVLVLVIVGLCLWLPSASKEPDNHVYTRAAVAADAKQCSKIGRDALRDGGSAVDAAIAALLCVGLMNA

SEQ ID NO: 47306 - protein, 174 aa, Homo sapiens
MKKKLVVLGLLAVVLVLVIVGLCLWLPSASKEPDNHVYTRAAVAADAKQCSKIGRDALRDGGSAVDAAIAALLCVGLMNAHSMGIGGGLFLTIYNSTTRKAEVINAREVAPRLAFATMFNSSEQSQKGGLSVAVPGEIRGYELAHQRHGRLPWARLFQPSIQLARQGFPVGKGL

SEQ ID NO: 47307 - protein, 126 aa, Homo sapiens
MKKKLVVLGLLAVVLVLVIVGLCLWLPSASKEPDNHVYTRAAVAADAKQCSKIGRDALRDGGSAVDAAIAALLCVGLMNAHSMGIGGGLFLTIYNSTTRKAEVINAREVAPRLAFATMFNSSEQSQ

SEQ ID NO: 47308 - protein, 109 aa, Homo sapiens
MKKKLVVLGLLAVVLVLVIVGLCLWLPSASKEPDNHVYTRAAVAADAKQCSKIGRDALRDGGSAVDAAIAALLCVGLMNAHSMGIGGGLFLTIYNSTTRKAEVINAREV

SEQ ID NO: 47309 - protein, 111 aa, Homo sapiens
MKKKLVVLGLLAVVLVLVIVGLCLWLPSASKEPDNHVYTRAAVAADAKQCSKIGRDALRDGGSAVDAAIAALLCVGLMNAHSMGIGGGLFLTIYNSTTRKAEVINAREVAP

SEQ ID NO: 47310 - protein, 37 aa, Homo sapiens
MKKKLVVLGLLAVVLVLVIVGLCLWLPSASKEPDNHV

SEQ ID NO: 47311 - protein, 68 aa, Homo sapiens
MKKKLVVLGLLAVVLVLVIVGLCLWLPSASKEPDNHVYTRAAVAADAKQCSKIGRDALRDGGSAVDAA

SEQ ID NO: 47312 - protein, 126 aa, Homo sapiens; identical to SEQ ID NO: 47307

SEQ ID NO: 47313 - protein, 116 aa, Homo sapiens
MKKKLVVLGLLAVVLVLVIVGLCLWLPSASKEPDNHVYTRAAVAADAKQCSKIGRDALRDGGSAVDAAIAALLCVGLMNAHSMGIGGGLFLTIYNSTTRKAEVINAREVAPRLAFA

SEQ ID NO: 47314 - protein, 127 aa, Homo sapiens
MKKKLVVLGLLAVVLVLVIVGLCLWLPSASKEPDNHVYTRAAVAADAKQCSKIGRDALRDGGSAVDAAIAALLCVGLMNAHSMGIGGGLFLTIYNSTTRKAEVINAREVAPRLAFATMFNSSEQSQK

SEQ ID NO: 47315 - protein, 98 aa, Homo sapiens
MKKKLVVLGLLAVVLVLVIVGLCLWLPSASKEPDNHVYTRAAVAADAKQCSKIGRDALRDGGSAVDAAIAALLCVGLMNAHSMGIGGGLFLTIYNSTT

SEQ ID NO: 47316 - protein, 30 aa, Homo sapiens
MKKKLVVLGLLAVVLVLVIVGLCLWLPSAS

SEQ ID NO: 47317 - protein, 569 aa, Homo sapiens
MKKKLVVLGLLAVVLVLVIVGLCLWLPSASKEPDNHVYTRAAMAADAKQCLEIGRDTLRDGGSAVDAAIAALLCVGLMNAHSMGIGVGLFLTIYNSTTRKAEVINAREVAPRLAFASMFNSSEQSQKGGLSVAVPGEIRGYELAHQRHGRLPWARLFQPSIQLARQGFPVGKGLAAVLENKRTVIEQQPVLWYVFCRDRKVLREGERLTLPRLADTYEMLAIEGAQAFYNGSLMAQIVKDIQAAGGIVTAEDLNNYRAELIEHPLNISLGDAVLYMPSARLSGPVLALILNILKGYNFSRESVETPEQKGLTYHRIVEAFRFAYAKRTLLGDPKFVDVTEVVRNMTSEFFAAQLRSQISDHTTHPISYYKPEFYTPDDGGTAHLSVVAEDGSAVSATSTINLYFGSKVCSPVSGILFNNEWTTSALPAFTNEFGAPPSPANFIQPGKQPLLSMCLTIMVGQDGQVRMVVGAAGGTQITTDTALAIIYNLWFGYDVKRAVEEPRLHNKLLPNVTTVERNIDQAVTAALETRHHHTQIASTFIAVVQAIVRTAGGWAAASDSRKGGEPAGY

SEQ ID NO: 47318 - protein, 559 aa, Homo sapiens
MKKKLVVLGLLAVVLVLVIVGLCLWLPSASKEPDNHVYTRAAMAADAKQCLEIGRDTLRDGGSAVDAAIAALLCVGLMNAHSMGIGVGLFLTIYNSTTRKAEVINAREVAPRLAFASMFNSSEQSQKGGLSVAVPGEIRGYELAHQRHGRLPWARLFQPSIQLARQGFPVGKGLAAVLENKRTVIEQQPVLWYVFCRDRKVLREGERLTLPRLADTYEMLAIEGAQAFYNGSLMAQIVKDIQAAGGIVTAEDLNNYRAELIEHPLNISLGDAVLYMPSARLSGPVLALILNILKGYNFSRESVETPEQKGLTYHRIVEAFRFAYAKRTLLGDPKFVDVTEVVRNMTSEFFAAQLRSQISDHTTHPISYYKPEFYTPDDGGTAHLSVVAEDGSAVSATSTINLYGILFNNEWTTSALPAFTNEFGAPPSPANFIQPGKQPLLSMCLTIMVGQDGQVRMVVGAAGGTQITTDTALAIIYNLWFGYDVKRAVEEPRLHNKLLPNVTTVERNIDQAVTAALETRHHHTQIASTFIAVVQAIVRTAGGWAAASDSRKGGEPAGY

SEQ ID NO: 47319 - protein, 569 aa, Homo sapiens; identical to SEQ ID NO: 47317

SEQ ID NO: 47320 - protein, 554 aa, Homo sapiens
MARGYGATVSLVLLGLGLALAVIVLAVVLSRHQAPCGPQAFAHAAVAADSKVCSDIGRAILQQQGSPVDATIAALVCTSVVNPQSMGLGGGVIFTIYNVTTGAQWIGVPGELRGYAEAHRRHGRLPWAQLFQPTIALLRGGHVVAPVLSRFLHNSILRPSLQASTLRQLFFNGTEPLRPQDPLPWPALATTLETVATEGVEVFYTGRLGQMLVEDIAKEGSQLTLQDLAKFQPEVVDALEVPLGDYTLYSPPPPAGGAILSFILNVLRGFNFSTESMARPEGRVNVYHHLVETLKFAKGQRWRLGDPRSHPKLQNASRDLLGETLAQLIRQQIDGRGDHQLSHYSLAEAWGHGTGTSHVSVLGEDGSAVAATSTINTPFGAMVYSPRTGIILNNELLDLCERCPRGSGTTPSPVSGDRVGGAPGRCWPPVPGERSPSSMVPSILINKAQGSKLVIGGAGGELIISAVAQAIMSKLWLGFDLRAAIAAPILHVNSKGCVEYEPNFSQEVQRGLQDRGQNQTQRPFFLNVVQAVSQEGACVYAVSDLRKSGEAAGY

SEQ ID NO: 47321 - protein, 586 aa, Homo sapiens
MARGYGATVSLVLLGLGLALAVIVLAVVLSRHQAPCGPQAFAHAAVAADSKVCSDIGRAILQQQGSPVDATIAALVCTSVVNPQSMGLGGGVIFTIYNVTTGKVEVINARETVPASHAPSLLDQCAQALPLGTGAQWIGVPGELRGYAEAHRRHGRLPWAQLFQPTIALLRGGHVVAPVLSRFLHNSILRPSLQASTLRQLFFNGTEPLRPQDPLPWPALATTLETVATEGVEVFYTGRLGQMLVEDIAKEGSQLTLQDLAKFQPEVVDALEVPLGDYTLYSPPPPAGGAILSFILNVLRGFNFSTESMARPEGRVNVYHHLVETLKFAKGQRWRLGDPRSHPKLQNASRDLLGETLAQLIRQQIDGRGDHQLSHYSLAEAWGHGTGTSHVSVLGEDGSAVAATSTINTPFGAMVYSPRTGIILNNELLDLCERCPRGSGTTPSPVSGDRVGGAPGRCWPPVPGERSPSSMVPSILINKAQGSKLVIGGAGGELIISAVAQAIMSKLWLGFDLRAAIAAPILHVNSKGCVEYEPNFSQEVQRGLQDRGQNQTQRPFFLNVVQAVSQEGACVYAVSDLRKSGEAAGY

SEQ ID NO: 47322 - protein, 587 aa, Homo sapiens
MARGYGATVSLVLLGLGLALAVIVLAVVLSRHQAPCGPQAFAHAAVAADSKVCSDIGRAILQQQGSPVDATIAALVCTSVVNPQSMGLGGGVIFTIYNVTTGKVEVINARETVPASHAPSLLDQCAQALPLGTGAQWIGVPGELRGYAEAHRRHGRLPWAQLFQPTIALLRGGHVVAPVLSRFLHNSILRPSLQASTLRQLFFNGTEPLRPQDPLPWPALATTLETVATEGVEVFYTGRLGQMLVEDIAKEGSQLTLQDLAKFQPEVVDALEVPLGDYTLYSPPPPAGGAILSFILNVLRGFNFSTESMARPEGRVNVYHHLVETLKFAKGQRWRLGDPRSHPKLQNASRDLLGETLAQLIRQQIDGRGDHQLSHYSLAEAWGHGTGTSHVSVLGEDGSAVAATSTINTPFGAMVYSPRTGIILNNELLDLCERCPRGSGTTPSPAVSGDRVGGAPGRCWPPVPGERSPSSMVPSILINKAQGSKLVIGGAGGELIISAVAQAIMSKLWLGFDLRAAIAAPILHVNSKGCVEYEPNFSQEVQRGLQDRGQNQTQRPFFLNVVQAVSQEGACVYAVSDLRKSGEAAGY

SEQ ID NO: 47323 - protein, 510 aa, Homo sapiens
MARGYGATVSLVLLGLGLALAVIVLAVVLSRHQAPCGPQAFAHAAVAADSKVCSDIGRGPVDRGARGAPWLCRGPPPPWPPALGAAVPAHHRAAPRGACGGPCPQPFPAQQHPAAFLAGVNPALFFNGTEPLRPQDPLPWPALATTLETVATEGVEVFYTGRLGQMLVEDIAKEGSQLTLQDLAKFQPEVVDALEVPLGDYTLYSPPPPAGGAILSFILNVLRGFNFSTESMARPEGRVNVYHHLVETLKFAKGQRWRLGDPRSHPKLQNASRDLLGETLAQLIRQQIDGRGDHQLSHYSLAEAWGHGTGTSHVSVLGEDGSAVAATSTINTPFGAMVYSPRTGIILNNELLDLCERCPRGSGTTPSPAVSGDRVGGAPGRCWPPVPGERSPSSMVPSILINKAQGSKLVIGGAGGELIISAVAQAIMSKLWLGFDLRAAIAAPILHVNSKGCVEYEPNFSQEVQRGLQDRGQNQTQRPFFLNVVQAVSQEGACVYAVSDLRKSGEAAGY

SEQ ID NO: 47324 - protein, 501 aa, Homo sapiens
MGLGGGVIFTIYNVTTGKVEVINARETVPASHAPSLLDQCAQALPLGTGAQWIGVPGELRGYAEAHRRHGRLPWAQLFQPTIALLRGGHVVAPVLSRFLHNSILRPSLQASTLRQLFFNGTEPLRPQDPLPWPALATTLETVATEGVEVFYTGRLGQMLVEDIAKEGSQLTLQDLAKFQPEVVDALEVPLGDYTLYSPPPPAGGAILSFILNVLRGFNFSTESMARPEGRVNVYHHLVETLKFAKGQRWRLGDPRSHPKLQNASRDLLGETLAQLIRQQIDGRGDHQLSHYSLAEAWGHGTGTSHVSVLGEDGSAVAATSTINTPFGAMVYSPRTGIILNNELLDLCERCPRGSGTTPSPVSGDRVGGAPGRCWPPVPGERSPSSMVPSILINKAQGSKLVIGGAGGELIISAVAQAIMSKLWLGFDLRAAIAAPILHVNSKGCVEYEPNFSQEVQRGLQDRGQNQTQRPFFLNVVQAVSQEGACVYAVSDLRKSGEAAGY

SEQ ID NO: 47325 - protein, 461 aa, Homo sapiens
MERAEEPVVYQKLLPWEPSLESEEEVEEEETSEALVLNPRRHQDSSRNKAGGLPGTWARVVAALLLLAVGCSLAVRQLQNQGRSTGSLGSVAPPPGGHSHGPGVYHHGAIISPAGAMFWGLFHDSSSGNSTALTSGPAQTLAPGLGLPAALPTLHLLHARFGRLPWPRLLVGPTTLAQEGFLVDTPLARALVARGTEGLCPLLCHADGTPLGAGARATNPQLAAVLRSAALAPTSDLAGDALLSLLAGDLGVEVPSAVPRPTLEPAEQLPVPQGILFTTPSPSAGPELLALLEAALRSGAPIPDPCPPFLQTAVSPESSALAAVDSSGSVLLLTSSLNCSFGSAHLSPSTGVLLSNLVAKSTTSAWACPLILRGSLDDTEADVLGLVASGTPDVARAMTHTLLRHLAARPPTQAQHQHQGQQEPTEHPSTCGQGTLLQVAAHTEHAHVSSVPHACCPFQGF

SEQ ID NO: 47326 - protein, 493 aa, Homo sapiens
MERAEEPVVYQKLLPWEPSLESEEEVEEEETSEALVLNPRRHQDSSRNKAGGLPGTWARVVAALLLLAVGCSLAVRQLQNQGRSTGSLGSVAPPPGGHSHGPGVYHHGAIISPAGRELLVAGGNVVDAGVGAALCLAVVHPHATGLGAMFWGLFHDSSSGNSTALTSGPAQTLAPGLGLPAALPTLHLLHARFGRLPWPRLLVGPTTLAQEGFLVDTPLARALVARGTEGLCPLLCHADGTPLGAGARATNPQLAAVLRSAALAPTSDLAGDALLSLLAGDLGVEVPSAVPRPTLEPAEQLPVPQGILFTTPSPSAGPELLALLEAALRSGAPIPDPCPPFLQTAVSPESSALAAVDSSGSVLLLTSSLNCSFGSAHLSPSTGVLLSNLVAKSTTSAWACPLILRGSLDDTEADVLGLVASGTPDVARAMTHTLLRHLAARPPTQAQHQHQGQQEPTEHPSTCGQGTLLQVAAHTEHAHVSSVPHACCPFQGF

SEQ ID NO: 47327 - protein, 345 aa, Homo sapiens
MFWGLFHDSSSGNSTALTSGPAQTLAPGLGLPAALPTLHLLHARFGRLPWPRLLVGPTTLAQEGFLVDTPLARALVARGTEGLCPLLCHADGTPLGAGARATNPQLAAVLRSAALAPTSDLAGDALLSLLAGDLGVEVPSAVPRPTLEPAEQLPVPQGILFTTPSPSAGPELLALLEAALRSGAPIPDPCPPFLQTAVSPESSALAAVDSSGSVLLLTSSLNCSFGSAHLSPSTGVLLSNLVAKSTTSAWACPLILRGSLDDTEADVLGLVASGTPDVARAMTHTLLRHLAARPPTQAQHQHQGQQEPTEHPSTCGQGTLLQVAAHTEHAHVSSVPHACCPFQGF

SEQ ID NO: 47328 - protein, 493 aa, Homo sapiens; identical to SEQ ID NO: 47326

SEQ ID NO: 47329 - protein, 225 aa, Homo sapiens
MTSEFFSAQLRAQISDDTTHPISYYKPEFYMPDDGGTAHLSVVAEDGSAVSATSTINLYFGSKVRSPVSGILLNNEMDDFSSTSITNEFGVPPSPANFIQPGKQPLSSMCPTIMVGQDGQVRMVVGAAGGTQITMATALAIIYNLWFGYDVKWAVEEPRLHNQLLPNVTTVERNIDQEVTAALETRHHHTQITSTFIAVVQAIVRMAGGWAAASDSRKGGEPAGY

SEQ ID NO: 47330 - protein, 225 aa, Homo sapiens; identical to SEQ ID NO: 47329

SEQ ID NO: 47331 - protein, 225 aa, Homo sapiens; identical to SEQ ID NO: 47329

SEQ ID NO: 47332 - protein, 225 aa, Homo sapiens
MTSEFFAAQLRAQISDDTTHPISYYKPEFYTPVDGGTAHLSVVAEDGSAVSATSTINLYFGSKVRSPVSEILFNDEMDDFSSPNITNEFGVPPSPANFIQPGKQPLSSMCPTIMVGQDGQVRMVVGAAGGTQITTATALAIIYNLWFGYDVKRAVEEPRLHNQLLPNVTTVERNIDQAVTAALETRHHHTQIASTFIAVVQAIVRTAGGWAAASDSRKGGEPAGY

SEQ ID NO: 47333 - protein, 218 aa, Homo sapiens
MTSEFFAAQLRAQISDDTTHPISYYKPEFYTPVDGGTAHLSVVAEDGSAVSATSTINLYFGSKVRSPVSEILFNDEMDDFSSPNITNEFGVPPSPANFIQPGKQPLSSMCPTIMVGQDGQPPSHADHTPMPQAIIYNLWFGYDVKRAVEEPRLHNQLLPNVTTVERNIDQAVTAALETRHHHTQIASTFIAVVQAIVRTAGGWAAASDSRKGGEPAGY

SEQ ID NO: 47334 - protein, 225 aa, Homo sapiens
MTSEFFAAQLRSQISDHTTHPISYYKPEFYTPDDGGTAHLSVVAEDGSAVSATSTINLYFGSKVCSPVSGILFNNEWTTSALPAFTNEFGAPPSPANFIQPGKQPLLSMCPTIMVGQDGQVRMVVGAAGGTQITTDTALAIIYNLWFGYDVKRAVEEPRLHNKLLPNVTTVERNIDQAVTAALETRHHHTQIASTFIAVVQAIVRTAGGWAAASDSRKGGEPAGY

SEQ ID NO: 47335 - protein, 236 aa, Homo sapiens
PALGSQQVVRNMTSEFFAAQLRSQISDHTTHPISYYKPEFYTPDDGGTAHLSVVAEDGSAVSATSTINLYFGSKVCSPVSGILFNNEWTTSALPAFTNEFGAPPSPANFIQPGKQPLLSMCPTIMVGQDGQVRMVVGAAGGTQITTDTALAIIYNLWFGYDVKRAVEEPRLHNKLLPNVTTVERNIDQAVTAALETRHHHTQIASTFIAVVQAIVRTAGGWAAASDSRKGGEPAGY

SEQ ID NO: 47336 - protein, 358 aa, Homo sapiens
MAERQEEQRGSPPLRAEGKADAEVKLILYHWTHSFSSQKVRLVIAEKALKCEEHDVSLPLSEHNEPWFMRLNSTGEVPVLIHGENIICEATQIIDYLEQTFLDERTPRLMPDKESMYYPRVQHYRELLDSLPMDAYTHGCILHPELTVDSMIPAYATTRIRSQIGNTESELKKLAEENPDLQEAYIAKQKRLKSKLLDHDNVKYLKKILDELEKVLDQVETELQRRNEETPEEGQQPWLCGESFTLADVSLAVTLHRLKFLGFARRNWGNGKRPNLETYYERVLKRKTFNKVLGHVNNILISAVLPTAFRVAKKRAPKVLGTTLVVGLLAGVGYFAFMLFRKRLGSMILAFRPRPNYF

SEQ ID NO: 47337 - protein, 290 aa, Homo sapiens
MRLNSTGEVPVLIHGENIICEATQIIDYLEQTFLDERTPRLMPDKESMYYPRVQHYRELLDSLPMDAYTHGCILHPELTVDSMIPAYATTRIRSQIGNTESELKKLAEENPDLQEAYIAKQKRLKSKLLDHDNVKYLKKILDELEKVLDQVETELQRRNEETPEEGQQPWLCGESFTLADVSLAVTLHRLKFLGFARRNWGNGKRPNLETYYERVLKRKTFNKVLGHVNNILISAVLPTAFRVAKKRAPKVLGTTLVVGLLAGVGYFAFMLFRKRLGSMILAFRPRPNYF

SEQ ID NO: 47338 - protein, 543 aa, Homo sapiens
MGDWNLLGGILEEVHSHSTIVGKIWLTILFIFRMLVLRVAAEDVWDDEQSAFACNTRQPGCNNICYDDAFPISLIRFWVLQIIFVSSPSLVYMGHALYRLRAFEKDRQRKKSHLRAQMENPDLDLEEQQRIDRELRRLEEQKRIHKVPLKGCLLRTYVLHILTRSVLEVGFMIGQYILYGFQMHPLYKCTQPPCPNAVDCFVSRPTEKTIFMLFMHSIAAISLLLNILEIFHLGIRKIMRTLYKKSSSEGIEDETGPPFHLKKYSVAQQCMICSSLPERISPLQANNQQQVIRVNVPKSKTMWQIPQPRQLEVDPSNGKKDWSEKDQHSGQLHVHSPCPWAGSAGNQHLGQQSDHSSFGLQNTMSQSWLGTTTAPRNCPSFAVGTWEQSQDPEPSGEPLTDLHSHCRDSEGSMRESGVWIDRSRPGSRKASFLSRLLSEKRHLHSDSGSSGSRNSSCLDFPHWENSPSPLPSVTGHRTSMVRQAALPIMELSQELFHSGCFLFPFFLPGVCMYVCVDREADGGGDYLWRDKIIHSIHSVKFNS

SEQ ID NO: 47339 - protein, 435 aa, Homo sapiens
MGDWSFLGRLLENAQEHSTVIGKVWLTVLFIFRILVLGAAAEDVWGDEQSDFTCNTQQPGCENVCYDRAFPISHIRFWALQIIFVSTPTLIYLGHVLHIVRMEEKKKEREEEEQLKRESPSPKEPPQDNPSSRDDRGRVRMAGALLRTYVFNIIFKTLFEVGFIAGQYFLYGFELKPLYRCDRWPCPNTVDCFISRPTEKTIFIIFMLAVACASLLLNMLEIYHLGWKKLKQGVTSRLGPDASEAPLGTADPPPLPPSSRPPAVAIGFPPYYAHTAAPLGQARAVGYPGAPPPAADFKLLALTEARGKGQSAKLYNGHHHLLMTEQNWANQAAERQPPALKAYPAASTPAAPSPVGSSSPPLAHEAEAGAAPLLLDGSGSSLEGSALAGTPEEEEQAVTTAAQMHQPPLPLGDPGRASKASRASSGRARPEDLAI

SEQ ID NO: 47340 - protein, 333 aa, Homo sapiens
MGDWGFLEKLLDQVQEHSTVVGKIWLTVLFIFRILILGLAGESVWGDEQSDFECNTAQPGCTNVCYDQAFPISHIRYWVLQFLFVSTPTLVYLGHVIYLSRREERLRQKEGELRALPAKDPQVERALAAVERQMAKISVAEDGRLRIRGALMGTYVASVLCKSVLEAGFLYGQWRLYGWTMEPVFVCQRAPCPYLVDCFVSRPTEKTIFIIFMLVVGLISLVLNLLELVHLLCRCLSRGMRARQGQDAPPTQGTSSDPYTDQVFFYLPVGQGPSSPPCPTYNGLSSSEQNWANLTTEERLASSRPPLFLDPPPQNGQKPPSRPSSSASKKQYV

SEQ ID NO: 47341 - protein, 292 aa, Homo sapiens
MGDWGFLEKLLDQVQEHSTVVGKIWLTVLFIFRILILGLAGESVWGDEQSDFECNTAQPGCTNVCYDQAFPISHIRYWVLQFLFVSTPTLVYLGHVIYLSRREERLRQKEGELRALPAKDPQVERALAAVERQMAKISVAEDGRLRIRGALMGTYVASVLCKSVLEAGFLYGQWRLYGWTMEPVFVCQRAPCPYLVDCFVSRPTEKTIFIIFMLVVGLISLVLNLLELVHLLCRCLSRGMRARQGQDAPPTQGTSSDPYTDQVFFYLPVGQGPSSPPCPTYNGLSSSEQNWA

SEQ ID NO: 47342 - protein, 293 aa, Homo sapiens
MGDWGFLEKLLDQVQEHSTVVGKIWLTVLFIFRILILGLAGESVWGDEQSDFECNTAQPGCTNVCYDQAFPISHIRYWVLQFLFVSTPTLVYLGHVIYLSRREERLRQKEGELRALPAKDPQVERALAAVERQMAKISVAEDGRLRIRGALMGTYVASVLCKSVLEAGFLYGQWRLYGWTMEPVFVCQRAPCPYLVDCFVSRPTEKTIFIIFMLVVGLISLVLNLLELVHLLCRCLSRGMRARQGQDAPPTQGTPQTLTRTRSSSTSPWARGPHPHHAPPTMGSHPVSRTGPT

SEQ ID NO: 47343 - protein, 358 aa, Homo sapiens
MGDWSFLGNFLEEVHKHSTVVGKVWLTVLFIFRMLVLGTAAESSWGDEQADFRCDTIQPGCQNVCYDQAFPISHIRYWVLQIIFVSTPSLVYMGHAMHTVRMQEKRKLREAERAKEVRGSGSYEYPVAEKAELSCWEEGNGRIALQGTLLNTYVCSILIRTTMEVGFIVGQYFIYGIFLTTLHVCRRSPCPHPVNCYVSRPTEKNVFIVFMLAVAALSLLLSLAELYHLGWKKIRQRFVKPRQHMAKCQLSGPSVGIVQSCTPPPDFNQCLENGPGGKFFNPFSNNMASQQNTDNLVTEQVRGQEQTPGEGFIQVRYGQKPEVPNGVSPGHRLPHGYHSDKRRLSKASSKARSDDLSV

SEQ ID NO: 47344 - protein, 358 aa, Homo sapiens; identical to SEQ ID NO: 47343

SEQ ID NO: 47345 - protein, 252 aa, Homo sapiens
MGDWSFLGNFLEEVHKHSTVVGKVWLTVLFIFRMLVLGTAAESSWGDEQADFRCDTIQPGCQNVCYDQAFPISHIRYWVLQIIFVSTPSLVYMGHAMHTVRMQEKRKLREAERAKEVRGSGSYEYPVAEKAELSCWEEGNGRIALQGTLLNTYVCSILIRTTMEVGFIVGQYFIYGIFLTTLHVCRRSPCPHPVNCYVSRPTEKNVFIVFMLAVAALSLLLSLAELYHLGWKKIRQRFVKPRQHMAKCQLSG

SEQ ID NO: 47346 - protein, 433 aa, Homo sapiens
MGDWSFLGNILEEVNEHSTVIGRVWLTVLFIFRILILGTAAEFVWGDEQSDFVCNTQQPGCENVCYDEAFPISHIRLWVLQIIFVSTPSLMYVGHAVHYVRMEEKRKSREAEELGQQAGTNGGPDQGSVKKSSGSKGTKKFRLEGTLLRTYICHIIFKTLFEVGFIVGHYFLYGFRILPLYRCSRWPCPNVVDCFVSRPTEKTIFILFMLSVASVSLFLNVMELGHLGLKGIRSALKRPVEQPLGEIPEKSLHSIAVSSIQKAKGYQLLEEEKIVSHYFPLTEVGMVETSPLPAKPFNQFEEKISTGPLGDLSRGYQETLPSYAQVGAQEVEGEGPPAEEGAEPEVGEKKEEAERLTTEEQEKVAVPEGEKVETPGVDKEGEKEEPQSEKVSKQGLPAEKTPSLCPELTTDDARPLSRLSKASSRARSDDLTV

SEQ ID NO: 47347 - protein, 433 aa, Homo sapiens; identical to SEQ ID NO: 47346

SEQ ID NO: 47348 - protein, 515 aa, Homo sapiens
MGDWNLLGDTLEEVHIHSTMIGKIWLTILFIFRMLVLGVAAEDVWNDEQSGFICNTEQPGCRNVCYDQAFPISLIRYWVLQVIFVSSPSLVYMGHALYRLRVLEEERQRMKAQLRVELEEVEFEMPRDRRRLEQELCQLEKRKLNKAPLRGTLLCTYVIHIFTRSVVEVGFMIGQYLLYGFHLEPLFKCHGHPCPNIIDCFVSRPTEKTIFLLFMQSIATISLFLNILEIFHLGFKKIKRGLWGKYKLKKEHNEFHANKAKQNVAKYQSTSANSLKRLPSAPDYNLLVEKQTHTAVYPSLNSSSVFQPNPDNHSVNDEKCILDEQETVLSNEISTLSTSCSHFQHISSNNNKDTHKIFGKELNGNQLMEKRETEGKDSKRNYYSRGHRSIPGVAIDGENNMRQSPQTVFSLPANCDWKPRWLRATWGSSTEHENRGSPPKGNLKGQFRKGTVRTLPPSQGDSQSLDIPNTADSLGGLSFEPGLVRTCNNPVCPPNHVVSLTNNLIGRRVPTDLQI

SEQ ID NO: 47349 - protein, 515 aa, Homo sapiens; identical to SEQ ID NO: 47348

SEQ ID NO: 47350 - protein, 514 aa, Homo sapiens
MGDWNLLGDTLEEVHIHSTMIGKIWLTILFIFRMLVLGVAAEDVWNDEQSGFICNTEQPGCRNVCYDQAFPISLIRYWVLQVIFVSSPSLVYMGHALYRLRVLEEERQRMKAQLRVELEEVEFEMPRDRRRLEQELCQLEKRKLNKAPLRGTLLCTYVIHIFTRSVVEVGFMIGQYLLYGFHLEPLFKCHGHPCPNIIDCFVSRPTEKTIFLLFMQSIATISLFLNILEIFHLGFKKIKRGLWGKYKLKKEHNEFHANKAKQNVAKYQSTSANSLKRLPSAPDYNLLVEKQTHTAVYPSLNSSSVFQPNPDNHSVNDEKCILDEQETVLSNEISTLSTSCSHFQHISSNNNKDTHKIFGKELNGNQLMEKRETEGKDSKRNYYSRGHRSIPGVAIDGENNMRQSPQTVFSLPANCDWKPRWLRATWGSSTEHENRGSPPKVPGSKATASSLLLILQRPTSSQPRLKETPKIKAEAKIYDSKHPPRLLQSTVSTFSGREPRSPAPMGHHSFRGPR

SEQ ID NO: 47351 - protein, 283 aa, Homo sapiens
MNWTGLYTLLSGVNRHSTAIGRVWLSVIFIFRIMVLVVAAESVWGDEKSSFICNTLQPGCNSVCYDQFFPISHVRLWSLQLILVSTPALLVAMHVAHQQHIEKKMLRLEGHGDPLHLEEVKRHKVHISGTLWWTYVISVVFRLLFEAVFMYVFYLLYPGYAMVRLVKCDVYPCPNTVDCFVSRPTEKTVFTVFMLAASGICIILNVAEVVYLIIRACARRAQRRSNPPSRKGSGFGHRLSPEYKQNEINKLLSEQDGSLKDILRRSPGTGAGLAEKSDRCSAC

SEQ ID NO: 47352 - protein, 283 aa, Homo sapiens; identical to SEQ ID NO: 47351

SEQ ID NO: 47353 - protein, 283 aa, Homo sapiens; identical to SEQ ID NO: 47351

SEQ ID NO: 47354 - protein, 84 aa, Homo sapiens
MNWTGLYTLLSGVNRHSTAIGRVWLSVIFIFRIMVLVVAAESVWGDEKSSFICNTLQPGCNSVCYDQFFPISHVRLWSLQLILV

SEQ ID NO: 47355 - protein, 226 aa, Homo sapiens
MDWGTLQTILGGVNKHSTSIGKIWLTVLFIFRIMILVVAAKEVWGDEQADFVCNTLQPGCKNVCYDHYFPISHIRLWALQLIFVSTPALLVAMHVAYRRHEKKRKFIKGEIKSEFKDIEEIKTQKVRIEGSLWWTYTSSIFFRVIFEAAFMYVFYVMYDGFSMQRLVKCNAWPCPNTVDCFVSRPTEKTVFTVFMIAVSGICILLNVTELCYLLIRYCSGKSKKPV

SEQ ID NO: 47356 - protein, 226 aa, Homo sapiens; identical to SEQ ID NO: 47355

SEQ ID NO: 47357 - protein, 270 aa, Homo sapiens
MDWKTLQALLSGVNKYSTAFGRIWLSVVFVFRVLVYVVAAERVWGDEQKDFDCNTKQPGCTNVCYDNYFPISNIRLWALQLIFVTCPSLLVILHVAYREERERRHRQKHGDQCAKLYDNAGKKHGGLWWTYLFSLIFKLIIEFLFLYLLHTLWHGFNMPRLVQCANVAPCPNIVDCYIARPTEKKIFTYFMVGASAVCIVLTICELCYLICHRVLRGLHKDKPRGGCSPSSSASRASTCRCHHKLVEAGEVDPDPGNNKLQASAPNLTPI

SEQ ID NO: 47358 - protein, 270 aa, Homo sapiens; identical to SEQ ID NO: 47357

SEQ ID NO: 47359 - protein, 254 aa, Homo sapiens
MDWKTLQALLSGVNKYSTAFGRIWLSVVFVFRVLVYVVAAERVWGDEQKDFDCNTKQPGCTNVCYDNYFPISNIRLWALQLIFVTCPSLLVILHVAYREERERRHRQKHGDQCAKLYDNAGKKHGGLWWTYLLHTLWHGFNMPRLVQCANVAPCPNIVDCYIARPTEKKIFTYFMVGASAVCIVLTICELCYLICHRVLRGLHKDKPRGGCSPSSSASRASTCRCHHKLVEAGEVDPDPGNNKLQASAPNLTPI

SEQ ID NO: 47360 - protein, 266 aa, Homo sapiens
MNWAFLQGLLSGVNKYSTVLSRIWLSVVFIFRVLVYVVAAEEVWDDEQKDFVCNTKQPGCPNVCYDEFFPVSHVRLWALQLILVTCPSLLVVMHVAYREERERKHHLKHGPNAPSLYDNLSKKRGGLWWTYLLSLIFKAAVDAGFLYIFHRLYKDYDMPRVVACSVEPCPHTVDCYISRPTEKKVFTYFMVTTAAICILLNLSEVFYLVGKRCMEIFGPRHRRPRCRECLPDTCPPYVLSQGGHPEDGNSVLMKAGSAPVDAGGYP

SEQ ID NO: 47361 - protein, 273 aa, Homo sapiens
MNWSIFEGLLSGVNKYSTAFGRIWLSLVFIFRVLVYLVTAERVWSDDHKDFDCNTRQPGCSNVCFDEFFPVSHVRLWALQLILVTCPSLLVVMHVAYREVQEKRHREAHGENSGRLYLNPGKKRGGLWWTYVCSLVFKASVDIAFLYVFHSFYPKYILPPVVKCHADPCPNIVDCFISKPSEKNIFTLFMVATAAICILLNLVELIYLVSKRCHECLAARKAQAMCTGHHPHGTTSSCKQDDLLSGDLIFLGSDSHPPLLPDRPRDHVKKTIL

SEQ ID NO: 47362 - protein, 261 aa, Homo sapiens
MDWGTLHTFIGGVNKHSTSIGKVWITVIFIFRVMILVVAAQEVWGDEQEDFVCNTLQPGCKNVCYDHFFPVSHIRLWALQLIFVSTPALLVAMHVAYYRHETTRKFRRGEKRNDFKDIEDIKKQKVRIEGSLWWTYTSSIFFRIIFEAAFMYVFYFLYNGYHLPWVLKCGIDPCPNLVDCFISRPTEKTVFTIFMISASVICMLLNVAELCYLLLKVCFRRSKRAQTQKNHPNHALKESKQNEMNELISDSGQNAITGFPS

SEQ ID NO: 47363 - protein, 261 aa, Homo sapiens; identical to SEQ ID NO: 47362

SEQ ID NO: 47364 - protein, 261 aa, Homo sapiens; identical to SEQ ID NO: 47362

SEQ ID NO: 47365 - protein, 261 aa, Homo sapiens; identical to SEQ ID NO: 47362

SEQ ID NO: 47366 - protein, 223 aa, Homo sapiens
MSWMFLRDLLSGVNKYSTGTGWIWLAVVFVFRLLVYMVAAEHVWKDEQKEFECNSRQPGCKNVCFDDFFPISQVRLWALQLIMVSTPSLLVVLHVAYHEGREKRHRKKLYVSPGTMDGGLWYAYLISLIVKTGFEIGFLVLFYKLYDGFSVPYLIKCDLKPCPNTVDCFISKPTEKTIFILFLVITSCLCIVLNFIELSFLVLKCFIKCCLQKYLKKPQVLSV

SEQ ID NO: 47367 - protein, 163 aa, Homo sapiens
MSWMFLRDLLSGVNKYSTGTGWIWLAVVFVFRLLVYMVAAEHVWKDEQKEFECNSRQPGCKNVCFDDFFPISQVRLWALQLIMVSTPSLLVVLHVAYHEGREKRHRKKLYVSPGTMDGGLWYAYLISLIVKTGFEIGFLVLFYKLYDGFSVPYLIKCDLKPCP

SEQ ID NO: 47368 - protein, 223 aa, Homo sapiens; identical to SEQ ID NO: 47366

SEQ ID NO: 47369 - protein, 321 aa, Homo sapiens
MGEWTILERLLEAAVQQHSTMIGRILLTVVVIFRILIVAIVGETVYDDEQTMFVCNTLQPGCNQACYDRAFPISHIRYWVFQIIMVCTPSLCFITYSVHQSAKQRERRYSTVFLALDRDPPESIGGPGGTGGGGSGGGKREDKKLQNAIVNGVLQNTENTSKETEPDCLEVKELTPHPSGLRTASKSKLRRQEGISRFYIIQVVFRNALEIGFLVGQYFLYGFSVPGLYECNRYPCIKEVECYVSRPTEKTVFLVFMFAVSGICVVLNLAELNHLGWRKIKLAVRGAQAKRKSIYEIRNKDLPRVSVPNFGRTQSSDSAYV

SEQ ID NO: 47370 - protein, 296 aa, Homo sapiens
MGEWAFLGSLLDAVQLQSPLVGRLWLVVMLIFRILVLATVGGAVFEDEQEEFVCNTLQPGCRQTCYDRAFPVSHYRFWLFHILLLSAPPVLFVVYSMHRAGKEAGGAEAAAQCAPGLPEAQCAPCALRARRARRCYLLSVALRLLAELTFLGGQALLYGFRVAPHFACAGPPCPHTVDCFVSRPTEKTVFVLFYFAVGLLSALLSVAELGHLLWKGRPRAGERDNRCNRAHEEAQKLLPPPPPPPPIVVTWEENRHLQGEGSPGSPHPKTELDAPRFRRESTSPAGWHCSLPFHGT

SEQ ID NO: 47371 - protein, 370 aa, Homo sapiens
MEGVDLLGFLIITLNCNVTMVGKLWFVLTMLLRMLVIVLAGRPVYQDEQERFVCNTLQPGCANVCYDVFSPVSHLRFWLIQGVCVLLPSAVFSVYVLHRGATLAALGPRRCPDPREPASGQRRCPRPFGERGGLQVPDFSAGYIIHLLLRTLLEAAFGALHYFLFGFLAPKKFPCTRPPCTGVVDCYVSRPTEKSLLMLFLWAVSALSFLLGLADLVCSLRRRMRRRPGPPTSPSIRKQSGASGHAEGRRTDEEGGREEEGAPAPPGARAGGEGAGSPRRTSRVSGHTKIPDEDESEVTSSASEKLGRQPRGRPHREAAQDPRGSGSEEQPSAAPSRLAAPPSCSSLQPPDPPASSSGAPHLRARKSEWV

SEQ ID NO: 47372 - protein, 396 aa, Homo sapiens
MSWSFLTRLLEEIHNHSTFVGKIWLTVLIVFRIVLTAVGGESIYYDEQSKFVCNTEQPGCENVCYDAFAPLSHVRFWVFQIILVATPSVMYLGYAIHKIAKMEHGEADKKAARSKPYAMRWKQHRALEETEEDNEEDPMMYPEMELESDKENKEQSQPKPKHDGRRRIREDGLMKIYVLQLLARTVFEVGFLIGQYFLYGFQVHPFYVCSRLPCPHKIDCFISRPTEKTIFLLIMYGVTGLCLLLNIWEMLHLGFGTIRDSLNSKRRELEDPGAYNYPFTWNTPSAPPGYNIAVKPDQIQYTELSNAKIAYKQNKANTAQEQQYGSHEENLPADLEALQREIRMAQERLDLAVQAYSHQNNPHGPREKKAKVGSKAGSNKSTASSKSGDGKTSVWI

SEQ ID NO: 47373 - protein, 396 aa, Homo sapiens; identical to SEQ ID NO: 47372

SEQ ID NO: 47374 - protein, 439 aa, Homo sapiens
MTNMSWSFLTRLLEEIHNHSTFVGKVWLTVLVVFRIVLTAVGGEAIYSDEQAKFTCNTRQPGCDNVCYDAFAPLSHVRFWVFQIVVISTPSVMYLGYAVHRLARASEQERRRALRRRPGPRRAPRAHLPPPHAGWPEPADLGEEEPMLGLGEEEEEEETGAAEGAGEEAEEAGAEEACTKAVGADGKAAGTPGPTGQHDGRRRIQREGLMRVYVAQLVARAAFEVAFLVGQYLLYGFEVRPFFPCSRQPCPHVVDCFVSRPTEKTVFLLVMYVVSCLCLLLNLCEMAHLGLGSAQDAVRGRRGPPASAPAPAPRPPPCAFPAAAAGLACPPDYSLVVRAAERARAHDQNLANLALQALRDGAAAGDRDRDSSPCVGLPAASRGPPRAGAPASRTGSATSAGTVGEQGRPGTHERPGAKPRAGSEKGSASSRDGKTTVWI

SEQ ID NO: 47375 - protein, 279 aa, Homo sapiens
MCGRFLRRLLAEESRRSTPVGRLLLPVLLGFRLVLLAASGPGVYGDEQSEFVCHTQQPGCKAACFDAFHPLSPLRFWVFQVILVAVPSALYMGFTLYHVIWHWELSGKGKEEETLIQGREGNTDVPGAGSLRLLWAYVAQLGARLVLEGAALGLQYHLYGFQMPSSFACRREPCLGSITCNLSRPSEKTIFLKTMFGVSGFCLLFTFLELVLLGLGRWWRTWKHKSSSSKYFLTSESTRRHKKATDSLPVVETKEQFQEAVPGRSLAQEKQRPVGPRDA

SEQ ID NO: 47376 - protein, 445 aa, Homo sapiens
MTMFENVTRALARQLNPRGDLTPLDSLIDFKRFHPFCLVLRKRKSTLFWGARYVRTDYTLLDVLEPGSSPSDPTDTGNFGFKNMLDTRVEGDVDVPKTVKVKGTAGLSQNSTLEVQTLSVAPKALETVQERKLAADHPFLKEMQDQGENLYVVMEVVETVQEVTLERAGKAEACFSLPFFAPLGLQGSINHKEAVTIPKGCVLAFRVRQLMVKGKDEWDIPHICNDNMQTFPPGEKSGEEKVILIQASDVGDVHEGFRTLKEEVQRETQQVEKLSRVGQSSLLSSLSKLLGKKKELQDLELALEGALDKGHEVTLEALPKDVLLSKEAVGAILYFVGALTELSEAQQKLLVKSMEKKILPVQLKLVESTMEQNFLLDKEGVFPLQPELLSSLGDEELTLTEALVGLSGLEVQRSGPQYMWDPDTLPRLCALYAGLSLLQQLTKAS

SEQ ID NO: 47377 - protein, 403 aa, Homo sapiens
MFSVFEEITRIVVKEMDAGGDMIAVRSLVDADRFRCFHLVGEKRTFFGCRHYTTGLTLMDILDTDGDKWLDELDSGLQGQKAEFQILDNVDSTGELIVRLPKEITISGSFQGFHHQKIKISENRISQQYLATLENRKLKRELPFSFRSINTRENLYLVTETLETVKEETLKSDRQYKFWSQISQGHLSYKHKGQREVTIPPNRVLSYRVKQLVFPNKETMKKDGASSCLGKSLGSEDSRNMKEKLEDMESVLKDLTEEKRKDVLNSLAKCLGKEDIRQDLEQRVSEVLISGELHMEDPDKPLLSSLFNAAGVLVEARAKAILDFLDALLELSEEQQFVAEALEKGTLPLLKDQVKSVMEQNWDELASSPPDMDYDPEARILCALYVVVSILLELAEGPTSVSS

SEQ ID NO: 47378 - protein, 411 aa, Homo sapiens
MFSVFEEITRIVVKEMDAGGDMIAVRSLVDADRFRCFHLVGEKRTFFGCRHYTTGLTLMDILDTDGDKWLDELDSGLQGQKAEFQILDNVDSTGELIVRLPKEITISGSFQGFHHQKIKISENRISQQYLATLENRKLKRELPFSFRSINTRENLYLVTETLETVKEETLKSDRQYKFWSQISQGHLSYKHKGQREVTIPPNRVLSYRVKQLVFPNKETMSAGLDIHFRGKTKSFPEGKSLGSEDSRNMKEKLEDMESVLKDLTEEKRKDVLNSLAKCLGKEDIRQDLEQRVSEVLISGELHMEDPDKPLLSSLFNAAGVLVEARAKAILDFLDALLELSEEQQFVAEALEKGTLPLLKDQVKSVMEQNWDELASSPPDMDYDPEARILCALYVVVSILLELAEGPTSVSS

SEQ ID NO: 47379 - protein, 394 aa, Homo sapiens
MFSVFEEITRIVVKEMDAGGDMIAVRSLVDADRFRCFHLVGEKRTFFGCRHYTTGLTLMDILDTDGDKWLDELDSGLQGQKAEFQILDNVDSTGELIVRLPKEITISGSFQGFHHQKIKISENRISQQYLATLENRKLKRELPFSFRSINTRENLYLVTETLETVKEETLKSDRQYKFWSQISQGHLSYKHKGQREVTIPPNRVLSYRVKQLVFPNKETMRKSLGSEDSRNMKEKLEDMESVLKDLTEEKRKDVLNSLAKCLGKEDIRQDLEQRVSEVLISGELHMEDPDKPLLSSLFNAAGVLVEARAKAILDFLDALLELSEEQQFVAEALEKGTLPLLKDQVKSVMEQNWDELASSPPDMDYDPEARILCALYVVVSILLELAEGPTSVSS

SEQ ID NO: 47380 - protein, 411 aa, Homo sapiens; identical to SEQ ID NO: 47378

SEQ ID NO: 47381 - protein, 416 aa, Homo sapiens
MFSVFEEITRIVVKEMDAGGDMIAVRSLVDADRFRCFHLVGEKRTFFGCRHYTTGLTLMDILDTDGDKWLDELDSGLQGQKAEFQILDNVDSTGELIVRLPKEITISGSFQGFHHQKIKISENRISQQYLATLENRKLKRELPFSFRSINTRENLYLVTETLETVKEETLKSDRQYKFWSQISQGHLSYKHKGQREVTIPPNRVLSYRVKQLVFPNKETMNIHFRGKTKSFPEEKDGASSCLGKSLGSEDSRNMKEKLEDMESVLKDLTEEKRKDVLNSLAKCLGKEDIRQDLEQRVSEVLISGELHMEDPDKPLLSSLFNAAGVLVEARAKAILDFLDALLELSEEQQFVAEALEKGTLPLLKDQVKSVMEQNWDELASSPPDMDYDPEARILCALYVVVSILLELAEGPTSVSS

SEQ ID NO: 47382 - protein, 348 aa, Homo sapiens
  VARIANT 1: note = MOD_RES - Any amino acid
XLDELDSGLQGQKAEFQILDNVDSTGELIVRLPKEITISGSFQGFHHQKIKISENRISQQYLATLENRKLKRELPFSFRSINTRENLYLVTETLETVKEETLKSDRQYKFWSQISQGHLSYKHKGQREVTIPPNRVLSYRVKQLVFPNKETMNIHFRGKTKSFPEEKDGASSCLGKSLGSEDSRNMKEKLEDMESVLKDLTEEKRKDVLNSLAKCLGKEDIRQDLEQRVSEVLISGELHMEDPDKPLLSSLFNAAGVLVEARAKAILDFLDALLELSEEQQFVAEALEKGTLPLLKDQVKSVMEQNWDELASSPPDMDYDPEARILCALYVVVSILLELAEGPTSVSS

SEQ ID NO: 47383 - protein, 407 aa, Homo sapiens
MFSVFEEITRIVVKEMDAGGDMIAVRSLVDADRFRCFHLVGEKRTFFGCRHYTTGLTLMDILDTDGDKWLDELDSGLQGQKAEFQILDNVDSTGELIVRLPKEITISGSFQGFHHQKIKISENRISQQYLATLENRKLKRELPFSFRSINTRENLYLVTETLETVKEETLKSDRQYKFWSQISQGHLSYKHKGQREVTIPPNRVLSYRVKQLVFPNKETMNIHFRGKTKSFPEGKSLGSEDSRNMKEKLEDMESVLKDLTEEKRKDVLNSLAKCLGKEDIRQDLEQRVSEVLISGELHMEDPDKPLLSSLFNAAGVLVEARAKAILDFLDALLELSEEQQFVAEALEKGTLPLLKDQVKSVMEQNWDELASSPPDMDYDPEARILCALYVVVSILLELAEGPTSVSS

SEQ ID NO: 47384 - protein, 508 aa, Homo sapiens
MPSMLERISKNLVKEIGSKDLTPVKYLLSATKLRQFVILRKKKDSRSSFWEQSDYVPVEFSLNDILEPSSSVLETVVTGPFHFSDIMIQKHKADMGVNVGIEVSVSGEASVDHGCSLEFQIVTIPSPNLEDFQKRKLLDPEPSFLKECRRRGDNLYVVTEAVELINNTVLYDSSSVNILGKIALWITYGKGQGQGESLRVKKKALTLQKGMVMAYKRKQLVIKEKAILISDDDEQRTFQDEYEISEMVGYCAARSEGLLPSFHTISPTLFNASSNDMKLKPELFLTQQFLSGHLPKYEQVHILPVGRIEEPFWQNFKHLQEEVFQKIKTLAQLSKDVQDVMFYSILAMLRDRGALQDLMNMLELDSSGHLDGPGGAILKKLQQDSNHAWFNPKDPILYLLEAIMVLSDFQHDLLACSMEKRILLQQQELVRSILEPNFRYPWSIPFTLKPELLAPLQSEGLAITYGLLEECGLRMELDNPRSTWDVEAKMPLSALYGTLSLLQQLAEA

SEQ ID NO: 47385 - protein, 153 aa, Homo sapiens
MVATKTFALLLLSLFLAVGLGEKKEGHFSALPSLPVGSHAKVSSPQPRGPRYAEGTFISDYSIAMDKIHQQDFVNWLLAQKGKKNDWKHNITQREARALELASQANRKEEEAVEPQSSPAKNPSDEDLLRDLLIQELLACLLDQTNLCRLRSR

SEQ ID NO: 47386 - protein, 466 aa, Homo sapiens
MTTSPILQLLLRLSLCGLLLQRAETGSKGQTAGELYQRWERYRRECQETLAAAEPPSGLACNGSFDMYVCWDYAAPNATARASCPWYLPWHHHVAAGFVLRQCGSDGQWGLWRDHTQCENPEKNEAFLDQRLILERLQVMYTVGYSLSLATLLLALLILSLFRRLHCTRNYIHINLFTSFMLRAAAILSRDRLLPRPGPYLGDQALALWNQALAACRTAQIVTQYCVGANYTWLLVEGVYLHSLLVLVGGSEEGHFRYYLLLGWGAPALFVIPWVIVRYLYENTQCWERNEVKAIWWIIRTPILMTILINFLIFIRILGILLSKLRTRQMRCRDYRLRLARSTLTLVPLLGVHEVVFAPVTEEQARGALRFAKLGFEIFLSSFQGFLVSVLYCFINKEVQSEIRRGWHHCRLRRSLGEEQRQLPERAFRALPSGSGPGEVPTSRGLSSGTLPGPGNEASRELESYC

SEQ ID NO: 47387 - protein, 430 aa, Homo sapiens
MTTSPILQLLLRLSLCGLLLQRAETGSKGQTAGELYQRWERYRRECQETLAAAEPPSVAAGFVLRQCGSDGQWGLWRDHTQCENPEKNEAFLDQRLILERLQVMYTVGYSLSLATLLLALLILSLFRRLHCTRNYIHINLFTSFMLRAAAILSRDRLLPRPGPYLGDQALALWNQALAACRTAQIVTQYCVGANYTWLLVEGVYLHSLLVLVGGSEEGHFRYYLLLGWGAPALFVIPWVIVRYLYENTQCWERNEVKAIWWIIRTPILMTILINFLIFIRILGILLSKLRTRQMRCRDYRLRLARSTLTLVPLLGVHEVVFAPVTEEQARGALRFAKLGFEIFLSSFQGFLVSVLYCFINKEVQSEIRRGWHHCRLRRSLGEEQRQLPERAFRALPSGSGPGEVPTSRGLSSGTLPGPGNEASRELESYC

SEQ ID NO: 47388 - protein, 466 aa, Homo sapiens; identical to SEQ ID NO: 47386

SEQ ID NO: 47389 - protein, 417 aa, Homo sapiens
MAWFALYLLSLLWATAGTSTQTQSSCSVPSAQEPLVNGIQVLMENSVTSSAYPNPSILIAMNLAGAYNLKAQKLLTYQLMSSDNNDLTIGQLGLTIMALTSSCRDPGDKVSILQRQMENWAPSSPNAEASAFYGPSLAILALCQKNSEATLPIAVRFAKTLLANSSPFNVDTGAMATLALTCMYNKIPVGSEEGYRSLFGQVLKDIVEKISMKIKDNGIIGDIYSTGLAMQALSVTPEPSKKEWNCKKTTDMILNEIKQGKFHNPMSIAQILPSLKGKTYLDVPQVTCSPDHEVQPTLPSNPGPGPTSASNITVIYTINNQLRGVELLFNETINVSVKSGSVLLVVLEEAQRKNPMFKFETTMTSWGLVVSSINNIAENVNHKTYWQFLSGVTPLNEGVADYIPFNHEHITANFTQY

SEQ ID NO: 47390 - protein, 392 aa, Homo sapiens
MAVPSAQEPLVNGIQVLMENSVTSSAYPNPSILIAMNLAGAYNLKAQKLLTYQLMSSDNNDLTIGQLGLTIMALTSSCRDPGDKVSILQRQMENWAPSSPNAEASAFYGPSLAILALCQKNSEATLPIAVRFAKTLLANSSPFNVDTGAMATLALTCMYNKIPVGSEEGYRSLFGQVLKDIVEKISMKIKDNGIIGDIYSTGLAMQALSVTPEPSKKEWNCKKTTDMILNEIKQGKFHNPMSIAQILPSLKGKTYLDVPQVTCSPDHEVQPTLPSNPGPGPTSASNITVIYTINNQLRGVELLFNETINVSVKSGSVLLVVLEEAQRKNPMFKFETTMTSWGLVVSSINNIAENVNHKTYWQFLSGVTPLNEGVADYIPFNHEHITANFTQY

SEQ ID NO: 47391 - protein, 101 aa, Homo sapiens
MQRLCVYVLIFALALAAFSEASWKPRSQQPDAPLGTGANRDLELPWLEQQGPASHHRRQLGPQGPPHLVADPSKKQGPWLEEEEEAYGWMDFGRRSAEDEN

SEQ ID NO: 47392 - protein, 148 aa, Homo sapiens
MRGRELPLVLLALVLCLAPRGRAVPLPAGGGTVLTKMYPRGNHWAVGHLMGKKSTGESSSVSERGSLKQQLREYIRWEEAARNLLGLIEAKENRNHQPPQPKALGNQQPSWDSEDSSNFKDVGSKGKVGRLSAPGSQREGRNPQLNQQ

SEQ ID NO: 47393 - protein, 141 aa, Homo sapiens
MRGRELPLVLLALVLCLAPRGRAVPLPAGGGTVLTKMYPRGNHWAVGHLMGKKSTGESSSVSERGSLKQQLREYIRWEEAARNLLGLIEAKENRNHQPPQPKALGNQQPSWDSEDSSNFKDVGSKGKGSQREGRNPQLNQQ

SEQ ID NO: 47394 - protein, 138 aa, Homo sapiens
MRGRELPLVLLALVLCLAPRGRAVPLPAGGGTVLTKMYPRGNHWAVGHLMGKKSTGESSSVSERGSLKQQLREYIRWEEAARNLLGLIEAKENRNHQPPQPKALGNQQPSWDSEDSSNFKDLVDSLLQVLNVKEGTPS

SEQ ID NO: 47395 - protein, 384 aa, Homo sapiens
MALNDCFLLNLEVDHFMHCNISSHSADLPVNDDWSHPGILYVIPAVYGVIILIGLIGNITLIKIFCTVKSMRNVPNLFISSLALGDLLLLITCAPVDASRYLADRWLFGRIGCKLIPFIQLTSVGVSVFTLTALSADRYKAIVRPMDIQASHALMKICLKAAFIWIISMLLAIPEAVFSDLHPFHEESTNQTFISCAPYPHSNELHPKIHSMASFLVFYVIPLSIISVYYYFIAKNLIQSAYNLPVEGNIHVKKQIESRKRLAKTVLVFVGLFAFCWLPNHVIYLYRSYHYSEVDTSMLHFVTSICARLLAFTNSCVNPFALYLLSKSFRKQFNTQLLCCQPGLIIRSHSTGRSTTCMTSLKSTNPSVATFSLINGNICHERYV

SEQ ID NO: 47396 - protein, 159 aa, Homo sapiens
MASFLVFYVIPLSIISVYYYFIAKNLIQSAYNLPVEGNIHVKKQIESRKRLAKTVLVFVGLFAFCWLPNHVIYLYRSYHYSEVDTSMLHFVTSICARLLAFTNSCVNPFALYLLSEFQETVQHSAALLPAWPDHPVSQHWKEYNLHDLPQEYQPLRGHL

SEQ ID NO: 47397 - protein, 199 aa, Homo sapiens
MLAYSSVHCFREDKMKFTIVFAGLLGVFLAPALANYNINVNDDNNNAGSGQQSVSVNNEHNVANVDNNNGWDSWNSIWDYGNGFAATRLFQKKTCIVHKMNKEVMPSIQSLDALVKEKKLQGKGPGGPPPKGLMYSVNPNKVDDLSKFGKNIANMCRGIPTYMAEEMQEASLFFYSGTCYTTSVLWIVDISFCGDTVEN

SEQ ID NO: 47398 - protein, 363 aa, Homo sapiens
MQRAGGGSAPGGNGGGGGGGPGTAFSIDSLIGPPPPRSGHLLYTGYPMFMPYRPLVLPQALAPAPLPAGLPPLAPLASFAGRLTNTFCAGLGQAVPSMVALTTALPSFAEPPDAFYGPQELAAAAAAAAATAARNNPEPGGRRPEGGLEADELLPAREKVAEPPPPPPPHFSETFPSLPAEGKVYSSDEEKLEASAGDPAGSEQEEEGSGGDSEDDGFLDSSAGGPGALLGPKPKLKGSLGTGAEEGAPVTAGVTAPGGKSRRRRTAFTSEQLLELEKEFHCKKYLSLTERSQIAHALKLSEVQVKIWFQNRRAKWKRIKAGNVSSRSGEPVRNPKIVVPIPVHVNRFAVRSQHQQMEQGARP

SEQ ID NO: 47399 - protein, 348 aa, Homo sapiens
MSAAFPPSLMMMQRPLGSSTAFSIDSLIGSPPQPSPGHFVYTGYPMFMPYRPVVLPPPPPPPPALPQAALQPALPPAHPHHQIPSLPTGFCSSLAQGMALTSTLMATLPGGFSASPQHQEAAAARKFAPQPLPGGGNFDKAEALQADAEDGKGFLAKEGSLLAFSAAETVQASLVGAVRGQGKDESKVEDDPKGKEESFSLESDVDYSSDDNLTGQAAHKEEDPGHALEETPPSSGAAGSTTSTGKNRRRRTAFTSEQLLELEKEFHCKKYLSLTERSQIAHALKLSEVQVKIWFQNRRAKWKRVKAGNANSKTGEPSRNPKIVVPIPVHVSRFAIRSQHQQLEQARP

SEQ ID NO: 47400 - protein, 480 aa, Homo sapiens
MEVAPEQPRWMAHPAVLNAQHPDSHHPGLAHNYMEPAQLLPPDEVDVFFNHLDSQGNPYYANPAHARARVSYSPAHARLTGGQMCRPHLLHSPGLPWLDGGKAALSAAAAHHHNPWTVSPFSKTPLHPSAAGGPGGPLSVYPGAGGGSGGGSGSSVASLTPTAAHSGSHLFGFPPTPPKEVSPDPSTTGAASPASSSAGGSAARGEDKDGVKYQVSLTESMKMESGSPLRPGLATMGTQPATHHPIPTYPSYVPAAAHDYSSGLFHPGGFLGGPASSFTPKQRSKARSCSEGRECVNCGATATPLWRRDGTGHYLCNACGLYHKMNGQNRPLIKPKRRLSAARRAGTCCANCQTTTTTLWRRNANGDPVCNACGLYYKLHNVNRPLTMKKEGIQTRNRKMSNKSKKSKKGAECFEELSKCMQEKSSPFSAAALAGHMAPVGHLPPFSHSGHILPTPTPIHPSSSLSFGHPHPSSMVTAMG

SEQ ID NO: 47401 - protein, 466 aa, Homo sapiens
MEVAPEQPRWMAHPAVLNAQHPDSHHPGLAHNYMEPAQLLPPDEVDVFFNHLDSQGNPYYANPAHARARVSYSPAHARLTGGQMCRPHLLHSPGLPWLDGGKAALSAAAAHHHNPWTVSPFSKTPLHPSAAGGPGGPLSVYPGAGGGSGGGSGSSVASLTPTAAHSGSHLFGFPPTPPKEVSPDPSTTGAASPASSSAGGSAARGEDKDGVKYQVSLTESMKMESGSPLRPGLATMGTQPATHHPIPTYPSYVPAAAHDYSSGLFHPGGFLGGPASSFTPKQRSKARSCSEGRECVNCGATATPLWRRDGTGHYLCNACGLYHKMNGQNRPLIKPKRRLTTTTTLWRRNANGDPVCNACGLYYKLHNVNRPLTMKKEGIQTRNRKMSNKSKKSKKGAECFEELSKCMQEKSSPFSAAALAGHMAPVGHLPPFSHSGHILPTPTPIHPSSSLSFGHPHPSSMVTAMG

SEQ ID NO: 47402 - protein, 480 aa, Homo sapiens; identical to SEQ ID NO: 47400

SEQ ID NO: 47403 - protein, 150 aa, Homo sapiens
MEVAPEQPRWMAHPAVLNAQHPDSHHPGLAHNYMEPAQLLPPDEVDVFFNHLDSQGNPYYANPAHARARVSYSPAHARLTGGQMCRPHLLHSPGLPWLDGGKAALSAAAAHHHNPWTVSPFSKTPLHPSAAGGPGGPLSVYPGAGGGSGG

SEQ ID NO: 47404 - protein, 8 aa, Homo sapiens
MEVAPEQP

SEQ ID NO: 47405 - protein, 441 aa, Homo sapiens
MYQSLPWPPTTGRPPVPTRRAAPAPSCTARAPRPRQSTCPHRGALLRAGPVLPPGRRRGLCVRRASGGSSGGAASGAGPGTQQGSPGWSQAGADGAAYTPPPVSPRFSFPGTTGSLAAAAAAAAAREAAAYSSGGGAAGAGLAGREQYGRAGFAGSYSSPYPAYMADVGASWAAAAAASAGPFDSPVLHSLPGRANPAARHPNLDMFDDFSEGRECVNCGAMSTPLWRRDGTGHYLCNACGLYHKMNGINRPLIKPQRRLSASRRVGLSCANCQTTTTTLWRRNAEGEPVCNACGLYMKLHGVPRPLAMRKEGIQTRKRKPKNLNKSKTPAAPSGSESLPPASGASSNSSNATTSSSEEMRPIKTEPGLSSHYGHSSSVSQTFSVSAMSGHGPSIHPVLSALKLSPQGYASPVSQSPQTSSKQDSWNSLVLADSHGDIITA

SEQ ID NO: 47406 - protein, 442 aa, Homo sapiens
MYQSLAMAANHGPPPGAYEAGGPGAFMHGAGAASSPVYVPTPRVPSSVLGLSYLQGGGAGSASGGASGGSSGGAASGAGPGTQQGSPGWSQAGADGAAYTPPPVSPRFSFPGTTGSLAAAAAAAAAREAAAYSSGGGAAGAGLAGREQYGRAGFAGSYSSPYPAYMADVGASWAAAAAASAGPFDSPVLHSLPGRANPAARHPNLDMFDDFSEGRECVNCGAMSTPLWRRDGTGHYLCNACGLYHKMNGINRPLIKPQRRLSASRRVGLSCANCQTTTTTLWRRNAEGEPVCNACGLYMKLHGVPRPLAMRKEGIQTRKRKPKNLNKSKTPAAPSGSESLPPASGASSNSSNATTSSSEEMRPIKTEPGLSSHYGHSSSVSQTFSVSAMSGHGPSIHPVLSALKLSPQGYASPVSQSPQTSSKQDSWNSLVLADSHGDIITA

SEQ ID NO: 47407 - protein, 175 aa, Homo sapiens
MFDDFSEGRECVNCGAMSTPLWRRDGTGHYLCNACGLYHKMNGINRPLIKPQRRLSASRRVGLSCANCQTTTTTLWRRNAEGEPVCNACGLYMKLHGVPRPLAMRKEGIQTRKRKPKNLNKSKTPAAPSGSESLPPASGASSNSSNATTSSSEEMRPIKTEPGLSSHYGHSSSVS

SEQ ID NO: 47408 - protein, 117 aa, Homo sapiens
MYQSLAMAANHGPPPGAYEAGGPGAFMHGAGAASSPVYVPTPRVPSSVLGLSYLQGGGAGSASGGASGGSSGGAASGAGPGTQQGSPGWSQAGADGAAYTPPPVSPRFSFPGTTGSL

SEQ ID NO: 47409 - protein, 236 aa, Homo sapiens
MFDDFSEGRECVNCGAMSTPLWRRDGTGHYLCNACGLYHKMNGINRPLIKPQRRLSASRRVGLSCANCQTTTTTLWRRNAEGEPVCNACGLYMKLHGVPRPLAMRKEGIQTRKRKPKNLNKSKTPAAPSGSESLPPASGASSNSSNATTSSSEEMRPIKTEPGLSSHYGHSSSVSQTFSVSAMSGHGPSIHPVLSALKLSPQGYASPVSQSPQTSSKQDSWNSLVLADSHGDIITA

SEQ ID NO: 47410 - protein, 443 aa, Homo sapiens
MYQSLAMAANHGPPPGAYEAGGPGAFMHGAGAASSPVYVPTPRVPSSVLGLSYLQGGGAGSASGGASGGSSGGAASGAGPGTQQGSPGWSQAGADGAAYTPPPVSPRFSFPGTTGSLAAAAAAAAAREAAAYSSGGGAAGAGLAGREQYGRAGFAGSYSSPYPAYMADVGASWAAAAAASAGPFDSPVLHSLPGRANPAARHPNLVDMFDDFSEGRECVNCGAMSTPLWRRDGTGHYLCNACGLYHKMNGINRPLIKPQRRLSASRRVGLSCANCQTTTTTLWRRNAEGEPVCNACGLYMKLHGVPRPLAMRKEGIQTRKRKPKNLNKSKTPAAPSGSESLPPASGASSNSSNATTSSSEEMRPIKTEPGLSSHYGHSSSVSQTFSVSAMSGHGPSIHPVLSALKLSPQGYASPVSQSPQTSSKQDSWNSLVLADSHGDIITA

SEQ ID NO: 47411 - protein, 397 aa, Homo sapiens
MYQSLALAASPRQAAYADSGSFLHAPGAGSPMFVPPARVPSMLSYLSGCEPSPQPPELAARPGWAQTATADSSAFGPGSPHPPAAHPPGATAFPFAHSPSGPGSGGSAGGRDGSAYQGALLPREQFAAPLGRPVGTSYSATYPAYVSPDVAQSWTAGPFDGSVLHGLPGRRPTFVSDFLEEFPGEGRECVNCGALSTPLWRRDGTGHYLCNACGLYHKMNGVNRPLVRPQKRLSSSRRAGLCCTNCHTTNTTLWRRNSEGEPVCNACGLYMKLHGVPRPLAMKKESIQTRKRKPKTIAKARGSSGSTRNASASPSAVASTDSSAATSKAKPSLASPVCPGPSMAPQASGQEDDSLAPGHLEFKFEPEDFAFPSTAPSPQAGLRGALRQEAWCALALA

SEQ ID NO: 47412 - protein, 397 aa, Homo sapiens; identical to SEQ ID NO: 47411

SEQ ID NO: 47413 - protein, 417 aa, Homo sapiens
TATAVPCRPPCPLVKTTPGRMYQSLALAASPRQAAYADSGSFLHAPGAGSPMFVPPARVPSMLSYLSGCEPSPQPPELAARPGWAQTATADSSAFGPGSPHPPAAHPPGATAFPFAHSPSGPGSGGSAGGRDGSAYQGALLPREQFAAPLGRPVGTSYSATYPAYVSPDVAQSWTAGPFDGSVLHGLPGRRPTFVSDFLEEFPGEGRECVNCGALSTPLWRRDGTGHYLCNACGLYHKMNGVNRPLVRPQKRLSSSRRAGLCCTNCHTTNTTLWRRNSEGEPVCNACGLYMKLHGVPRPLAMKKESIQTRKRKPKTIAKARGSSGSTRNASASPSAVASTDSSAATSKAKPSLASPVCPGPSMAPQASGQEDDSLAPGHLEFKFEPEDFAFPSTAPSPQAGLRGALRQEAWCALALA

SEQ ID NO: 47414 - protein, 595 aa, Homo sapiens
MALTDGGWCLPKRFGAAGADASDSRAFPAREPSTPPSPISSSSSSCSRGGERGPGGASNCGTPQLDTEAAAGPPARSLLLSSYASHPFGAPHGPSAPGVAGPGGNLSSWEDLLLFTDLDQAATASKLLWSSRGAKLSPFAPEQPEEMYQTLAALSSQGPAAYDGAPGGFVHSAAAAAAAAAAASSPVYVPTTRVGSMLPGLPYHLQGSGSGPANHAGGAGAHPGWPQASADSPPYGSGGGAAGGGAAGPGGAGSAAAHVSARFPYSPSPPMANGAAREPGGYAAAGSGGAGGVSGGGSSLAAMGGREPQYSSLSAARPLNGTYHHHHHHHHHHPSPYSPYVGAPLTPAWPAGPFETPVLHSLQSRAGAPLPVPRGPSADLLEDLSESRECVNCGSIQTPLWRRDGTGHYLCNACGLYSKMNGLSRPLIKPQKRVPSSRRLGLSCANCHTTTTTLWRRNAEGEPVCNACGLYMKLHGVPRPLAMKKEGIQTRKRKPKNINKSKTCSGNSNNSIPMTPTSTSSNSDDCSKNTSPTTQPTASGAGAPVMTGAGESTNPENSELKYSGQDGLYIGVSLASPAEVTSSVRPDSWCALALA

SEQ ID NO: 47415 - protein, 2671 aa, Homo sapiens
MAADTQVSETLKRFAGKVTTASVKERREILSELGKCVAGKDLPEGAVKGLCKLFCLTLHRYRDAASRRALQAAIQQLAEAQPEATAKNLLHSLQSSGIGSKAGVPSKSSGSAALLALTWTCLLVRIVFPSRAKRQGDIWNKLVEVQCLLLLEVLGGSHKHAVDGAVKKLTKLWKENPGLVEQYLSAILSLEPNQNYAGMLGLLVQFCTSHKEMDVVSQHKSALLDFYMKNILMSKVKPPKYLLDSCAPLLRYLSHSEFKDLILPTIQKSLLRSPENVIETISSLLASVTLDLSQYAMDIVKGLAGHLKSNSPRLMDEAVLALRNLARQCSDSSAMESLTKHLFAILGGSEGKLTVVAQKMSVLSGIGSVSHHVVSGPSSQVLNGIVAELFIPFLQQEVHEGTLVHAVSVLALWCNRFTMEVPKKLTEWFKKAFSLKTSTSAVRHAYLQCMLASYRGDTLLQALDLLPLLIQTVEKAASQSTQVPTITEGVAAALLLLKLSVADSQAEAKLSSFWQLIVDEKKQVFTSEKFLVMASEDALCTVLHLTERLFLDHPHRLTGNKVQQYHRALVAVLLSRTWHVRRQAQQTVRKLLSSLGGFKLAHGLLEELKTVLSSHKVLPLEALVTDAGEVTEAGKAYVPPRVLQEALCVISGVPGLKGDVTDTEQLAQEMLIISHHPSLVAVQSGLWPALLARMKIDPEAFITRHLDQIIPRMTTQSPLNQSSMNAMGSLSVLSPDRVLPQLISTITASVQNPALRLVTREEFAIMQTPAGELYDKSIIQSAQQDSIKKANMKRENKAYSFKEQIIELELKEEIKKKKGIKEEVQLTSKQKEMLQAQLDREAQVRRRLQELDGELEAALGLLDIILAKNPSGLTQYIPVLVDSFLPLLKSPLAAPRIKNPFLSLAACVMPSRLKALGTLVSHVTLRLLKPECVLDKSWCQEELSVAVKRAVMLLHTHTITSRVGKGEPGAAPLSAPAFSLVFPFLKMVLTEMPHHSEEEEEWMAQILQILTVQAQLRASPNTPPGRVDENGPELLPRVAMLRLLTWVIGTGSPRLQVLASDTLTTLCASSSGDDGCAFAEQEEVDVLLCALQSPCASVRETVLRGLMELHMVLPAPDTDEKNGLNLLRRLWVVKFDKEEEIRKLAERLWSMMGLDLQPDLCSLLIDDVIYHEAAVRQAGAEALSQAVARYQRQAAEVMGRLMEIYQEKLYRPPPVLDALGRVISESPPDQWEARCGLALALNKLSQYLDSSQVKPLFQFFVPDALNDRHPDVRKCMLDAALATLNTHGKENVNSLLPVFEEFLKNAPNDASYDAVRQSVVVLMGSLAKHLDKSDPKVKPIVAKLIAALSTPSQQVQESVASCLPPLVPAIKEDAGGMIQRLMQQLLESDKYAERKGAAYGLAGLVKGLGILSLKQQEMMAALTDAIQDKKNFRRREGALFAFEMLCTMLGKLFEPYVVHVLPHLLLCFGDGNQYVREAADDCAKAVMSNLSAHGVKLVLPSLLAALEEESWRTKAGSVELLGAMAYCAPKQLSSCLPNIVPKLTEVLTDSHVKVQKAGQQALRQIGSVIRNPEILAIAPVLLDALTDPSRKTQKCLQTLLDTKFVHFIDAPSLALIMPIVQRAFQDRSTDTRKMAAQIIGNMYSLTDQKDLAPYLPSVTPGLKASLLDPVPEVRTVSAKALGAMVKGMGESCFEDLLPWLMETLTYEQSSVDRSGAAQGLAEVMAGLGVEKLEKLMPEIVATASKVDIAPHVRDGYIMMFNYLPITFGDKFTPYVGPIIPCILKALADENEFVRDTALRAGQRVISMYAETAIALLLPQLEQGLFDDLWRIRFSSVQLLGDLLFHISGVTGKMTTETASEDDNFGTAQSNKAIITALGVERRNRVLAGLYMGRSDTQLVVRQASLHVWKIVVSNTPRTLREILPTLFGLLLGFLASTCADKRTIAARTLGDLVRKLGEKILPEIIPILEEGLRSQKSDERQGVCIGLSEIMKSTSRDAVLYFSESLVPTARKALCDPLEEVREAAAKTFEQLHSTIGHQALEDILPFLLKQLDDEEVSEFALDGLKQVMAIKSRVVLPYLVPKLTTPPVNTRVLAFLSSVAGDALTRHLGVILPAVMLALKEKLGTPDEQLEMANCQAVILSVEDDTGHRIIIEYLLEATRSPEVGMRQAAAIILNIYCSRSKADYTSHLRSLVSGLIRLFNDSSPVVLEESWDALNAITKKLDAGNQLALIEELHKEIRLIGNESKGEHVPGFCLPKKGVTSILPVLREGVLTGSPEQKEEAAKALGLVIRLTSADALRPSVVSITGPLIRILGDRFSWNVKAALLETLSLLLAKVGIALKPFLPQLQTTFTKALQDSNRGVRLKAADALGKLISIHIKVDPLFTELLNGIRAMEDPGVRDTMLQALRFVIQGAGAKVDAVIRKNIVSLLLSMLGHDEDNTRISSAGCLGELCAFLTEEELSAVLQQCLLADVSGIDWMVRHGRSLALSVAVNVAPGRLCAGRYSSDVQEMILSSATADRIPIAVSGVRGMGFLMRHHIETGGGQLPAKLSSLFVKCLQNPSSDIRLVAEKMIWWANKDPLPPLDPQAIKPILKALLDNTKDKNTVVRAYSDQAIVNLLKMRQGEEVFQSLSKILDVASLEVLNEVNRRSLKKLASQADSTEQVDDTILT

SEQ ID NO: 47416 - protein, 480 aa, Homo sapiens
MAQHDFAPAWLNFPTPPSSTKVLTSSLKSSLNFEKHSENFAWTENRYDVNRRRHNSSDGFDSAIGRPNGGNFGRKEKNGWRTHGRNGTENINHRGGYHGGSSRSRSSIFHAGKSQGLHENNIPDNETGRKEDKRERKQFEAEDFPSLNPEYEREPNHNKSLAAGVWEYPPNPKSRAPRMLVIKKGNTKDLQLSGFPVVGNLPSQPVKNGTGPSVYKGLVPKPAAPPTKPTQWKSQTKENKVGTSFPHESTFGVGNFNAFKSTAKNFSPSTNSVKECNRSNSSSPVDKLNQQPRLTKLTRMRTDKKSEFLKALKRDRVEEEHEDESRAGSEKDDDSFNLHNSNSTHQERDINRNFDENEIPQENGNASVISQQIIRSSTFPQTDVLSSSLEAEHRLLKEMGWQEDSENDETCAPLTEDEMREFQVISEQLQKNGLRKNGILKNGLICDFKFGPWKNSTFKPTTENDDTETSSSDTSDDDDV

SEQ ID NO: 47417 - protein, 493 aa, Homo sapiens
MAQHDFAPAWLNFPTPPSSTKSSLNFEKHSENFAWTENRYDVNRRRHNSSDGFDSAIGRPNGGNFGRKEKNGWRTHGRNGTENINHRGGYHGGSSRSRSSIFHAGKSQGLHENNIPDNETGRKEDKRERKQFEAEDFPSLNPEYEREPNHNKSLAAGVWGLHAQTHTYPTKKISQAPLLEYPPNPKSRAPRMLVIKKGNTKDLQLSGFPVVGNLPSQPVKNGTGPSVYKGLVPKPAAPPTKPTQWKSQTKENKVGTSFPHESTFGVGNFNAFKSTAKNFSPSTNSVKECNRSNSSSPVDKLNQQPRLTKLTRMRTDKKSEFLKALKRDRVEEEHEDESRAGSEKDDDSFNLHNSNSTHQERDINRNFDENEIPQENGNASVISQQIIRSSTFPQTDVLSSSLEAEHRLLKEMGWQEDSENDETCAPLTEDEMREFQVISEQLQKNGLRKNGILKNGLICDFKFGPWKNSTFKPTTENDDTETSSSDTSDDDDV

SEQ ID NO: 47418 - protein, 493 aa, Homo sapiens; identical to SEQ ID NO: 47417

SEQ ID NO: 47419 - protein, 473 aa, Homo sapiens
MAQHDFAPAWLNFPTPPSSTKSSLNFEKHSENFAWTENRYDVNRRRHNSSDGFDSAIGRPNGGNFGRKEKNGWRTHGRNGTENINHRGGYHGGSSRSRSSIFHAGKSQGLHENNIPDNETGRKEDKRERKQFEAEDFPSLNPEYEREPNHNKSLAAGVWEYPPNPKSRAPRMLVIKKGNTKDLQLSGFPVVGNLPSQPVKNGTGPSVYKGLVPKPAAPPTKPTQWKSQTKENKVGTSFPHESTFGVGNFNAFKSTAKNFSPSTNSVKECNRSNSSSPVDKLNQQPRLTKLTRMRTDKKSEFLKALKRDRVEEEHEDESRAGSEKDDDSFNLHNSNSTHQERDINRNFDENEIPQENGNASVISQQIIRSSTFPQTDVLSSSLEAEHRLLKEMGWQEDSENDETCAPLTEDEMREFQVISEQLQKNGLRKNGILKNGLICDFKFGPWKNSTFKPTTENDDTETSSSDTSDDDDV

SEQ ID NO: 47420 - protein, 465 aa, Homo sapiens
MAQHDFAPAWLNFPTPPSSTKVLTSSLKSSLNFEKHSENFAWTENRYDVNRRRHNSSDGFDSAIGRPNGGNFGRKEKNGWRTHGRNGTENINHRGGYHGGSSRSRSSIFHAGKSQGLHENNIPDNETGRKEDKRERKQFEAEDFPSLNPEYEREPNHNKSLAAGVWEYPPNPKSRAPRMLVIKKGNTKDLQLSGFPVVGNLPSQPVKNGTGPSVYKGLVPKPAAPPTKPTQWKSQTKENKVGTSFPHESTFGVGNFNAFKSTAKNFSPSTNSVKEQPRLTKLTRMRTDKKSEFLKALKRDRVEEEHEDESRAGSEKDDDSFNLHNSNSTHQERDINRNFDENEIPQENGNASVISQQIIRSSTFPQTDVLSSSLEAEHRLLKEMGWQEDSENDETCAPLTEDEMREFQVISEQLQKNGLRKNGILKNGLICDFKFGPWKNSTFKPTTENDDTETSSSDTSDDDDV

SEQ ID NO: 47421 - protein, 302 aa, Homo sapiens
MLVIKKGNTKDLQLSGFPVVGNLPSQPVKNGTGPSVYKGLVPKPAAPPTKPTQWKSQTKENKVGTSFPHESTFGVGNFNAFKSTAKNFSPSTNSVKECNRSNSSSPVDKLNQQPRLTKLTRMRTDKKSEFLKALKRDRVEEEHEDESRAGSEKDDDSFNLHNSNSTHQERDINRNFDENEIPQENGNASVISQQIIRSSTFPQTDVLSSSLEAEHRLLKEMGWQEDSENDETCAPLTEDEMREFQVISEQLQKNGLRKNGILKNGLICDFKFGPWKNSTFKPTTENDDTETSSSDTSDDDDV

SEQ ID NO: 47422 - protein, 480 aa, Homo sapiens
MAQHDFAPAWLNFPTPPSSTKVLSNTLKSSLNFEKHSENFAWTENRYDVNRRRHNSSDGFDSAIGRPNGGNFGRKEKNGWRTHGRNGTENINHRGGYHGGSSRSRSSIFHAGKSQGLHENNIPDNETGRKEDKRERKQFEAEDFPSLNPEYEREPNHNKSLAAGVWEYPPNPKSRAPRMLVIKKGNTKDLQLSGFPVVGNLPSQPVKNGTGPSVYKGLVPKPAAPPTKPTQWKSQTKENKVGTSFPHESTFGVGNFNAFKSTAKNFSPSTNSVKECNRSNSSSPVDKLNQQPRLTKLTRMRTDKKSEFLKALKRDRVEEEHEDESRAGSEKDDDSFNLHNSNSTHQERDINRNFDENEIPQENGNASVISQQIIRSSTFPQTDVLSSSLEAEHRLLKEMGWQEDSENDETCAPLTEDEMREFQVISEQLQKNGLRKNGILKNGLICDFKFGPWKNSTFKPTTENDDTETSSSDTSDDDDV

SEQ ID NO: 47423 - protein, 460 aa, Homo sapiens
MFLATLYFALPLLDLLLSAEVSGGDRLDCVKASDQCLKEQSCSTKYRTLRQCVAGKETNFSLASGLEAKDECRSAMEALKQKSLYNCRCKRGMKKEKNCLRIYWSMYQSLQGNDLLEDSPYEPVNSRLSDIFRVVPFISVEHIPKGNNCLDAAKACNLDDICKKYRSAYITPCTTSVSNDVCNRRKCHKALRQFFDKVPAKHSYGMLFCSCRDIACTERRRQTIVPVCSYEEREKPNCLNLQDSCKTNYICRSRLADFFTNCQPESRSVSSCLKENYADCLLAYSGLIGTVMTPNYIDSSSLSVAPWCDCSNSGNDLEECLKFLNFFKDNTCLKNAIQAFGNGSDVTVWQPAFPVQTTTATTTTALRVKNKPLGPAGSENEIPTHVLPPCANLQAQKLKSNVSGNTHLCISNGNYEKEGLGASSHITTKSMAAPPSCGLSPLLVLVVTALSTLLSLTETS

SEQ ID NO: 47424 - protein, 460 aa, Homo sapiens; identical to SEQ ID NO: 47423

SEQ ID NO: 47425 - protein, 460 aa, Homo sapiens; identical to SEQ ID NO: 47423

SEQ ID NO: 47426 - protein, 465 aa, Homo sapiens
MFLATLYFALPLLDLLLSAEVSGGDRLDCVKASDQCLKEQSCSTKYRTLRQCVAGKETNFSLASGLEAKDECRSAMEALKQKSLYNCRCKRGMKKEKNCLRIYWSMYQSLQGNDLLEDSPYEPVNSRLSDIFRVVPFISDVFQQVEHIPKGNNCLDAAKACNLDDICKKYRSAYITPCTTSVSNDVCNRRKCHKALRQFFDKVPAKHSYGMLFCSCRDIACTERRRQTIVPVCSYEEREKPNCLNLQDSCKTNYICRSRLADFFTNCQPESRSVSSCLKENYADCLLAYSGLIGTVMTPNYIDSSSLSVAPWCDCSNSGNDLEECLKFLNFFKDNTCLKNAIQAFGNGSDVTVWQPAFPVQTTTATTTTALRVKNKPLGPAGSENEIPTHVLPPCANLQAQKLKSNVSGNTHLCISNGNYEKEGLGASSHITTKSMAAPPSCGLSPLLVLVVTALSTLLSLTETS

SEQ ID NO: 47427 - protein, 344 aa, Homo sapiens
MQEGKFWKGMAETGMWGCGEWIPVEHIPKGNNCLDAAKACNLDDICKKYRSAYITPCTTSVSNDVCNRRKCHKALRQFFDKVPAKHSYGMLFCSCRDIACTERRRQTIVPVCSYEEREKPNCLNLQDSCKTNYICRSRLADFFTNCQPESRSVSSCLKENYADCLLAYSGLIGTVMTPNYIDSSSLSVAPWCDCSNSGNDLEECLKFLNFFKDNTCLKNAIQAFGNGSDVTVWQPAFPVQTTTATTTTALRVKNKPLGPAGSENEIPTHVLPPCANLQAQKLKSNVSGNTHLCISNGNYEKEGLGASSHITTKSMAAPPSCGLSPLLVLVVTALSTLLSLTETS

SEQ ID NO: 47428 - protein, 359 aa, Homo sapiens
MILANVFCLFFFLGEEFYEASPYEPVTSRLSDIFRLASIFSGTGADPVVSAKSNHCLDAAKACNLNDNCKKLRSSYISICNREISPTERCNRRKCHKALRQFFDRVPSEYTYRMLFCSCQDQACAERRRQTILPSCSYEDKEKPNCLDLRGVCRTDHLCRSRLADFHANCRASYQTVTSCPADNYQACLGSYAGMIGFDMTPNYVDSSPTGIVVSPWCSCRGSGNMEEECEKFLRDFTENPCLRNAIQAFGNGTDVNVSPKGPSFQATQAPRVEKTPSLPDDLSDSTSLGTSVITTCTSVQEQGLKANNSKELSMCFTELTTNIIPGSNKVIKPNSGPSRARPSAALTVLSVLMLKLAL

SEQ ID NO: 47429 - protein, 464 aa, Homo sapiens
MILANVFCLFFFLDETLRSLASPSSLQGPELHGWRPPVDCVRANELCAAESNCSSRYRTLRQCLAGRDRNTMLANKECQAALEVLQESPLYDCRCKRGMKKELQCLQIYWSIHLGLTEGEEFYEASPYEPVTSRLSDIFRLASIFSGTGADPVVSAKSNHCLDAAKACNLNDNCKKLRSSYISICNREISPTERCNRRKCHKALRQFFDRVPSEYTYRMLFCSCQDQACAERRRQTILPSCSYEDKEKPNCLDLRGVCRTDHLCRSRLADFHANCRASYQTVTSCPADNYQACLGSYAGMIGFDMTPNYVDSSPTGIVVSPWCSCRGSGNMEEECEKFLRDFTENPCLRNAIQAFGNGTDVNVSPKGPSFQATQAPRVEKTPSLPDDLSDSTSLGTSVITTCTSVQEQGLKANNSKELSMCFTELTTNIIPGSNKVIKPNSGPSRARPSAALTVLSVLMLKLAL

SEQ ID NO: 47430 - protein, 331 aa, Homo sapiens
MILANVFCLFFFLGTGADPVVSAKSNHCLDAAKACNLNDNCKKLRSSYISICNREISPTERCNRRKCHKALRQFFDRVPSEYTYRMLFCSCQDQACAERRRQTILPSCSYEDKEKPNCLDLRGVCRTDHLCRSRLADFHANCRASYQTVTSCPADNYQACLGSYAGMIGFDMTPNYVDSSPTGIVVSPWCSCRGSGNMEEECEKFLRDFTENPCLRNAIQAFGNGTDVNVSPKGPSFQATQAPRVEKTPSLPDDLSDSTSLGTSVITTCTSVQEQGLKANNSKELSMCFTELTTNIIPGSNKVIKPNSGPSRARPSAALTVLSVLMLKLAL

SEQ ID NO: 47431 - protein, 265 aa, Homo sapiens
MILANVFCLFFFLDETLRSLASPSSLQGPELHGWRPPVDCVRANELCAAESNCSSRYRTLRQCLAGRDRNTMLANKECQAALEVLQESPLYDCRCKRGMKKELQCLQIYWSIHLGLTEGEEFYEASPYEPVTSRLSDIFRLASIFSGTGADPVVSAKSNHCLDAAKACNLNDNCKKLRSSYISICNREISPTERCNRRKCHKALRQFFDRVPSEYTYRMLFCSCQDQACAERRRQTILPSCSYEDKEKPNCLDLRGVCRTDHLCR

SEQ ID NO: 47432 - protein, 464 aa, Homo sapiens; identical to SEQ ID NO: 47429

SEQ ID NO: 47433 - protein, 400 aa, Homo sapiens
MVRPLNPRPLPPVVLMLLLLLPPSPLPLAAGDPLPTESRLMNSCLQARRKCQADPTCSAAYHHLDSCTSSISTPLPSEEPSVPADCLEAAQQLRNSSLIGCMCHRRMKNQVACLDIYWTVHRARSLGNYELDVSPYEDTVTSKPWKMNLSKLNMLKPDSDLCLKFAMLCTLNDKCDRLRKAYGEACSGPHCQRHVCLRQLLTFFEKAAEPHAQGLLLCPCAPNDRGCGERRRNTIAPNCALPPVAPNCLELRRLCFSDPLCRSRLVDFQTHCHPMDILGTCATEQSRCLRAYLGLIGTAMTPNFVSNVNTSVALSCTCRGSGNLQEECEMLEGFFSHNPCLTEAIAAKMRFHSQLFSQDWPHPTFAVMAHQNENPAVRPQPWVPSLFSCTLPLILLLSLW

SEQ ID NO: 47434 - protein, 369 aa, Homo sapiens
MVRPLNPRPLPPVVLMLLLLLPPSPLPLAAGDPLPTESRLMNSCLQARRKCQADPTCSAAYHHLDSCTSSISTPLPSEEPSVPADCLEAAQQLRNSSLIGCMCHRRMKNQVACLDIYWTVHRARSLDSDLCLKFAMLCTLNDKCDRLRKAYGEACSGPHCQRHVCLRQLLTFFEKAAEPHAQGLLLCPCAPNDRGCGERRRNTIAPNCALPPVAPNCLELRRLCFSDPLCRSRLVDFQTHCHPMDILGTCATEQSRCLRAYLGLIGTAMTPNFVSNVNTSVALSCTCRGSGNLQEECEMLEGFFSHNPCLTEAIAAKMRFHSQLFSQDWPHPTFAVMAHQNENPAVRPQPWVPSLFSCTLPLILLLSLW

SEQ ID NO: 47435 - protein, 711 aa, Homo sapiens
MESGAVLLESKSSPFNLLHEMHELRLLGHLCDVTVSVEYQGVRKDFMAHKAVLAATSKFFKEVFLNEKSVDGTRTNVYLNEVQVADFASFLEFVYTAKVQVEEDRVQRMLEVAEKLKCLDLSETCFQLKKQMLESVLLELQNFSESQEVEVSSGSQVSAAPAPRASVATDGPHPSGLTDSLDYPGERASNGMSSDLPPKKSKDKLDKKKEVVKPPYPKIRRASGRLAGRKVFVEIPKKKYTRRLREQQKTAEGDVGDYRCPQDQSPDRVGTEMEQVSKNEGCQAGAELEELSKKAGPEEEEEEEEEDEEGEKKKSNFKCSICEKAFLYEKSFLKHSKHRHGVATEVVYRCDTCGQTFANRCNLKSHQRHVHSSERHFPCELCGKKFKRKKDVKRHVLQVHEGGGERHRCGQCGKGLSSKTALRLHERTHTGDRPYGCTECGARFSQPSALKTHMRIHTGEKPFVCDECGARFTQNHMLIYHKRCHTGERPFMCETCGKSFASKEYLKHHNRIHTGSKPFKCEVCFRTFAQRNSLYQHIKVHTGERPYCCDQCGKQFTQLNALQRHRRIHTGERPFMCNACGRTFTDKSTLRRHTSIHDKNTPWKSFLVIVDGSPKNDDGHKTEQPDEEYVSSKLSDKLLSFAENGHFHNLAAVQDTVPTMQENSSADTACKADDSVVSQDTLLATTISELSELTPQTDSMPTQLHSLSNME

SEQ ID NO: 47436 - protein, 711 aa, Homo sapiens; identical to SEQ ID NO: 47435

SEQ ID NO: 47437 - protein, 48 aa, Homo sapiens
MESGAVLLESKSSPFNLLHEMHELRLLGHLCDVTVSVEYQGVRKDFMA

SEQ ID NO: 47438 - protein, 220 aa, Homo sapiens
MCETCGKSFASKEYLKHHNRIHTGSKPFKCEVCFRTFAQRNSLYQHIKVHTGERPYCCDQCGKQFTQLNALQRHRRIHTGERPFMCNACGRTFTDKSTLRRHTSIHDKNTPWKSFLVIVDGSPKNDDGHKTEQPDEEYVSSKLSDKLLSFAENGHFHNLAAVQDTVPTMQENSSADTACKADDSVVSQDTLLATTISELSELTPQTDSMPTQLHSLSNME

SEQ ID NO: 47439 - protein, 235 aa, Homo sapiens
MLIYHKRCHTGERPFMCETCGKSFASKEYLKHHNRIHTGSKPFKCEVCFRTFAQRNSLYQHIKVHTGERPYCCDQCGKQFTQLNALQRHRRIHTGERPFMCNACGRTFTDKSTLRRHTSIHDKNTPWKSFLVIVDGSPKNDDGHKTEQPDEEYVSSKLSDKLLSFAENGHFHNLAAVQDTVPTMQENSSADTACKADDSVVSQDTLLATTISELSELTPQTDSMPTQLHSLSNME

SEQ ID NO: 47440 - protein, 417 aa, Homo sapiens
MDEEYDVIVLGTGLTECILSGIMSVNGKKVLHMDRNPYYGGESSSITPLEELYKRFQLLEGPPESMGRGRDWNVDLIPKFLMANGQLVKMLLYTEVTRYLDFKVVEGSFVYKGGKIYKVPSTETEALASNLMGMFENDPKTFEGVDPQTTSMRDVYRKFDLGQDVIDFTGHALALYRTDDYLDQPCLETVNRIKLYSESLARYGKSPYLYPLYGLGELPQGFARLSAIYGGTYMLNKPVDDIIMENGKVVGVKSEGEVARCKQLICDPSYIPDRVRKAGQVIRIICILSHPIKNTNDANSCQIIIPQNQVNRKSDIYVCMISYAHNVAAQGKYIAIASTTVETTDPEKEVEPALELLEPIDDGCESQVFCSCSYDATTHFETTCNDIKDIYKRMAGTAFDFENMKRKQNDVFGEAEQ

SEQ ID NO: 47441 - protein, 447 aa, Homo sapiens [sequence omitted]

SEQ ID NO: 47442 - protein, 148 aa, Homo sapiens
MSLGKRKPSNFYLANFLGKECILSGIMSVNGKKVLHMDRNPYYGGESASITPLEDLYKRFKIPGSPPESMGRGRDWNVDLIPKFLMANGQLVKMLLYTEVTRYLDFKVTEGSFVYKGGKIYKVPSTEAEALASSLMGLFEKRRFRKFL

SEQ ID NO: 47443 - protein, 449 aa, Homo sapiens [sequence omitted]

SEQ ID NO: 47444 - protein, 208 aa, Homo sapiens
MRDVYKKFDLGQDVIDFTGHALALYRTDDYLDQPCYETINRIKLYSESLARYGKSPYLYPLYGLGELPQGFARLSAIYGGTYMLNKPIEEIIVQNGKVIGVKSEGEIARCKQLICDPSYVKDRVEKVGQVIRVICILSHPIKNTNDANSCQIIIPQNQVNRKSDLLASVTSWYQKTWEQKARSLFPAHMMPPLILRQRVMTLKTSIRG

SEQ ID NO: 47445 - protein, 400 aa, Homo sapiens
MNEEYDVIVLGTGLTECILSGIMSVNGKKVLHMDRNPYYGGESASITPLEDLYKRFKIPGSPPESMGRGRDWNVDLIPKFLMANGLMGLFEKRRFRKFLVYVANFDEKDPRTFEGIDPKKTTMRDVYKKFDLGQDVIDFTGHALALYRTDDYLDQPCYETINRIKLYSESLARYGKSPYLYPLYGLGELPQGFARLSAIYGGTYMLNKPIEEIIVQNGKVIGVKSEGEIARCKQLICDPSYVKDRVEKVGQVIRVICILSHPIKNTNDANSCQIIIPQNQVNRKSDIYVCMISFAHNVAAQGKYIAIVSTTVETKEPEKEIRPALELLEPIEQKFVSISDLLVPKDLGTESQIFISRTYDATTHFETTCDDIKNIYKRMTGSEFDFEEMKRKKNDIYGED

SEQ ID NO: 47446 - protein, 445 aa, Homo sapiens
MNEEYDVIVLGTGLTECILSGIMSVNGKKVLHMDRNPYYGGESASITPLEDLYKRFKIPGSPPESMGRGRDWNVDLIPKFLMANGQLVKMLLYTEVTRYLDFKVTEGSFVYKGGKIYKVPSTEAEALASSLMGLFEKRRFRKFLVYVANFDEKDPRTFEGIDPKKTTMRDVYKKFDLGQDVIDFTGHALALYRTDDYLDQPCYETINRIKLYSESLARYGKSPYLYPLYGLGELPQGFARLSAIYGGTYMLNKPIEEIIVQNGKVIGVKSEGEIARCKQLICDPSYVKDRVEKVGQVIRVICILSHPIKNTNDANSCQIIIPQNQVNRKSDIYVCMISFAHNVAAQGKYIAIVSTTVETKEPEKEIRPALELLEPIEQKFVSISDLLVPKDLGTESQIFISRTYDATTHFETTCDDIKNIYKRMTGSEFDFEEMKRKKNDIYGED

SEQ ID NO: 47447 - protein, 155 aa, Homo sapiens
MNEEYDVIVLGTGLTLYKRFKIPGSPPESMGRGRDWNVDLIPKFLMANGQLVKMLLYTEVTRYLDFKVTEGSFVYKGGKIYKVPSTEAEALASSLMGLFEKRRFRKFLVYVANFDEKDPRTFEGIDPKKTTMRDVYKKFDLGQDVIDFTGHALAL

SEQ ID NO: 47448 - protein, 203 aa, Homo sapiens
KKFDLGQDVIDFTGHALALYRTDDYLDQPCYETINRIKLYSESLARYGKSPYLYPLYGLGELPQGFARLSAIYGGTYMLNKPIEEIIVQNGKVIGVKSEGEIARCKQLICDPSYVKDRVEKVGQVIRVICILSHPIKNTNDANSCQIIIPQNQVNRKSDLLASVTSWYQKTWEQKARSLFPAHMMPPLILRQRVMTLKTSIRG

SEQ ID NO: 47449 - protein, 263 aa, Homo sapiens
MNEEYDVIVLGTGLTECILSGIMSVNGKKVLHMDRNPYYGGESASITPLEDLYKRFKIPGSPPESMGRGRDWNVDLIPKFLMANEVTRYLDFKVTEGSFVYKGGKIYKVPSTEAEALASSLMGLFEKRRFRKFLVYVANFDEKDPRTFEGIDPKKTTMRDVYKKFDLGQDVIDFTGHALALYRTDDYLDQPCYETINRIKLYSESLARYGKSPYLYPLYGLGELPQGFARLSAIYGGTYMLNKPIEEIIVQNGKVIGVKSEGE

SEQ ID NO: 47450 - protein, 372 aa, Homo sapiens
MAHAPARCPSARGSGDGEMGKPRNVALITGITGQDGSYLAEFLLEKGYEVHGIVRRSSSFNTGRIEHLYKNPQAHIEGNMKLHYGDLTDSTCLVKIINEVKPTEIYNLGAQSHVKISFDLAEYTADVDGVGTLRLLDAVKTCGLINSVKFYQASTSELYGKVQEIPQKETTPFYPRSPYGAAKLYAYWIVVNFREAYNLFAVNGILFNHESPRRGANFVTRKISRSVAKIYLGQLECFSLGNLDAKRDWGHAKDYVEAMWLMLQNDEPEDFVIATGEVHSVREFVEKSFLHIGKTIVWEGKNENEVGRCKETGKVHVTVDLKYYRPTEVDFLQGDCTKAKQKLNWKPRVAFDELVREMVHADVELMRTNPNA

SEQ ID NO: 47451 - protein, 342 aa, Homo sapiens
MCKMDGSYLAEFLLEKGYEVHGIVRRSSSFNTGRIEHLYKNPQAHIEGNMKLHYGDLTDSTCLVKIINEVKPTEIYNLGAQSHVKISFDLAEYTADVDGVGTLRLLDAVKTCGLINSVKFYQASTSELYGKVQEIPQKETTPFYPRSPYGAAKLYAYWIVVNFREAYNLFAVNGILFNHESPRRGANFVTRKISRSVAKIYLGQLECFSLGNLDAKRDWGHAKDYVEAMWLMLQNDEPEDFVIATGEVHSVREFVEKSFLHIGKTIVWEGKNENEVGRCKETGKVHVTVDLKYYRPTEVDFLQGDCTKAKQKLNWKPRVAFDELVREMVHADVELMRTNPNA

SEQ ID NO: 47452 - protein, 731 aa, Homo sapiens
MVVEHPEFLKAGKEPGLQIWRVEKFDLVPVPTNLYGDFFTGDAYVILKTVQLRNGNLQYDLHYWLGNECSQDESGAAAIFTVQLDDYLNGRAVQHREVQGFESATFLGYFKSGLKYKKGGVASGFKHVVPNEVVVQRLFQVKGRRVVRATEVPVSWESFNNGDCFILDLGNNIHQWCGSNSNRYERLKATQVSKGIRDNERSGRARVHVSEEGTEPEAMLQVLGPKPALPAGTEDTAKEDAANRKLAKLYKVSNGAGTMSVSLVADENPFAQGALKSEDCFILDHGKDGKIFVWKGKQANTEERKAALKTASDFITKMDYPKQTQVSVLPEGGETPLFKQFFKNWRDPDQTDGLGLSYLSSHIANVERVPFDAATLHTSTAMAAQHGMDDDGTGQKQIWRIEGSNKVPVDPATYGQFYGGDSYIILYNYRHGGRQGQIIYNWQGAQSTQDEVAASAILTAQLDEELGGTPVQSRVVQGKEPAHLMSLFGGKPMIIYKGGTSREGGQTAPASTRLFQVRANSAGATRAVEVLPKAGALNSNDAFVLKTPSAAYLWVGTGASEAEKTGAQELLRVLRAQPVQVAEGSEPDGFWEALGGKAAYRTSPRLKDKKMDAHPPRLFACSNKIGRFVIEEVPGELMQEDLATDDVMLLDTWDQVFVWVGKDSQEEEKTEALTSAKRYIETDPANRDRRTPITVVKQGFEPPSFVGWFLGWDDDYWSVDPLDRAMAELAA

SEQ ID NO: 47453 - protein, 731 aa, Homo sapiens; identical to SEQ ID NO: 47452

SEQ ID NO: 47454 - protein, 782 aa, Homo sapiens
MAPHRPAPALLCALSLALCALSLPVRAATASRGASQAGAPQGRVPEARPNSMVVEHPEFLKAGKEPGLQIWRVEKFDLVPVPTNLYGDFFTGDAYVILKTVQLRNGNLQYDLHYWLGNECSQDESGAAAIFTVQLDDYLNGRAVQHREVQGFESATFLGYFKSGLKYKKGGVASGFKHVVPNEVVVQRLFQVKGRRVVRATEVPVSWESFNNGDCFILDLGNNIHQWCGSNSNRYERLKATQVSKGIRDNERSGRARVHVSEEGTEPEAMLQVLGPKPALPAGTEDTAKEDAANRKLAKLYKVSNGAGTMSVSLVADENPFAQGALKSEDCFILDHGKDGKIFVWKGKQANTEERKAALKTASDFITKMDYPKQTQVSVLPEGGETPLFKQFFKNWRDPDQTDGLGLSYLSSHIANVERVPFDAATLHTSTAMAAQHGMDDDGTGQKQIWRIEGSNKVPVDPATYGQFYGGDSYIILYNYRHGGRQGQIIYNWQGAQSTQDEVAASAILTAQLDEELGGTPVQSRVVQGKEPAHLMSLFGGKPMIIYKGGTSREGGQTAPASTRLFQVRANSAGATRAVEVLPKAGALNSNDAFVLKTPSAAYLWVGTGASEAEKTGAQELLRVLRAQPVQVAEGSEPDGFWEALGGKAAYRTSPRLKDKKMDAHPPRLFACSNKIGRFVIEEVPGELMQEDLATDDVMLLDTWDQVFVWVGKDSQEEEKTEALTSAKRYIETDPANRDRRTPITVVKQGFEPPSFVGWFLGWDDDYWSVDPLDRAMAELAA

SEQ ID NO: 47455 - protein, 731 aa, Homo sapiens; identical to SEQ ID NO: 47452

SEQ ID NO: 47456 - protein, 715 aa, Homo sapiens
MVVEHPEFLKAGKEPGLQIWRVEKFDAYVILKTVQLRNGNLQYDLHYWLGNECSQDESGAAAIFTVQLDDYLNGRAVQHREVQGFESATFLGYFKSGLKYKKGGVASGFKHVVPNEVVVQRLFQVKGRRVVRATEVPVSWESFNNGDCFILDLGNNIHQWCGSNSNRYERLKATQVSKGIRDNERSGRARVHVSEEGTEPEAMLQVLGPKPALPAGTEDTAKEDAANRKLAKLYKVSNGAGTMSVSLVADENPFAQGALKSEDCFILDHGKDGKIFVWKGKQANTEERKAALKTASDFITKMDYPKQTQVSVLPEGGETPLFKQFFKNWRDPDQTDGLGLSYLSSHIANVERVPFDAATLHTSTAMAAQHGMDDDGTGQKQIWRIEGSNKVPVDPATYGQFYGGDSYIILYNYRHGGRQGQIIYNWQGAQSTQDEVAASAILTAQLDEELGGTPVQSRVVQGKEPAHLMSLFGGKPMIIYKGGTSREGGQTAPASTRLFQVRANSAGATRAVEVLPKAGALNSNDAFVLKTPSAAYLWVGTGASEAEKTGAQELLRVLRAQPVQVAEGSEPDGFWEALGGKAAYRTSPRLKDKKMDAHPPRLFACSNKIGRFVIEEVPGELMQEDLATDDVMLLDTWDQVFVWVGKDSQEEEKTEALTSAKRYIETDPANRDRRTPITVVKQGFEPPSFVGWFLGWDDDYWSVDPLDRAMAELAA

SEQ ID NO: 47457 - protein, 742 aa, Homo sapiens
MEKLFCCFPNSMVVEHPEFLKAGKEPGLQIWRVEKFDLVPVPTNLYGDFFTGDAYVILKTVQLRNGNLQYDLHYWLGNECSQDESGAAAIFTVQLDDYLNGRAVQHREVQGFESATFLGYFKSGLKYKKGGVASGFKHVVPNEVVVQRLFQVKGRRVVRATEVPVSWESFNNGDCFILDLGNNIHQWCGSNSNRYERLKATQVSKGIRDNERSGRARVHVSEEGTEPEAMLQVLGPKPALPAGTEDTAKEDAANRKLAKLYKVSNGAGTMSVSLVADENPFAQGALKSEDCFILDHGKDGKIFVWKGKQANTEERKAALKTASDFITKMDYPKQTQVSVLPEGGETPLFKQFFKNWRDPDQTDGLGLSYLSSHIANVERVPFDAATLHTSTAMAAQHGMDDDGTGQKQIWRIEGSNKVPVDPATYGQFYGGDSYIILYNYRHGGRQGQIIYNWQGAQSTQDEVAASAILTAQLDEELGGTPVQSRVVQGKEPAHLMSLFGGKPMIIYKGGTSREGGQTAPASTRLFQVRANSAGATRAVEVLPKAGALNSNDAFVLKTPSAAYLWVGTGASEAEKTGAQELLRVLRAQPVQVAEGSEPDGFWEALGGKAAYRTSPRLKDKKMDAHPPRLFACSNKIGRFVIEEVPGELMQEDLATDDVMLLDTWDQVFVWVGKDSQEEEKTEALTSAKRYIETDPANRDRRTPITVVKQGFEPPSFVGWFLGWDDDYWSVDPLDRAMAELAA

SEQ ID NO: 47458 - protein, 731 aa, Homo sapiens; identical to SEQ ID NO: 47452

SEQ ID NO: 47459 - protein, 260 aa, Homo sapiens
MVVEHPEFLKAGKEPGLQIWRVEKFDLVPVPTNLYGDFFTGDAYVILKTVQLRNGNLQYDLHYWLGNECSQDESGAAAIFTVQLDDYLNGRAVQHREVQGFESATFLGYFKSGLKYKKGGVASGFKHVVPNEVVVQRLFQVKGRRVVRATEVPVSWESFNNGDCFILDLGNNIHQWCGSNSNRYERLKATQVSKGIRDNERSGRARVHVSEEGTEPEAMLQVLGPKPALPAGTEDTAKEDAANRKLAKLYKVSNGAGTMS

SEQ ID NO: 47460 - protein, 742 aa, Homo sapiens; identical to SEQ ID NO: 47457

SEQ ID NO: 47461 - protein, 731 aa, Homo sapiens; identical to SEQ ID NO: 47452

SEQ ID NO: 47462 - protein, 705 aa, Homo sapiens
MVVEHPEFLKAGKEPGLQIWRVEKFDLVPVPTNLYGDFFTGDAYVILKTVQLRNGNLQYDLHYWLGNECSQDESGAAAIFTVQLDDYLKYKKGGVASGFKHVVPNEVVVQRLFQVKGRRVVRATEVPVSWESFNNGDCFILDLGNNIHQWCGSNSNRYERLKATQVSKGIRDNERSGRARVHVSEEGTEPEAMLQVLGPKPALPAGTEDTAKEDAANRKLAKLYKVSNGAGTMSVSLVADENPFAQGALKSEDCFILDHGKDGKIFVWKGKQANTEERKAALKTASDFITKMDYPKQTQVSVLPEGGETPLFKQFFKNWRDPDQTDGLGLSYLSSHIANVERVPFDAATLHTSTAMAAQHGMDDDGTGQKQIWRIEGSNKVPVDPATYGQFYGGDSYIILYNYRHGGRQGQIIYNWQGAQSTQDEVAASAILTAQLDEELGGTPVQSRVVQGKEPAHLMSLFGGKPMIIYKGGTSREGGQTAPASTRLFQVRANSAGATRAVEVLPKAGALNSNDAFVLKTPSAAYLWVGTGASEAEKTGAQELLRVLRAQPVQVAEGSEPDGFWEALGGKAAYRTSPRLKDKKMDAHPPRLFACSNKIGRFVIEEVPGELMQEDLATDDVMLLDTWDQVFVWVGKDSQEEEKTEALTSAKRYIETDPANRDRRTPITVVKQGFEPPSFVGWFLGWDDDYWSVDPLDRAMAELAA

SEQ ID NO: 47463 - protein, 739 aa, Homo sapiens
MPLCTPNSMVVEHPEFLKAGKEPGLQIWRVEKFDLVPVPTNLYGDFFTGDAYVILKTVQLRNGNLQYDLHYWLGNECSQDESGAAAIFTVQLDDYLNGRAVQHREVQGFESATFLGYFKSGLKYKKGGVASGFKHVVPNEVVVQRLFQVKGRRVVRATEVPVSWESFNNGDCFILDLGNNIHQWCGSNSNRYERLKATQVSKGIRDNERSGRARVHVSEEGTEPEAMLQVLGPKPALPAGTEDTAKEDAANRKLAKLYKVSNGAGTMSVSLVADENPFAQGALKSEDCFILDHGKDGKIFVWKGKQANTEERKAALKTASDFITKMDYPKQTQVSVLPEGGETPLFKQFFKNWRDPDQTDGLGLSYLSSHIANVERVPFDAATLHTSTAMAAQHGMDDDGTGQKQIWRIEGSNKVPVDPATYGQFYGGDSYIILYNYRHGGRQGQIIYNWQGAQSTQDEVAASAILTAQLDEELGGTPVQSRVVQGKEPAHLMSLFGGKPMIIYKGGTSREGGQTAPASTRLFQVRANSAGATRAVEVLPKAGALNSNDAFVLKTPSAAYLWVGTGASEAEKTGAQELLRVLRAQPVQVAEGSEPDGFWEALGGKAAYRTSPRLKDKKMDAHPPRLFACSNKIGRFVIEEVPGELMQEDLATDDVMLLDTWDQVFVWVGKDSQEEEKTEALTSAKRYIETDPANRDRRTPITVVKQGFEPPSFVGWFLGWDDDYWSVDPLDRAMAELAA

SEQ ID NO: 47464 - protein, 1508 aa, Homo sapiens
MGQEPRTLPPSPNWYCARCSDAVPGGLFGFAARTSVFLVRVGPGAGESPGTPPFRVIGELVGHTERVSGFTFSHHPGQYNLCATSSDDGTVKIWDVETKTVVTEHALHQHTISTLHWSPRVKDLIVSGDEKGVVFCYWFNRNDSQHLFIEPRTIFCLTCSPHHEDLVAIGYKDGIVVIIDISKKGEVIHRLRGHDDEIHSIAWCPLPGEDCLSINQEETSEEAEITNGNAVAQAPVTKGCYLATGSKDQTIRIWSCSRGRGVMILKLPFLKRRGGGIDPTVKERLWLTLHWPSNQPTQLVSSCFGGELLQWDLTQSWRRKYTLFSASSEGQNHSRIVFNLCPLQTEDDKQLLLSTSMDRDVKCWDIATLECSWTLPSLGGFAYSLAFSSVDIGSLAIGVGDGMIRVWNTLSIKNNYDVKNFWQGVKSKVTALCWHPTKEGCLAFGTDDGKVGLYDTYSNKPPQISSTYHKKTVYTLAWGPPVPPMSLGGEGDRPSLALYSCGGEGIVLQHNPWKLSGEAFDINKLIRDTNSIKYKLPVHTEISWKADGKIMALGNEDGSIEIFQIPNLKLICTIQQHHKLVNTISWHHEHGSQPELSYLMASGSNNAVIYVHNLKTVIESSPESPVTITEPYRTLSGHTAKITSVAWSPHHDGRLVSASYDGTAQVWDALREEPLCNFRGHRGRLLCVAWSPLDPDCIYSGADDFCVHKWLTSMQDHSRPPQGKKSIELEKKRLSQPKAKPKKKKKPTLRTPVKLESIDGNEEESMKENSGPVENGVSDQEGEEQAREPELPCGLAPAVSREPVICTPVSSGFEKSKVTINNKVILLKKEPPKEKPETLIKKRKARSLLPLSTSLDHRSKEELHQDCLVLATAKHSRELNEDVSADVEERFHLGLFTDRATLYRMIDIEGKGHLENGHPELFHQLMLWKGDLKGVLQTAAERGELTDNLVAMAPAAGYHVWLWAVEAFAKQLCFQDQYVKAASHLLSIHKVYEAVELLKSNHFYREAIAIAKARLRPEDPVLKDLYLSWGTVLERDGHYAVAAKCYLGATCAYDAAKVLAKKGDAASLRTAAELAAIVGEDELSASLALRCAQELLLANNWVGAQEALQLHESLQGQRLVFCLLELLSRHLEEKQLSEGKSSSSYHTWNTGTEGPFVERVTAVWKSIFSLDTPEQYQEAFQKLQNIKYPSATNNTPAKQLLLHICHDLTLAVLSQQMASWDEAVQALLRAVVRSYDSGSFTIMQEVYSAFLPDGCDHLRDKLGDHQSPATPAFKSLEAFFLYGRLYEFWWSLSRPCPNSSVWVRAGHRTLSVEPSQQLDTASTEETDPETSQPEPNRPSELDLRLTEEGERMLSTFKELFSEKHASLQNSQRTVAEVQETLAEMIRQHQKSQLCKSTANGPDKNEPEVEAEQPLCSSQSQCKEEKNEPLSLPELTKRLTEANQRMAKFPESIKAWPFPDVLECCLVLLLIRSHFPGCLAQEMQQQAQELLQKYGNTKTYRRHCQTFCM

SEQ ID NO: 47465 - protein, 131 aa, Homo sapiens
MQTPVNIPVPVLRLPRGPDGFSRGFAPDGRRAPLRPEVPEIQECPIAQESLESQEQRARAALRERYLRSLLAMVGHQVSFTLHEGVRVAAHFGATDLDVANFYVSQLQTPIGVQAEALLRCSDIISYTFKP

SEQ ID NO: 47466 - protein, 131 aa, Homo sapiens; identical to SEQ ID NO: 47465

SEQ ID NO: 47467 - protein, 970 aa, Homo sapiens
MDAAEPGLPPGPEGRKRYSDIFRSLDNLEISLGNVTLEMLAGDPLLSEDPEPDKTPTATVTNEASCWSGPSPEGPVPLTGEELDLRLIRTKGGVDAALEYAKTWSRYAKELLAWTEKRASYELEFAKSTMKIAEAGKVSIQQQSHMPLQYIYTLFLEHDLSLGTLAMETVAQQKRDYYQPLAAKRTEIEKWRKEFKEQWMKEQKRMNEAVQALRRAQLQYVQRSEDLRARSQGSPEDSAPQASPGPSKQQERRRRSREEAQAKAQEAEALYQACVREANARQQDLEIAKQRIVSHVRKLVFQGDEVLRRVTLSLFGLRGAQAERGPRAFAALAECCAPFEPGQRYQEFVRALRPEAPPPPPPAFSFQEFLPSLNSSPLDIRKKLSGPLPPRLDENSAEPGPWEDPGTGWRWQGTPGPTPGSDVDSVGGGSESRSLDSPTSSPGAGTRQLVKASSTGTESSDDFEERDPDLGDGLENGLGSPFGKWTLSSAAQTHQLRRLRGPAKCRECEAFMVSGTECEECFLTCHKRCLETLLILCGHRRLPARTPLFGVDFLQLPRDFPEEVPFVVTKCTAEIEHRALDVQGIYRVSGSRVRVERLCQAFENGRALVELSGNSPHDVSSVLKRFLQELTEPVIPFHLYDAFISLAKTLHADPGDDPGTPSPSPEVIRSLKTLLVQLPDSNYNTLRHLVAHLFRVAARFMENKMSANNLGIVFGPTLLRPPDGPRAASAIPVTCLLDSGHQAQLVEFLIVHYEQIFGMDELPQATEPPPQDSSPAPGPLTTSSQPPPPHLDPDSQPPVLASDPGPDPQHHSTLEQHPTATPTEIPTPQSDQREDVAEDTKDGGGEVSSQGPEDSLLGTQSRGHFSRQPVKYPRGGVRPVTHQLSSLALVASKLCEETPITSVPRGSLRGRGPSPAAASPEGSPLRRTPLPKHFEITQETARLLSKLDSEAVPRATCCPDVQPEEAEDHL

SEQ ID NO: 47468 - protein, 941 aa, Homo sapiens
MDAAEPGLPPGPEGRKRYSDIFRSLDNLEISLGNVTLEMLAGDPLLSEDPEPDKTPTATVTNEASCWSGPSPEGPVPLTGEELDLRLIRTKGGVDAALEYAKTWSRYAKELLAWTEKRASYELEFAKSTMKIAEAGKVSIQQQSHMPLQYIYTLFLEHDLSLGTLAMETVAQQKRDYYQPLAAKRTEIEKWRKEFKEQWMKEQKRMNEAVQALRRAQLQYVQRSEDLRARSQGSPEDSAPQASPGPSKQQERRRRSREEAQAKAQEAEALYQACVREANARQQDLEIAKQRIVSHVRKLVFQGDEVLRRVTLSLFGLRGAQAERGPRAFAALAECCAPFEPGQRYQEFVRALRPEAPPPPPPAFSFQEFLPSLNSSPLDIRKKLSGPLPPRLDENSAEPGPWEDPGTGWRWQGPTPGSDVDSVGGGSESRSLDSPTSSPDLGDGLENGLGSPFGKWTLSSAAQTHQLRRLRGPAKCRECEAFMVSGTECEECFLTCHKRCLETLLILCGHRRLPARTPLFGVDFLQLPRDFPEEVPFVVTKCTAEIEHRALDVQGIYRVSGSRVRVERLCQAFENGRALVELSGNSPHDVSSVLKRFLQELTEPVIPFHLYDAFISLAKTLHADPGDDPGTPSPSPEVIRSLKTLLVQLPDSNYNTLRHLVAHLFRVAARFMENKMSANNLGIVFGPTLLRPPDGPRAASAIPVTCLLDSGHQAQLVEFLIVHYEQIFGMDELPQATEPPPQDSSPAPGPLTTSSQPPPPHLDPDSQPPVLASDPGPDPQHHSTLEQHPTATPTEIPTPQSDQREDVAEDTKDGGGEVSSQGPEDSLLGTQSRGHFSRQPVKYPRGGVRPVTHQLSSLALVASKLCEETPITSVPRGSLRGRGPSPAAASPEGSPLRRTPLPKHFEITQETARLLSKLDSEAVPRATCCPDVQPEEAEDHL

SEQ ID NO: 47469 - protein, 334 aa, Homo sapiens
MNTILPCQDQYFVGGQSYNCPYSTTTSESSVDVSTETWVSFWAAGLLDNRELQQAPQAQESFSDSNFPLPDLCSWEEAQLSSQLYRNKQLQDTLVQKEEELARLHEENNHLRQYLNSALVKCLEEKAKKLLSSDEFSKAYGKFRKGKRKSKEQRYSPAEIPHPKNAKRNLSSEFANCEEQAGPPVDPWVLQTLGLKDLDTIDDTSSANYSALASHPRRVASTFSQFPDDAVDYKNIPREDMPIDYRGDRTTPLHSTATHGEDFHILSQLSNPPVGLKTLPYYTAHVSPNKTEMAFSTSLSPHCNVKTHSFHQGQAFVRRDEEGGWKFTWVPKQS

SEQ ID NO: 47470 - protein, 908 aa, Homo sapiens
MGVNDLWQILEPVKQHIPLRNLGGKTIAVDLSLWVCEAQTVKKMMGSVMKPHLRNLFFRISYLTQMDVKLVFVMEGEPPKLKADVISKRNQSRYGSSGKSWSQKTGRSHFKSVLRECLHMLECLGIPWVQAAGEAEAMCAYLNAGGHVDGCLTNDGDTFLYGAQTVYRNFTMNTKDPHVDCYTMSSIKSKLGLDRDALVGLAILLGCDYLPKGVPGVGKEQALKLIQILKGQSLLQRFNRWNETSCNSSPQLLVTKKLAHCSVCSHPGSPKDHERNGCRLCKSDKYCEPHDYEYCCPCEWHRTEHDRQLSEVENNIKKKACCCEGFPFHEVIQEFLLNKDKLVKVIRYQRPDLLLFQRFTLEKMEWPNHYACEKLLVLLTHYDMIERKLGSRNSNQLQPIRIVKTRIRNGVHCFEIEWEKPEHYAMEDKQHGEFALLTIEEESLFEAAYPEIVAVYQKQKLEIKGKKQKRIKPKENNLPEPDEVMSFQSHMTLKPTCEIFHKQNSKLNSGISPDPTLPQESISASLNSLLLPKNTPCLNAQEQFMSSLRPLAIQQIKAVSKSLISESSQPNTSSHNISVIADLHLSTIDWEGTSFSNSPAIQRNTFSHDLKSEVESELSAIPDGFENIPEQLSCESERYTANIKKVLDEDSDGISPEEHLLSGITDLCLQDLPLKERIFTKLSYPQDNLQPDVNLKTLSILSVKESCIANSGSDCTSHLSKDLPGIPLQNESRDSKILKGDQLLQEDYKVNTSVPYSVSNTVVKTCNVRPPNTALDHSRKVDMQTTRKILMKKSVCLDRHSSDEQSAPVFGKAKYTTQRMKHSSQKHNSSHFKESGHNKLSSPKIHIKETEQCVRSYETAENEESCFPDSTKSSLSSLQCHKKENNSGTCLDSPLPLRQRLKLRFQST

SEQ ID NO: 47471 - protein, 908 aa, Homo sapiens; identical to SEQ ID NO: 47470

SEQ ID NO: 47472 - protein, 126 aa, Homo sapiens
MGVNDLWQILEPVKQHIPLRNLGGKTIAVDLSLWVCEAQTVKKMMGSVMKPHLRNLFFRISYLTQMDVKLVFVMEGEPPKLKADVISKRNQSRYGSSGKSWSQKTGRSHFKSVLRECLHMLECLGI

SEQ ID NO: 47473 - protein, 93 aa, Homo sapiens
MGVNDLWQILEPVKQHIPLRNLGGKTIAVDLSLWVCEAQTVKKMMGSVMKPHLRNLFFRISYLTQMDVKLVFVMEGEPPKLKADVISKRNQSR

SEQ ID NO: 47474 - protein, 476 aa, Homo sapiens
MEWPNHYACEKLLVLLTHYDMIERKLGSRNSNQLQPIRIVKTRIRNGVHCFEIEWEKPEHYAMEDKQHGEFALLTIEEESLFEAAYPEIVAVYQKQKLEIKGKKQKRIKPKENNLPEPDEVMSFQSHMTLKPTCEIFHKQNSKLNSGISPDPTLPQESISASLNSLLLPKNTPCLNAQEQFMSSLRPLAIQQIKAVSKSLISESSQPNTSSHNISVIADLHLSTIDWEGTSFSNSPAIQRNTFSHDLKSEVESELSAIPDGFENIPEQLSCESERYTANIKKVLDEDSDGISPEEHLLSGITDLCLQDLPLKERIFTKLSYPQDNLQPDVNLKTLSILSVKESCIANSGSDCTSHLSKDLPGIPLQNESRDSKILKGDQLLQEDYKVNTSVPYSVSNTVVKTCNVRPPNTALDHSRKVDMQTTRKILMKKSVCLDRHSSDEQSAPVFGKAKYTTQRMKHSSQKHNSSHFKESGHNE

SEQ ID NO: 47475 - protein, 478 aa, Homo sapiens
MACLNPVPKLYRSVIEDVIEGVRNLFAEEGIEEQVLKDLKQLWETKVLQSKATEDFFRNSIQSPLFTLQLPHSLHQTLQSSTASLVIPAGRTLPSFTTAELGTSNSSANFTFPGYPIHVPAGVTLQTVSGHLYKVNVPIMVTETSGRAGILQHPIQQVFQQLGQPSVIQTSVPQLNPWSLQATTEKSQRIETVLQQPAILPSGPVDRKHLENATSDILVSPGNEHKIVPEALLCHQESSHYISLPGVVFSPQVSQTNSNVESVLSGSASMAQNLHDESLSTSPHGALHQHVTDIQLHILKNRMYGCDSVKQPRNIEEPSNIPVSEKDSNSQVDLSIRVTDDDIGEIIQVDGSGDTSSNEEIGSTRDADENEFLGNIDGGDLKVPEEEADSISNEDSATNSSDNEDPQVNIVEEDPLNSGDDVSEQDVPDLFDTDNVIVCQYDKIHRSKNKWKFYLKDGVMCFGGRDYVFAKAIGDAEW

SEQ ID NO: 47476 - protein, 444 aa, Homo sapiens
MACLNPVLWETKVLQSKATEDFFRNSIQSPLFTLQLPHSLHQTLQSSTASLVIPAGRTLPSFTTAELGTSNSSANFTFPGYPIHVPAGVTLQTVSGHLYKVNVPIMVTETSGRAGILQHPIQQVFQQLGQPSVIQTSVPQLNPWSLQATTEKSQRIETVLQQPAILPSGPVDRKHLENATSDILVSPGNEHKIVPEALLCHQESSHYISLPGVVFSPQVSQTNSNVESVLSGSASMAQNLHDESLSTSPHGALHQHVTDIQLHILKNRMYGCDSVKQPRNIEEPSNIPVSEKDSNSQVDLSIRVTDDDIGEIIQVDGSGDTSSNEEIGSTRDADENEFLGNIDGGDLKVPEEEADSISNEDSATNSSDNEDPQVNIVEEDPLNSGDDVSEQDVPDLFDTDNVIVCQYDKIHRSKNKWKFYLKDGVMCFGGRDYVFAKAIGDAEW

SEQ ID NO: 47477 - protein, 316 aa, Homo sapiens
MASTSRLDALPRVTCPNHPDAILVEDYRAGDMICPECGLVVGDRVIDVGSEWRTFSNDKATKDPSRVGDSQNPLLSDGDLSTMIGKGTGAASFDEFGNSKYQNRRTMSSSDRAMMNAFKEITTMADRINLPRNIVDRTNNLFKQVYEQKSLKGRANDAIASACLYIACRQEGVPRTFKEICAVSRISKKEIGRCFKLILKALETSVDLITTGDFMSRFCSNLCLPKQVQMAATHIARKAVELDLVPGRSPISVAAAAIYMASQASAEKRTQKEIGDIAGVADVTIRQSYRLIYPRAPDLFPTDFKFDTPVDKLPQL

SEQ ID NO: 47478 - protein, 231 aa, Homo sapiens
MASTSRLDALPRVTCPNHPDAILVEDYRAGDMICPECDRVIDVGSEWRTFSNDKATKDPSRVGDSQNPLLSDGDLSTMIGKGTGAASFDEFGNSKYQNRRTMSSSDRAMMNAFKEITTMADRINLPRNIVDRTNNLFKQVYEQKSLKGRANDAIASACLYIACRQEGVPRTFKEICAVSRISKKEIGRCFKLILKALETSVDLITTGDFMSRFCSNLCLPKQVQMAATHIA

SEQ ID NO: 47479 - protein, 224 aa, Homo sapiens
ASTSRLDALPRVTCPNHPDAILVEDYRAGDMICPECGLVVGDRVIDVGSEWRTFSNDKATKDPSRVGDSQNPLLSDGDLSTMIGKGTGAASFDEFGNSKYQNRRTMSSSDRAMMNAFKEITTMADRINLPRNIVDRTNNLFKQVYEQKSLKGRANDAIASACLYIACRQEGVPRTFKEICAVSRISKKEIGRCFKLILKALETSVDLITTGDFMSRNWRYCWCC

SEQ ID NO: 47480 - protein, 291 aa, Homo sapiens
MDPSLLRERELFKKRALSTPVVEKRSASSESSSSSSKKKKTKVEHGGSSGSKQNSDHSNGSFNLKALSGSSGYKFGVLAKIVNYMKTRHQRGDTHPLTLDEILDETQHLDIGLKQKQWLMTEALVNNPKIEVIDGKYAFKPKYNVRDKKALLRLLDQHDQRGLGGILLEDIEEALPNSQKAVKALGDQILFVNRPDKKKILFFNDKSCQFSVDEEFQKLWRSVTVDSMDEEKIEEYLKRQGISSMQESGPKKVAPIQRRKKPASQKKRRFKTHNEHLAGVLKDYSDITSSK

SEQ ID NO: 47481 - protein, 126 aa, Homo sapiens
MDPSLLRERELFKKRALSTPVVEKRSASSESSSSSSKKKKTKVEHGGSSGSKQNSDHSNGSFNLKALSGSSGYKFGVLAKIVNYMKTRHQRGDTHPLTLDEILDETQHLDIGLKQKQWLMTEALVN

SEQ ID NO: 47482 - protein, 198 aa, Homo sapiens
MDPSLLRERELFKKRALSTPVVEKRSASSESSSSSSKKKKTKVEHGGSSGSKQNSDHSNGSFNLKALSGSSGYKFGVLAKIVNYMKTRHQRGDTHPLTLDEILDETQHLDIGLKQKQWLMTEALVNNPKIEVIDGKYAFKPKYNVRDKKALLRLLDQHDQRGLGGILLEDIEEALPNSQKAVKALGDQILFVNRPDKK

SEQ ID NO: 47483 - protein, 517 aa, Homo sapiens
MAALGPSSQNVTEYVVRVPKNTTKKYNIMAFNAADKVNFATWNQARLERDLSNKKIYQEEEMPESGAGSEFNRKLREEARRKKYGIVLKEFRPEDQPWLLRVNGKSGRKFKGIKKGGVTENTSYYIFTQCPDGAFEAFPVHNWYNFTPLARHRTLTAEEAEEEWERRNKVLNHFSIMQQRRLKDQDQDEDEEEKEKRGRRKASELRIHDLEDDLEMSSDASDASGEEGGRVPKAKKKAPLAKGGRKKKKKKGSDDEAFEDSDDGDFEGQEVDYMSDGSSSSQEEPESKAKAPQQEEGPKGVDEQSDSSEESEEEKPPEEDKEEEEEKKAPTPQEKKRRKDSSEESDSSEESDIDSEASSALFMAKKKTPPKRERKPSGGSSRGNSRPGTPSAEGGSTSSTLRAAASKLEQGKRVSEMPAAKRLRLDTGPQSLSGKSTPQPPSGKTTPNSGDVQVTEDAVRRYLTRKPMTTKDLLKKFQTKKTGLSSEQTVNVLAQILKRLNPERKMINDKMHFSLKE

SEQ ID NO: 47484 - protein, 432 aa, Homo sapiens
MAFNAADKVNFATWNQARLERDLSNKKIYQEEEMPESGAGSEFNRKLREEARRKKYGIVLKEFRPEDQPWLLRVNGKSGRKRNKVLNHFSIMQQRRLKDQDQDEDEEEKEKRGRRKASELRIHDLEDDLEMSSDASDASGEEGGRVPKAKKKAPLAKGGRKKKKKKGSDDEAFEDSDDGDFEGQEVDYMSDGSSSSQEEPESKAKAPQQEEGPKGVDEQSDSSEESEEEKPPEEDKEEEEEKKAPTPQEKKRRKDSSEESDSSEESDIDSEASSALFMAKKKTPPKRERKPSGGSSRGNSRPGTPSAEGGSTSSTLRAAASKLEQGKRVSEMPAAKRLRLDTGPQSLSGKSTPQPPSGKTTPNSGDVQVTEDAVRRYLTRKPMTTKDLLKKFQTKKTGLSSEQTVNVLAQILKRLNPERKMINDKMHFSLKE

SEQ ID NO: 47485 - protein, 127 aa, Homo sapiens
MAALGPSSQNVTEYVVRVPKNTTKKYNIMAFNAADKVNFATWNQARLERDLSNKKIYQEEEMPESGAGSEFNRKLREEARRKKYGIVLKEFRPEDQPWLLRVNGKSGRKFKGIKKGGVTENTSYYIF

SEQ ID NO: 47486 - protein, 548 aa, Homo sapiens
MATSSEEVLLIVKKVRQKKQDGALYLMAERIAWAPEGKDRFTISHMYADIKCQKISPEGKAKIQLQLVLHAGDTTNFHFSNESTAVKERDAVKDLLQQLLPKFKRKANKELEEKNRMLQEDPVLFQLYKDLVVSQVISAEEFWANRLNVNATDSSSTSNHKQDVGISAAFLADVRPQTDGCNGLRYNLTSDIIESIFRTYPAVKMKYAENVPHNMTEKEFWTRFFQSHYFHRDRLNTGSKDLFAECAKIDEKGLKTMVSLGVKNPLLDLTALEDKPLDEGYGISSVPSASNSKSIKENSNAAIIKRFNHHSAMVLAAGLRKQEAQNEQTSEPSNMDGNSGDADCFQPAVKRAKLQESIEYEDLGKNNSVKTIALNLKKSDRYYHGPTPIQSLQYATSQDIINSFQSIRQEMEAYTPKLTQVLSSSAASSTITALSPGGALMQGGTQQAINQMVPNDIQSELKHLYVAVGELLRHFWSCFPVNTPFLEEKVVKMKSNLERFQVTKLCPFQEKIRRQYLSTNLVSHIEEMLQTAYNKLHTWQSRRLMKKT

SEQ ID NO: 47487 - protein, 548 aa, Homo sapiens; identical to SEQ ID NO: 47486

SEQ ID NO: 47488 - protein, 95 aa, Homo sapiens
MATSSEEVLLIVKKVRQKKQDGALYLMAERIAWAPEGKDRFTISHMYADIKCQKISPEGKAKIQLQLVLHAGDTTNFHFSNESTAVKERDAVKDL

SEQ ID NO: 47489 - protein, 432 aa, Homo sapiens
MLQEDPVLFQLYKDLVVSQVISAEEFWANRLNVNATDSSSTSNHKQDVGISAAFLADVRPQTDGCNGLRYNLTSDIIESIFRTYPAVKMKYAENVPHNMTEKEFWTRFFQSHYFHRDRLNTGSKDLFAECAKIDEKGLKTMVSLGVKNPLLDLTALEDKPLDEGYGISSVPSASNSKSIKENSNAAIIKRFNHHSAMVLAAGLRKQEAQNEQTSEPSNMDGNSGDADCFQPAVKRAKLQESIEYEDLGKNNSVKTIALNLKKSDRYYHGPTPIQSLQYATSQDIINSFQSIRQEMEAYTPKLTQVLSSSAASSTITALSPGGALMQGGTQQAINQMVPNDIQSELKHLYVAVGELLRHFWSCFPVNTPFLEEKVVKMKSNLERFQVTKLCPFQEKIRRQYLSTNLVSHIEEMLQTAYNKLHTWQSRRLMKKT

SEQ ID NO: 47490 - protein, 395 aa, Homo sapiens
MDEEPERTKRWEGGYERTWEILKEDESGSLKATIEDILFKAKRKRVFEHHGQVRLGMMRHLYVVVDGSRTMEDQDLKPNRLTCTLKLLEYFVEEYFDQNPISQIGIIVTKSKRAEKLTELSGNPRKHITSLKKAVDMTCHGEPSLYNSLSIAMQTLKHMPGHTSREVLIIFSSLTTCDPSNIYDLIKTLKAAKIRVSVIGLSAEVRVCTVLARETGGTYHVILDESHYKELLTHHVSPPPASSSSECSLIRMGFPQHTIASLSDQDAKPSFSMAHLDGNTEPGLTLGGYFCPQCRAKYCELPVECKICGLTLVSAPHLARSYHHLFPLDAFQEIPLEEYNGERFCYGCQGELKDQHVYVCAVCQNVFCVDCDVFVHDSLHCCPGCIHKIPAPSGV

SEQ ID NO: 47491 - protein, 395 aa, Homo sapiens; identical to SEQ ID NO: 47490

SEQ ID NO: 47492 - protein, 338 aa, Homo sapiens
MRHLYVVVDGSRTMEDQDLKPNRLTCTLKLLEYFVEEYFDQNPISQIGIIVTKSKRAEKLTELSGNPRKHITSLKKAVDMTCHGEPSLYNSLSIAMQTLKHMPGHTSREVLIIFSSLTTCDPSNIYDLIKTLKAAKIRVSVIGLSAEVRVCTVLARETGGTYHVILDESHYKELLTHHVSPPPASSSSECSLIRMGFPQHTIASLSDQDAKPSFSMAHLDGNTEPGLTLGGYFCPQCRAKYCELPVECKICGLTLVSAPHLARSYHHLFPLDAFQEIPLEEYNGERFCYGCQGELKDQHVYVCAVCQNVFCVDCDVFVHDSLHCCPGCIHKIPAPSGV

SEQ ID NO: 47493 - protein, 395 aa, Homo sapiens; identical to SEQ ID NO: 47490

SEQ ID NO: 47494 - protein, 462 aa, Homo sapiens
MESTPSRGLNRVHLQCRNLQEFLGGLSPGVLDRLYGHPATCLAVFRELPSLAKNWVMRMLFLEQPLPQAAVALWVKKEFSKAQEESTGLLSGLRIWHTQLLPGGLQGLILNPIFRQNLRIALLGGGKAWSDDTSQLGPDKHARDVPSLDKYAEERWEVVLHFMVGSPSAAVSQDLAQLLSQAGLMKSTEPGEPPCITSAGFQFLLLDTPAQLWYFMLQYLQTAQSRGMDLVEILSFLFQLSFSTLGKDYSVEGMSDSLLNFLQHLREFGLVFQRKRKSRRYYPTRLAINLSSGVSGAGGTVHQPGFIVVETNYRLYAYTESELQIALIALFSEMLYRFPNMVVAQVTRESVQQAIASGITAQQIIHFLRTRAHPVMLKQTPVLPPTITDQIRLWELERDRLRFTEGVLYNQFLSQVDFELLLAHARELGVLVFENSAKRLMVVTPAGHSDVKRFWKRQKHSS

SEQ ID NO: 47495 - protein, 462 aa, Homo sapiens; identical to SEQ ID NO: 47494

SEQ ID NO: 47496 - protein, 462 aa, Homo sapiens; identical to SEQ ID NO: 47494

SEQ ID NO: 47497 - protein, 462 aa, Homo sapiens; identical to SEQ ID NO: 47494

SEQ ID NO: 47498 - protein, 462 aa, Homo sapiens; identical to SEQ ID NO: 47494

SEQ ID NO: 47499 - protein, 138 aa, Homo sapiens
MESTPSRGLNRVHLQCRNLQEFLGGLSPGVLDRLYGHPATCLAVFRELPSLAKNWVMRMLFLEQPLPQAAVALWVKKEFSKAQEESTGLLSGLRIWHTQLLPGGLQGLILNPIFRQNLRIALLGGTGITGVSHCAWPG

SEQ ID NO: 47500 - protein, 462 aa, Homo sapiens; identical to SEQ ID NO: 47494

SEQ ID NO: 47501 - protein, 138 aa, Homo sapiens; identical to SEQ ID NO: 47499

SEQ ID NO: 47502 - protein, 462 aa, Homo sapiens; identical to SEQ ID NO: 47494

SEQ ID NO: 47503 - protein, 138 aa, Homo sapiens; identical to SEQ ID NO: 47499

SEQ ID NO: 47504 - protein, 462 aa, Homo sapiens; identical to SEQ ID NO: 47494

SEQ ID NO: 47505 - protein, 462 aa, Homo sapiens; identical to SEQ ID NO: 47494

SEQ ID NO: 47506 - protein, 462 aa, Homo sapiens; identical to SEQ ID NO: 47494

SEQ ID NO: 47507 - protein, 462 aa, Homo sapiens; identical to SEQ ID NO: 47494

SEQ ID NO: 47508 - protein, 138 aa, Homo sapiens; identical to SEQ ID NO: 47499

SEQ ID NO: 47509 - protein, 138 aa, Homo sapiens; identical to SEQ ID NO: 47499

SEQ ID NO: 47510 - protein, 138 aa, Homo sapiens; identical to SEQ ID NO: 47499

SEQ ID NO: 47511 - protein, 462 aa, Homo sapiens; identical to SEQ ID NO: 47494

SEQ ID NO: 47512 - protein, 220 aa, Homo sapiens
MRMLFLEQPLPQAAVALWVKKEFSKAQEESTGLLSGLRIWHTQLLPGGLQGLILNPIFRQNLRIALLGGGKAWSDDTSQLGPDKHARDVPSLDKYAEERWEVVLHFMVGSPSAAVSQDLAQLLSQAGLMKSTEPGEPPCITSAGFQFLLLDTPAQLWYFMLQYLQTAQSRGMDLVEILSFLFQLSFSTLGKDYSVEGMSDSLLNFLQHLREFGLVFQRKV

SEQ ID NO: 47513 - protein, 220 aa, Homo sapiens; identical to SEQ ID NO: 47512

SEQ ID NO: 47514 - protein, 220 aa, Homo sapiens; identical to SEQ ID NO: 47512

SEQ ID NO: 47515 - protein, 220 aa, Homo sapiens; identical to SEQ ID NO: 47512

SEQ ID NO: 47516 - protein, 220 aa, Homo sapiens; identical to SEQ ID NO: 47512

SEQ ID NO: 47517 - protein, 220 aa, Homo sapiens; identical to SEQ ID NO: 47512

SEQ ID NO: 47518 - protein, 71 aa, Homo sapiens
MVNVLKGVLIECDPAMKQFLLYLDESNALGKKFIIQDIDDTHVFVIAELVNVLQERVGELMDQNAFSLTQK

SEQ ID NO: 47519 - protein, 998 aa, Homo sapiens
MAQVAMSTLPVEDEESSESRMVVTFLMSALESMCKELAKSKAEVACIAVYETDVFVVGTERGRAFVNTRKDFQKDFVKYCVEEEEKAAEMHKMKSTTQANRMSVDAVEIETLRKTVEDYFCFCYGKALGKSTVVPVPYEKMLRDQSAVVVQGLPEGVAFKHPENYDLATLKWILENKAGISFIIKRPFLEPKKHVGGRVMVTDADRSILSPGGSCGPIKVKTEPTEDSGISLEMAAVTVKEESEDPDYYQYNIQAGPSETDDVDEKQPLSKPLQGSHHSSEGNEGTEMEVPAEDSTQHVPSETSEDPEVEVTIEDDDYSPPSKRPKANELPQPPVPEPANAGKRKVREFNFEKWNARITDLRKQVEELFERKYAQAIKAKGPVTIPYPLFQSHVEDLYVEGLPEGIPFRRPSTYGIPRLERILLAKERIRFVIKKHELLNSTREDLQLDKPASGVKEEWYARITKLRKMVDQLFCKKFAEALGSTEAKAVPYQKFEAHPNDLYVEGLPENIPFRSPSWYGIPRLEKIIQVGNRIKFVIKRPELLTHSTTEVTQPRTNTPVKEDWNVRITKLRKQVEEIFNLKFAQALGLTEAVKVPYPVFESNPEFLYVEGLPEGIPFRSPTWFGIPRLERIVRGSNKIKFVVKKPELVISYLPPGMASKINTKALQSPKRPRSPGSNSKVPEIEVTVEGPNNNNPQTSAVRTPTQTNGSNVPFKPRGREFSFEAWNAKITDLKQKVENLFNEKCGEALGLKQAVKVPFALFESFPEDFYVEGLPEGVPFRRPSTFGIPRLEKILRNKAKIKFIIKKPEMFETAIKESTSSKSPPRKINSSPNVNTTASGVEDLNIIQVTIPDDDNERLSKVEKARQLREQVNDLFSRKFGEAIGMGFPVKVPYRKITINPGCVVVDGMPPGVSFKAPSYLEISSMRRILDSAEFIKFTVIRPFPGLVINNQLVDQSESEGPVIQESAEPSQLEVPATEEIKETDGSSQIKQEPDPTW

SEQ ID NO: 47520 - protein, 977 aa, Homo sapiens
MAQVAMSTLPVEDEESSESRMVVTFLMSALESMCKELAKSKAEVACIAVYETDVFVVGTERGRAFVNTRKDFQKDFVKYCVEEEEKAAEMHKMKSTTQANRMSVDAVEIETLRKTVEDYFCFCYGKALGKSTVVPVPYEKMLRDQSAVVVQGLPEGVAFKHPENYDLATLKWILENKAGISFIIKRPFLEPKKHVGGRVMVTDADRSILSPGGSCGPIKVKTEPTEDSGISLEMAAVTVKEESEDPDYYQYNIQAGPSETDDVDEKQPLSKPLQGSHHSSEGNEGTEMEVPAEDDDYSPPSKRPKANELPQPPVPEPANAGKRKVREFNFEKWNARITDLRKQVEELFERKYAQAIKAKGPVTIPYPLFQSHVEDLYVEGLPEGIPFRRPSTYGIPRLERILLAKERIRFVIKKHELLNSTREDLQLDKPASGVKEEWYARITKLRKMVDQLFCKKFAEALGSTEAKAVPYQKFEAHPNDLYVEGLPENIPFRSPSWYGIPRLEKIIQVGNRIKFVIKRPELLTHSTTEVTQPRTNTPVKEDWNVRITKLRKQVEEIFNLKFAQALGLTEAVKVPYPVFESNPEFLYVEGLPEGIPFRSPTWFGIPRLERIVRGSNKIKFVVKKPELVISYLPPGMASKINTKALQSPKRPRSPGSNSKVPEIEVTVEGPNNNNPQTSAVRTPTQTNGSNVPFKPRGREFSFEAWNAKITDLKQKVENLFNEKCGEALGLKQAVKVPFALFESFPEDFYVEGLPEGVPFRRPSTFGIPRLEKILRNKAKIKFIIKKPEMFETAIKESTSSKSPPRKINSSPNVNTTASGVEDLNIIQVTIPDDDNERLSKVEKARQLREQVNDLFSRKFGEAIGMGFPVKVPYRKITINPGCVVVDGMPPGVSFKAPSYLEISSMRRILDSAEFIKFTVIRPFPGLVINNQLVDQSESEGPVIQESAEPSQLEVPATEEIKETDGSSQIKQEPDPTW

SEQ ID NO: 47521 - protein, 978 aa, Homo sapiens
MAQVAMSTLPVEDEESSESRMVVTFLMSALESMCKELAKSKAEVACIAVYETDVFVVGTERGRAFVNTRKDFQKDFVKYCVEEEEKAAEMHKMKSTTQANRMSVDAVEIETLRKTVEDYFCFCYGKALGKSTVVPVPYEKMLRDQSAVVVQGLPEGVAFKHPENYDLATLKWILENKAGISFIIKRPFLEPKKHVGGRVMVTDADRSILSPGGSCGPIKVKTEPTEDSGISLEMAAVTVKEESEDPDYYQYNIQGSHHSSEGNEGTEMEVPAEDSTQHVPSETSEDPEVEVTIEDDDYSPPSKRPKANELPQPPVPEPANAGKRKVREFNFEKWNARITDLRKQVEELFERKYAQAIKAKGPVTIPYPLFQSHVEDLYVEGLPEGIPFRRPSTYGIPRLERILLAKERIRFVIKKHELLNSTREDLQLDKPASGVKEEWYARITKLRKMVDQLFCKKFAEALGSTEAKAVPYQKFEAHPNDLYVEGLPENIPFRSPSWYGIPRLEKIIQVGNRIKFVIKRPELLTHSTTEVTQPRTNTPVKEDWNVRITKLRKQVEEIFNLKFAQALGLTEAVKVPYPVFESNPEFLYVEGLPEGIPFRSPTWFGIPRLERIVRGSNKIKFVVKKPELVISYLPPGMASKINTKALQSPKRPRSPGSNSKVPEIEVTVEGPNNNNPQTSAVRTPTQTNGSNVPFKPRGREFSFEAWNAKITDLKQKVENLFNEKCGEALGLKQAVKVPFALFESFPEDFYVEGLPEGVPFRRPSTFGIPRLEKILRNKAKIKFIIKKPEMFETAIKESTSSKSPPRKINSSPNVNTTASGVEDLNIIQVTIPDDDNERLSKVEKARQLREQVNDLFSRKFGEAIGMGFPVKVPYRKITINPGCVVVDGMPPGVSFKAPSYLEISSMRRILDSAEFIKFTVIRPFPGLVINNQLVDQSESEGPVIQESAEPSQLEVPATEEIKETDGSSQIKQEPDPTW

SEQ ID NO: 47522 - protein, 957 aa, Homo sapiens
MAQVAMSTLPVEDEESSESRMVVTFLMSALESMCKELAKSKAEVACIAVYETDVFVVGTERGRAFVNTRKDFQKDFVKYCVEEEEKAAEMHKMKSTTQANRMSVDAVEIETLRKTVEDYFCFCYGKALGKSTVVPVPYEKMLRDQSAVVVQGLPEGVAFKHPENYDLATLKWILENKAGISFIIKRPFLEPKKHVGGRVMVTDADRSILSPGGSCGPIKVKTEPTEDSGISLEMAAVTVKEESEDPDYYQYNIQGSHHSSEGNEGTEMEVPAEDDDYSPPSKRPKANELPQPPVPEPANAGKRKVREFNFEKWNARITDLRKQVEELFERKYAQAIKAKGPVTIPYPLFQSHVEDLYVEGLPEGIPFRRPSTYGIPRLERILLAKERIRFVIKKHELLNSTREDLQLDKPASGVKEEWYARITKLRKMVDQLFCKKFAEALGSTEAKAVPYQKFEAHPNDLYVEGLPENIPFRSPSWYGIPRLEKIIQVGNRIKFVIKRPELLTHSTTEVTQPRTNTPVKEDWNVRITKLRKQVEEIFNLKFAQALGLTEAVKVPYPVFESNPEFLYVEGLPEGIPFRSPTWFGIPRLERIVRGSNKIKFVVKKPELVISYLPPGMASKINTKALQSPKRPRSPGSNSKVPEIEVTVEGPNNNNPQTSAVRTPTQTNGSNVPFKPRGREFSFEAWNAKITDLKQKVENLFNEKCGEALGLKQAVKVPFALFESFPEDFYVEGLPEGVPFRRPSTFGIPRLEKILRNKAKIKFIIKKPEMFETAIKESTSSKSPPRKINSSPNVNTTASGVEDLNIIQVTIPDDDNERLSKVEKARQLREQVNDLFSRKFGEAIGMGFPVKVPYRKITINPGCVVVDGMPPGVSFKAPSYLEISSMRRILDSAEFIKFTVIRPFPGLVINNQLVDQSESEGPVIQESAEPSQLEVPATEEIKETDGSSQIKQEPDPTW

SEQ ID NO: 47523 - protein, 106 aa, Homo sapiens
MAQVAMSTLPVEDEESSESRMVVTFLMSALESMCKELAKSKAEVACIAVYETDVFVVGTERGRAFVNTRKDFQKDFVKYCVEEEEKAAEMHKMKSTTQANRMSVDA

SEQ ID NO: 47524 - protein, 274 aa, Homo sapiens
MAQVAMSTLPVEDEESSESRMVVTFLMSALESMCKELAKSKAEVACIAVYETDVFVVGTERGRAFVNTRKDFQKDFVKYCVEEEEKAAEMHKMKSTTQANRMSVDAVEIETLRKTVEDYFCFCYGKALGKSTVVPVPYEKMLRDQSAVVVQGLPEGVAFKHPENYDLATLKWILENKAGISFIIKRPFLEPKKHVGGRVMVTDADRSILSPGGSCGPIKVKTEPTEDSGISLEMAAVTVKEESEDPDYYQYNIQGSHHSSEGNEGTEMEVPAEG

SEQ ID NO: 47525 - protein, 993 aa, Homo sapiens
MSTLPVEDEESSESRMVVTFLMSALESMCKELAKSKAEVACIAVYETDVFVVGTERGRAFVNTRKDFQKDFVKYCVEEEEKAAEMHKMKSTTQANRMSVDAVEIETLRKTVEDYFCFCYGKALGKSTVVPVPYEKMLRDQSAVVVQGLPEGVAFKHPENYDLATLKWILENKAGISFIIKRPFLEPKKHVGGRVMVTDADRSILSPGGSCGPIKVKTEPTEDSGISLEMAAVTVKEESEDPDYYQYNIQAGPSETDDVDEKQPLSKPLQGSHHSSEGNEGTEMEVPAEDSTQHVPSETSEDPEVEVTIEDDDYSPPSKRPKANELPQPPVPEPANAGKRKVREFNFEKWNARITDLRKQVEELFERKYAQAIKAKGPVTIPYPLFQSHVEDLYVEGLPEGIPFRRPSTYGIPRLERILLAKERIRFVIKKHELLNSTREDLQLDKPASGVKEEWYARITKLRKMVDQLFCKKFAEALGSTEAKAVPYQKFEAHPNDLYVEGLPENIPFRSPSWYGIPRLEKIIQVGNRIKFVIKRPELLTHSTTEVTQPRTNTPVKEDWNVRITKLRKQVEEIFNLKFAQALGLTEAVKVPYPVFESNPEFLYVEGLPEGIPFRSPTWFGIPRLERIVRGSNKIKFVVKKPELVISYLPPGMASKINTKALQSPKRPRSPGSNSKVPEIEVTVEGPNNNNPQTSAVRTPTQTNGSNVPFKPRGREFSFEAWNAKITDLKQKVENLFNEKCGEALGLKQAVKVPFALFESFPEDFYVEGLPEGVPFRRPSTFGIPRLEKILRNKAKIKFIIKKPEMFETAIKESTSSKSPPRKINSSPNVNTTASGVEDLNIIQVTIPDDDNERLSKVEKARQLREQVNDLFSRKFGEAIGMGFPVKVPYRKITINPGCVVVDGMPPGVSFKAPSYLEISSMRRILDSAEFIKFTVIRPFPGLVINNQLVDQSESEGPVIQESAEPSQLEVPATEEIKETDGSSQIKQEPDPTW

SEQ ID NO: 47526 - protein, 213 aa, Homo sapiens
MAAAADERSPEDGEDEEEEEQLVLVELSGIIDSDFLSKCENKCKVLGIDTERPILQVDSCVFAGEYEDTLGTCVIFEENVEHADTEGNNKTVLKYKCHTMKKLSMTRTLLTEKKEGEENIGGVEWLQIKDNDFSYRPNMICNFLHENEDEEVVASAPDKSLELEEEEIQMNDSSNLSCEQEKPMHLEIEDSGPLIDIPSETEGSVFMETQMLP

SEQ ID NO: 47527 - protein, 705 aa, Homo sapiens
MATEGMILTNHDHQIRVGVLTVSDSCFRNLAEDRSGINLKDLVQDPSLLGGTISAYKIVPDEIEEIKATKEVIEREAPGMALAMLMGSLNVTPLGMLSRPVCGIRGKTLIINLPGSKKGSQECFQFILPALPHAIDLLRDAIVKVKEVHDELEDLPSPPPPLSPPPTTSPHKQTEDKGVQCEEEEEEKKDSGVASTEDSSSSHITAAAIAAKIPDSIISRGVQVLPRDTASLSTTPSESPRAQATSRLSTASCPTPKVQSRCSSKENILRASHSAVDITKVARRHRMSPFPLTSMDKAFITVLEMTPVLGTEIINYRDGMGRVLAQDVYAKDNLPPFPASVKDGYAVRAADGPGDRFIIGESQAGEQPTQTVMPGQVMRVTTGAPIPCGADAVVQVEDTELIRESDDGTEELEVRILVQARPGQDIRPIGHDIKRGECVLAKGTHMGPSEIGLLATVGVTEVEVNKFPVVAVMSTGNELLNPEDDLLPGKIRDSNRSTLLATIQEHGYPTINLGIVGDNPDDLLNALNEGISRADVIITSGGVSMGEKDYLKQVLDIDLHAQIHFGRVFMKPGLPTTFATLDIDGVRKIIFALPGNPVSAVVTCNLFVVPALRKMQGILDPRPTIIKARLSCDVKLDPRPEYHRCILTWHHQEPLPWAQSTGNQMSSRLMSMRSANGLLMLPPKTEQYVELHKGEVVDVMVIGRL

SEQ ID NO: 47528 - protein, 736 aa, Homo sapiens
MATEGMILTNHDHQIRVGVLTVSDSCFRNLAEDRSGINLKDLVQDPSLLGGTISAYKIVPDEIEEIKETLIDWCDEKELNLILTTGGTGFAPRDVTPEATKEVIEREAPGMALAMLMGSLNVTPLGMLSRPVCGIRGKTLIINLPGSKKGSQECFQFILPALPHAIDLLRDAIVKVKEVHDELEDLPSPPPPLSPPPTTSPHKQTEDKGVQCEEEEEEKKDSGVASTEDSSSSHITAAAIAAKIPDSIISRGVQVLPRDTASLSTTPSESPRAQATSRLSTASCPTPKVQSRCSSKENILRASHSAVDITKVARRHRMSPFPLTSMDKAFITVLEMTPVLGTEIINYRDGMGRVLAQDVYAKDNLPPFPASVKDGYAVRAADGPGDRFIIGESQAGEQPTQTVMPGQVMRVTTGAPIPCGADAVVQVEDTELIRESDDGTEELEVRILVQARPGQDIRPIGHDIKRGECVLAKGTHMGPSEIGLLATVGVTEVEVNKFPVVAVMSTGNELLNPEDDLLPGKIRDSNRSTLLATIQEHGYPTINLGIVGDNPDDLLNALNEGISRADVIITSGGVSMGEKDYLKQVLDIDLHAQIHFGRVFMKPGLPTTFATLDIDGVRKIIFALPGNPVSAVVTCNLFVVPALRKMQGILDPRPTIIKARLSCDVKLDPRPEYHRCILTWHHQEPLPWAQSTGNQMSSRLMSMRSANGLLMLPPKTEQYVELHKGEVVDVMVIGRL

SEQ ID NO: 47529 - protein, 769 aa, Homo sapiens
MATEGMILTNHDHQIRVGVLTVSDSCFRNLAEDRSGINLKDLVQDPSLLGGTISAYKIVPDEIEEIKETLIDWCDEKELNLILTTGGTGFAPRDVTPEATKEVIEREAPGMALAMLMGSLNVTPLGMLSRPVCGIRGKTLIINLPGSKKGSQECFQFILPALPHAIDLLRDAIVKVKEVHDELEDLPSPPPPLSPPPTTSPHKQTEDKGVQCEEEEEEKKDSGVASTEDSSSSHITAAAIAAKKHPFYTSPAVVMAHGEQPIPGLINYSHHSTDERIPDSIISRGVQVLPRDTASLSTTPSESPRAQATSRLSTASCPTPKVQSRCSSKENILRASHSAVDITKVARRHRMSPFPLTSMDKAFITVLEMTPVLGTEIINYRDGMGRVLAQDVYAKDNLPPFPASVKDGYAVRAADGPGDRFIIGESQAGEQPTQTVMPGQVMRVTTGAPIPCGADAVVQVEDTELIRESDDGTEELEVRILVQARPGQDIRPIGHDIKRGECVLAKGTHMGPSEIGLLATVGVTEVEVNKFPVVAVMSTGNELLNPEDDLLPGKIRDSNRSTLLATIQEHGYPTINLGIVGDNPDDLLNALNEGISRADVIITSGGVSMGEKDYLKQVLDIDLHAQIHFGRVFMKPGLPTTFATLDIDGVRKIIFALPGNPVSAVVTCNLFVVPALRKMQGILDPRPTIIKARLSCDVKLDPRPEYHRCILTWHHQEPLPWAQSTGNQMSSRLMSMRSANGLLMLPPKTEQYVELHKGEVVDVMVIGRL

SEQ ID NO: 47530 - protein, 300 aa, Homo sapiens [sequence omitted]

SEQ ID NO: 47531 - protein, 300 aa, Homo sapiens [sequence omitted]

SEQ ID NO: 47532 - protein, 242 aa, Homo sapiens
MEKTQETVQRILLEPYKYLLQLPGKQVRTKLSQAFNHWLKVPEDKLQIIIEVTEMLHNASLLIDDIEDNSKLRRGFPVAHSIYGIPSVINSANYVYFLGLEKVLTLDHPDAVKLFTRQLLELHQGQGLDIYWRDNYTCPTEEEYKAMVLQKTGGLFGLAVGLMQLFSDYKEDLKPLLNTLGLFFQIRDDYANLHSKEYSENKSFCEDLTEGKFSFPTIHAIWSRPESTQVQNILRQRTENID

SEQ ID NO: 47533 - protein, 300 aa, Homo sapiens [sequence omitted]

SEQ ID NO: 47534 - protein, 300 aa, Homo sapiens [sequence omitted]

SEQ ID NO: 47535 - protein, 230 aa, Homo sapiens
MEKTQETVQRILLEPYKYLLQLPGKQVRTKLSQAFNHWLKVPEDKLQIIIEVTEMLHNASLLIDDIEDNSKLRRGFPVAHSIYGIPSVINSANYVYFLGLEKVLTLDHPDAVKLFTRQLLELHQGQGLDIYWRDNYTCPTEEEYKAMVLQKTGGLFGLAVGLMQLFSDYKEDLKPLLNTLGLFFQIRDDYANLHSKEYSENKSFCEDLTEGKFSFPTIHAIWSRPESTQV

SEQ ID NO: 47536 - protein, 178 aa, Homo sapiens
MGNSLLRENRRQQNTQEMPWNVRMQSPKQRTSRCWDHHIAEGCFCLPWKKILIFEKRQDSQNENERMSSTPIQDNVDQTYSEELCYTLINHRVLCTRPSGNSAEEYYENVPCKAERPRESLGGTETEYSLLHMPSTDPRHARSPEDEYELLMPHRISSHFLQQPRPLMAPSETQFSHL

SEQ ID NO: 47537 - protein, 163 aa, Homo sapiens
MGNSLLRENRRQQNTQEMPWNVRMQSPKQRTSRKKILIFEKRQDSQNENERMSSTPIQDNVDQTYSEELCYTLINHRVLCTRPSGNSAEEYYENVPCKAERPRESLGGTETEYSLLHMPSTDPRHARSPEDEYELLMPHRISSHFLQQPRPLMAPSETQFSHL

SEQ ID NO: 47538 - protein, 180 aa, Homo sapiens
MGNSLLRENSFRRQQNTQEMPWNVRMQSPKQRTSRCWDHHIAEGCFCLPWKKILIFEKRQDSQNENERMSSTPIQDNVDQTYSEELCYTLINHRVLCTRPSGNSAEEYYENVPCKAERPRESLGGTETEYSLLHMPSTDPRHARSPEDEYELLMPHRISSHFLQQPRPLMAPSETQFSHL

SEQ ID NO: 47539 - protein, 116 aa, Homo sapiens
MPSPGTVCSLLLLGMLWLDLAMAGSSFLSPEHQRVQRKESKKPPAKLQPRALAGWLRPEDGGQAEGAEDELEVRFNAPFDVGIKLSGVQYQQHSQALGKFLQDILWEEAKEAPADK

SEQ ID NO: 47540 - protein, 117 aa, Homo sapiens
MPSPGTVCSLLLLGMLWLDLAMAGSSFLSPEHQRVQQRKESKKPPAKLQPRALAGWLRPEDGGQAEGAEDELEVRFNAPFDVGIKLSGVQYQQHSQALGKFLQDILWEEAKEAPADK

SEQ ID NO: 47541 - protein, 91 aa, Homo sapiens
MPSPGTVCSLLLLGMLWLDLAMAGSSFLSPEHQRVQQRKESKKPPAKLQPRALAGWLRPEDGGQAEGAEDELEVRRPQPTSDRPQALLTSL

SEQ ID NO: 47542 - protein, 33 aa, Homo sapiens
MPSPGTVCSLLLLGMLWLDLAMAGSSFLSPEHQ

SEQ ID NO: 47543 - protein, 117 aa, Homo sapiens; identical to SEQ ID NO: 47540

SEQ ID NO: 47544 - protein, 116 aa, Homo sapiens; identical to SEQ ID NO: 47539

SEQ ID NO: 47545 - protein, 105 aa, Homo sapiens
MFTCWWSYLRSTLAAVPGEASRVQQRKESKKPPAKLQPRALAGWLRPEDGGQAEGAEDELEVRFNAPFDVGIKLSGVQYQQHSQALGKFLQDILWEEAKEAPADK

SEQ ID NO: 47546 - protein, 66 aa, Homo sapiens
MFTCWWSYLRSTLAAVPGEASRVQFNAPFDVGIKLSGVQYQQHSQALGKFLQDILWEEAKEAPADK

SEQ ID NO: 47547 - protein, 104 aa, Homo sapiens
MFTCWWSYLRSTLAAVPGEASRVQRKESKKPPAKLQPRALAGWLRPEDGGQAEGAEDELEVRFNAPFDVGIKLSGVQYQQHSQALGKFLQDILWEEAKEAPADK

SEQ ID NO: 47548 - protein, 116 aa, Homo sapiens; identical to SEQ ID NO: 47539

SEQ ID NO: 47549 - protein, 117 aa, Homo sapiens; identical to SEQ ID NO: 47540

SEQ ID NO: 47550 - protein, 117 aa, Homo sapiens; identical to SEQ ID NO: 47540

SEQ ID NO: 47551 - protein, 597 aa, Homo sapiens
MAEGSAVSDPQHAARLLRALSSFREESRFCDAHLVLDGEEIPVQKNILAAASPYIRTKLNYNPPKDDGSTYKIELEGISVMVMREILDYIFSGQIRLNEDTIQDVVQAADLLLLTDLKTLCCEFLEGCIAAENCIGIRDFALHYCLHHVHYLATEYLETHFRDVSSTEEFLELSPQKLKEVISLEKLNVGNERYVFEAVIRWIAHDTEIRKVHMKDVMSALWVSGLDSSYLREQMLNEPLVREIVKECSNIPLSQPQQGEAMLANFKPRGYSECIVTVGGEERVSRKPTAAMRCMCPLYDPNRQLWIELAPLSMPRINHGVLSAEGFLFVFGGQDENKQTLSSGEKYDPDANTWTALPPMNEARHNFGIVEIDGMLYILGGEDGEKELISMECYDIYSKTWTKQPDLTMVRKIGCYAAMKKKIYAMGGGSYGKLFESVECYDPRTQQWTAICPLKERRFGAVACGVAMELYVFGGVRSREDAQGSEMVTCKSEFYHDEFKRWIYLNDQNLCIPASSSFVYGAVPIGASIYVIGDLDTGTNYDYVREFKRSTGTWHHTKPLLPSDLRRTGCAALRIANCKLFRLQLQQGLFRIRVHSP

SEQ ID NO: 47552 - protein, 196 aa, Homo sapiens
MFCEKAMELIRELHRAPEGQLPAFNEDGLRQVLEEMKALYEQNQSDVNEAKSGGRSDLIPTIKFRHCSLLRNRRCTVAYLYDRLLRIRALRWEYGSVLPNALRFHMAAEEMEWFNNYKRSLATYMRSLGGDEGLDITQDMKPPKSLYIEVRCLKDYGEFEVDDGTSVLLKKNSQHFLPRWKCEQLIRQGVLEHILS

SEQ ID NO: 47553 - protein, 165 aa, Homo sapiens
MFCEKAMELIRELHRAPEGQLPAFNEDGLRQVLEEMKALYEQNQSDVNEAKSGGRSDLIPTIKFRHCSLLRNRRCTVAYLYDRLLRIRALRWEYGSVLPNALRFHMAAEEMESRSVAQAGVQWCILCSLQLPPPGFKQFSCLSLPSSCDYRWSGLIIIKDLLLLI

SEQ ID NO: 47554 - protein, 185 aa, Homo sapiens
MDAAEVEFLAEKELVTIIPNFSLDKIYLIGGDLGPFNPGLPVEVPLWLAINLKQRQKCRLLPPEWMDVEKLEKMRDHERKEETFTPMPSPYYMELTKLLLNHASDNIPKADEIRTLVKDMWDTRIAKLRVSADSFVRQQEAHAKLDNLTLMEINTSGTFLTQALNHMYKLRTNLQPLESTQSQDF

SEQ ID NO: 47555 - protein, 216 aa, Homo sapiens
MSEAYFRVESGALGPEENFLSLDDILMSHEKLPVRTETAMPRLGAFFLERSAGAETDNAVPQGSKLELPLWLAKGLFDNKRRILSVELPKIYQEGWRTVFSADPNVVDLHKMGPHFYGFGSQLLHFDSPENADISQSLLQTFIGRFRRIMDSSQNAYNEDTSALVARLDEMERGLFQTGQKGLNDFQCWEKGQASQITASNLVQNYKKRKFTDMED

SEQ ID NO: 47556 - protein, 138 aa, Homo sapiens
MSEAYFRVESGALGPEENFLSLDDILMSHEKLPVRTETAMPRLGAFFLERSAGAETDNAVPQTFIGRFRRIMDSSQNAYNEDTSALVARLDEMERGLFQTGQKGLNDFQCWEKGQASQITASNLVQNYKKRKFTDMED

SEQ ID NO: 47557 - protein, 255 aa, Homo sapiens
MSEAYFRVESGALGPEENFLSLDDILMSHEKLPVRTETAMPRLGAFFLERSAGAETDNAVPQGFALLPRLECSGVIWLTAALTSQAPEILPPQPPMWLVLQGSKLELPLWLAKGLFDNKRRILSVELPKIYQEGWRTVFSADPNVVDLHKMGPHFYGFGSQLLHFDSPENADISQSLLQTFIGRFRRIMDSSQNAYNEDTSALVARLDEMERGLFQTGQKGLNDFQCWEKGQASQITASNLVQNYKKRKFTDMED

SEQ ID NO: 47558 - protein, 223 aa, Homo sapiens
MTEEVDFLGQDSDGGSEEVVLTPAELIERLEQAWMNEKFAPELLESKPEIVECVMEQLEHMEENLRRAKREDLKVSIHQMEMERIRYVLSSYLRCRLMKIEKFFPHVLEKEKTRPEGEPSSLSPEELAFAREFMANTESYLKNVALKHMPPNLQKVDLFRAVPKPDLDSYVFLRVRERQENILVEPDTDEQRDYVIDLEKGSQHLIRYKTIAPLVASGAVQLI

SEQ ID NO: 47559 - protein, 223 aa, Homo sapiens; identical to SEQ ID NO: 47558

SEQ ID NO: 47560 - protein, 100 aa, Homo sapiens
MTEEVDFLGQDSDGGSEEVVLTPAELIERLEQAWMNEKFAPELLESKPEIVECVMEQLEHMEENLRRAKREDLKVSIHQMEMERIRYVLSSYLRCRLMKV

SEQ ID NO: 47561 - protein, 312 aa, Homo sapiens
MEGAAAREARGTETPRASAPPPAPSEPPAAPRARPRLVFRTQLAHGSPTGKIEGFTNVRELYAKIAEAFGIAPTEILFCTLNSHKVDMQKLLGGQIGLEDFIFAHVRGETKEVEVTKTEDALGLTITDNGAGYAFIKRIKEGSIINRIEAVCVGDSIEAINDHSIVGCRHYEVAKMLRELPKSQPFTLRLVQPKRAFDMIGQRSRSSKCPVEAKVTSGRETLRLRSGGAATVEEAPSEFEEEASRKVDDLLESYMGIRDPELASTMVETSKKTASAQEFARCLDSVLGEFAFPDEFVVEVWAAIGEAREACG

SEQ ID NO: 47562 - protein, 698 aa, Homo sapiens
MPSEGRCWETLKALRSSDKGRLCYYRDWLLRREDVLEECMSLPKLSSYSGWVVEHVLPHMQENQPLSETSPSSTSASALDQPSFVPKSPDASSAFSPASPATPNGTKGKDESQHTESMVLQSSRGIKVEGCVRMYELVHRMKGTEGLRLWQEEQERKVQALSEMASEQLKRFDEWKELKQHKEFQDLREVMEKSSREALGHQEKLKAEHRHRAKILNLKLREAEQQRVKQAEQERLRKEEGQIRLRALYALQEEMLQLSQQLDASEQHKALLKVDLAAFQTRGNQLCSLISGIIRASSESSYPTAESQAEAERALREMRDLLMNLGQEITRACEDKRRQDEEEAQVKLQEAQMQQGPEAHKEPPAPSQGPGGKQNEDLQVKVQDITMQWYQQLQDASMQCVLTFEGLTNSKDSQAKKIKMDLQKAATIPVSQISTIAGSKLKEIFDKIHSLLSGKPVQSGGRSVSVTLNPQGLDFVQYKLAEKFVKQGEEEVASHHEAAFPIAVVASGIWELHPRVGDLILAHLHKKCPYSVPFYPTFKEGMALEDYQRMLGYQVKDSKVEQQDNFLKRMSGMIRLYAAIIQLRWPYGNRQEIHPHGLNHGWRWLAQILNMEPLSDVTATLLFDFLEVCGNALMKQYQVQFWKMLILIKEDYFPRIEAITSSGQMGSFIRLKQFLEKCLQHKDIPVPKGFLTSSFWRS

SEQ ID NO: 47563 - protein, 659 aa, Homo sapiens
MPSEGRCWETLKALRSSDKGRLCYYRDWLLRREDVLEECMSLPKLSSYSGWVVEHVLPHMQENQPLSETSPSSTSASALDQPSFVPKSPDASSAFSPASPATPNGTKGKDESQHTESMVLQSSRGIKVEGCVRMYELVHRMKGTEGLRLWQEEQERKVQALSEMASEQLKRFDEWKELKQHKEFQDLREVMEKSSREALGHQEKLKAEHRHRAKILNLKLREAEQQRVKQAEQERLRKEEGQIRLRALYALQEEMLQLSQQLDASEQHKALLKVDLAAFQTRGNQLCSLISGIIRASSESSYPTAESQAEAERALREMRDLLMNLGQEITRACEDKRRQDEEEAQVKLQEAQMQQGPEAHKEPPAPSQGPGGKQNEDLQVKVQDITMQWYQQLQDASMQCVLTFEGLTNSKDSQAKKIKMDLQKAATIPVSQISTIAGSKLKEIFDKIHSLLSGKPVQSGGRSVSVTLNPQGLDFVQYKLAEKFVKQGEEEVASHHEAAFPIAVVASGIWELHPRVGDLILAHLHKKCPYSVPFYPTFKEGMALEDYQRMLGYQVKDSKVEQQDNFLKRMSGMIRLYAAIIQLRWPYGNRQEIHPHGLNHGWRWLAQILNMEPLSDVTATLLFDFLEVCGNALMKQYQVQFWKMLILIKEDYFPRYQAC

SEQ ID NO: 47564 - protein, 444 aa, Homo sapiens
MLQLSQQLDASEQHKALLKVDLAAFQTRGNQLCSLISGIIRASSESSYPTAESQAEAERALREMRDLLMNLGQEITRACEDKRRQDEEEAQVKLQEAQMQQGPEAHKEPPAPSQGPGGKQNEDLQVKVQDITMQWYQQLQDASMQCVLTFEGLTNSKDSQAKKIKMDLQKAATIPVSQISTIAGSKLKEIFDKIHSLLSGKPVQSGGRSVSVTLNPQGLDFVQYKLAEKFVKQGEEEVASHHEAAFPIAVVASGIWELHPRVGDLILAHLHKKCPYSVPFYPTFKEGMALEDYQRMLGYQVKDSKVEQQDNFLKRMSGMIRLYAAIIQLRWPYGNRQEIHPHGLNHGWRWLAQILNMEPLSDVTATLLFDFLEVCGNALMKQYQVQFWKMLILIKEDYFPRIEAITSSGQMGSFIRLKQFLEKCLQHKDIPVPKGFLTSSFWRS

SEQ ID NO: 47565 - protein, 829 aa, Homo sapiens
MALTSINATPTQLSSSSNCLSDTNQNKQSSESAVSSTVNPVAIHKRSKVKTEPEGLRPASPLALTQGQVSGHGSCGCALPLSQEQLADLKEDLDRDDCKQEAEVVIYETNCHWEDCTKEYDTQEQLVHHINNEHIHGEKKEFVCRWQACTREQKPFKAQYMLVVHMRRHTGEKPHKCTFEGCSKAYSRLENLKTHLRSHTGEKPYVCEHEGCNKAFSNASDRAKHQNRTHSNEKPYICKIPGCTKRYTDPSSLRKHVKTVHGPDAHVTKKQRNDVHLRTPLLKENGDSEAGTEPGGPESTEASSTSQAVEDCLHVRAIKTESSGLCQSSPGAQSSCSSEPSPLGSAPNNDSGVEMPGTGPGSLGDLTALDDTPPGADTSALAAPSAGGLQLRKHMTTMHRFEQLKKEKLKSLKDSCSWAGPTPHTRNTKLPPLPGSGSILENFSGSGGGGPAGLLPNPRLSELSASEVTMLSQLQERRDSSTSTVSSAYTVSRRSSGISPYFSSRRSSEASPLGAGRPHNASSADSYDPISTDASRRSSEASQCSGGSGLLNLTPAQQYSLRAKYAAATGGPPPTPLPGLERMSLRTRLALLDAPERTLPAGCPRPLGPRRGSDGPTYGHGHAGAAPAFPHEAPGGGARRASDPVRRPDALSLPRVQRFHSTHNVNPGPLPPCADRRGLRLQSHPSTDGGLARGAYSPRPPSISENVAMEAVAAGVDGAGPEADLGLPEDDLVLPDDVVQYIKAHASGALDEGTGQVYPTESTGFSDNPRLPSPGLHGQRRMVAADSNVGPSAPMLGGCQLGFGAPSSLNKNNMPVQWNEASATWLSGT

SEQ ID NO: 47566 - protein, 1586 aa, Homo sapiens
METSASATASEKQEAKSGILEAAGFPDPGKKASPLVVAAAAAAAVAAQGVPQHLLPPFHAPLPIDMRHQEGRYHYEPHSVHGVHGPPALSGSPVISDISLIRLSPHPAGPGESPFNAPHPYVNPHMEHYLRSVHSSPTLSMISAARGLSPADVAQEHLKERGLFGLPAPGTTPSDYYHQMTLVAGHPAPYGDLLMQSGGAASAPHLHDYLNPVDVSRFSSPRVTPRLSRKRALSISPLSDASLDLQRMIRTSPNSLVAYINNSRSSSAASGSYGHLSAGALSPAFTFPHPINPVAYQQILSQQRGLGSAFGHTPPLIQPSPTFLAQQPMALTSINATPTQLSSSSNCLSDTNQNKQSSESAVSSTVNPVAIHKRSKVKTEPEGLRPASPLALTQGQVSGHGSCGCALPLSQEQLADLKEDLDRDDCKQEAEVVIYETNCHWEDCTKEYDTQEQLVHHINNEHIHGEKKEFVCRWQACTREQKPFKAQYMLVVHMRRHTGEKPHKCTFEGCSKAYSRLENLKTHLRSHTGEKPYVCEHEGCNKAFSNASDRAKHQNRTHSNEKPYICKIPGCTKRYTDPSSLRKHVKTVHGPDAHVTKKQRNDVHLRTPLLKENGDSEAGTEPGGPESTEASSTSQAVEDCLHVRAIKTESSGLCQSSPGAQSSCSSEPSPLGSAPNNDSGVEMPGTGPGSLGDLTALDDTPPGADTSALAAPSAGGLQLRKHMTTMHRFEQLKKEKLKSLKDSCSWAGPTPHTRNTKLPPLPGSGSILENFSGSGGGGPAGLLPNPRLSELSASEVTMLSQLQERRDSSTSTVSSAYTVSRRSSGISPYFSSRRSSEASPLGAGRPHNASSADSYDPISTDASRRSSEASQCSGGSGLLNLTPAQQYSLRAKYAAATGGPPPTPLPGLERMSLRTRLALLDAPERTLPAGCPRPLGPRRGSDGPTYGHGHAGAAPAFPHEAPGGGARRASDPVRRPDALSLPRVQRFHSTHNVNPGPLPPCADRRGLRLQSHPSTDGGLARGAYSPRPPSISENVAMEAVAAGVDGAGPEADLGLPEDDLVLPDDVVQYIKAHASGALDEGTGQVYPTESTGFSDNPRLPSPGLHGQRRMVAADSNVGPSAPMLGGCQLGFGAPSSLNKNNMPVQWNEVSSGTVDALASQVKPPPFPQGNLAVVQQKPAFGQYPGYSPQGLQASPGGLDSTQPHLQPRSGAPSQGIPRVNYMQQLRQPVAGSQCPGMTTTMSPHACYGQVHPQLSPSTISGALNQFPQSCSNMPAKPGHLGHPQQTEVAPDPTTMGNRHRELGVPDSALAGVPPPHPVQSYPQQSHHLAASMSQEGYHQVPSLLPARQPGFMEPQTGPMGVATAGFGLVQPRPPLEPSPTGRHRGVRAVQQQLAYARATGHAMAAMPSSQETAEAVPKGAMGNMGSVPPQPPPQDAGGAPDHSMLYYYGQIHMYEQDGGLENLGSCQVMRSQPPQPQACQDSIQPQPLPSPGVNQVSSTVDSQLLEAPQIDFDAIMDDGDHSSLFSGALSPSLLHSLSQNSSRLTTPRNSLTLPSIPAGISNMAVGDMSSMLTSLAEESKFLNMMT

SEQ ID NO: 47567 - protein, 82 aa, Homo sapiens
METSASATASEKQEAKSGILEAAGFPDPGKKASPLVVAAAAAAAVAAQGVPQHLLPPFHAPLPIDMRHQEGRYHYEPHSVHG

SEQ ID NO: 47568 - protein, 219 aa, Homo sapiens
METSASATASEKQEAKSGILEAAGFPDPGKKASPLVVAAAAAAAVAAQGVPQHLLPPFHAPLPIDMRHQEGRYHYEPHSVHGVHGVPFLQPAGDAPPEPQAGAVHLPTLRRQPGPAADDPHLTQLASGLHQQLPKQLGGQRFLRASVSGCPQPSLHLPPPHQPRGLPADSEPAEGSGVSLWTHTTPDPALTHLPGPAAHGPHLHQCHAHPAQQQQQLSE

SEQ ID NO: 47569 - protein, 1586 aa, Homo sapiens; identical to SEQ ID NO: 47566

SEQ ID NO: 47570 - protein, 1580 aa, Homo sapiens
MEAQSHSSTTTEKKKVENSIVKCSTRTDVSEKAVASSTTSNEDESPGQTYHRERRNAITMQPQNVQGLSKVSEEPSTSSDERASLIKKEIHGSLPHVAEPSVPYRGTVFAMDPRNGYMEPHYHPPHLFPAFHPPVPIDARHHEGRYHYDPSPIPPLHMTSALSSSPTYPDLPFIRISPHRNPTAASESPFSPPHPYINPYMDYIRSLHSSPSLSMISATRGLSPTDAPHAGVSPAEYYHQMALLTGQRSPYADIIPSAATAGTGAIHMEYLHAMDSTRFSSPRLSARPSRKRTLSISPLSDHSFDLQTMIRTSPNSLVTILNNSRSSSSASGSYGHLSASAISPALSFTYSSAPVSLHMHQQILSRQQSLGSAFGHSPPLIHPAPTFPTQRPIPGIPTVLNPVQVSSGPSESSQNKPTSESAVSSTGDPMHNKRSKIKPDEDLPSPGARGQQEQPEGTTLVKEEGDKDESKQEPEVIYETNCHWEGCAREFDTQEQLVHHINNDHIHGEKKEFVCRWLDCSREQKPFKAQYMLVVHMRRHTGEKPHKCTFEGCTKAYSRLENLKTHLRSHTGEKPYVCEHEGCNKAFSNASDRAKHQNRTHSNEKPYVCKIPGCTKRYTDPSSLRKHVKTVHGPEAHVTKKQRGDIHPRPPPPRDSGSHSQSRSPGRPTQGALGEQQDLSNTTSKREECLQVKTVKAEKPMTSQPSPGGQSSCSSQQSPISNYSNSGLELPLTDGGSIGDLSAIDETPIMDSTISTATTALALQARRNPAGTKWMEHVKLERLKQVNGMFPRLNPILPPKAPAVSPLIGNGTQSNNTCSLGGPMTLLPGRSDLSGVDVTMLNMLNRRDSSASTISSAYLSSRRSSGISPCFSSRRSSEASQAEGRPQNVSVADSYDPISTDASRRSSEASQSDGLPSLLSLTPAQQYRLKAKYAAATGGPPPTPLPNMERMSLKTRLALLGDALEPGVALPPVHAPRRCSDGGAHGYGRRHLQPHDAPGHGVRRASDPVRTGSEGLALPRVPRFSSLSSCNPPAMATSAEKRSLVLQNYTRPEGGQSRNFHSSPCPPSITENVTLESLTMDADANLNDEDFLPDDVVQYLNSQNQAGYEQHFPSALPDDSKVPHGPGDFDAPGLPDSHAGQQFHALEQPCPEGSKTDLPIQWNEVSSGSADLSSSKLKCGPRPAVPQTRAFGFCNGMVVHPQNPLRSGPAGGYQTLGENSNPYGGPEHLMLHNSPGSGTSGNAFHEQPCKAPQYGNCLNRQPVAPGALDGACGAGIQASKLKSTPMQGSGGQLNFGLPVAPNESAGSMVNGMQNQDPVGQGYLAHQLLGDSMQHPGAGRPGQQMLGQISATSHINIYQGPESCLPGAHGMGSQPSSLAVVRGYQPCASFGGSRRQAMPRDSLALQSGQLSDTSQTCRVNGIKMEMKGQPHPLCSNLQNYSGQFYDQTVGFSQQDTKAGSFSISDASCLLQGTSAKNSELLSPGANQVTSTVDSLDSHDLEGVQIDFDAIIDDGDHSSLMSGALSPSIIQNLSHSSSRLTTPRASLPFPALSMSTTNMAIGDMSSLLTSLAEESKFLAVMQ

SEQ ID NO: 47571 - protein, 180 aa, Homo sapiens
MEAQSHSSTTTEKKKVENSIVKCSTRTDVSEKAVASSTTSNEDESPGQTYHRERRNAITMQPQNVQGLSKVSEEPSTSSDERASLIKKEIHGSLPHVAEPSVPYRGTVFAMDPRNGYMEPHYHPPHLFPAFHPPVPIDARHHEGRYHYDPSPIPPLHMTSALSSSPTYPDLPFIRISPHR

SEQ ID NO: 47572 - protein, 376 aa, Homo sapiens
MAALGDIQESPSVPSPVSLSSPGTPGTQHHEPQLHLHGHQHGSPGSSPKVLSQPSDLDLQDVEEVEIGRDTFWPDSEPKPEQAPRSPGSQAPDEGAGGALRSLLRSLPRRARCSAGFGPESSAERPAGQPPGAVPCAQPRGAWRVTLVQQAAAGPEGAPERAAELGVNFGRSRQGSARGAKPHRCEACGKSFKYNSLLLKHQRIHTGEKPYACHECGKRFRGWSGFIQHHRIHTGEKPYECGQCGRAFSHSSHFTQHLRIHNGEKPYKCGECGQAFSQSSNLVRHQRLHTGEKPYACSQCGKAFIWSSVLIEHQRIHTGEKPYECSDCGKAFRGRSHFFRHLRTHTGEKPFACGACGKAFGQSSQLIQHQRVHYRE

SEQ ID NO: 47573 - protein, 376 aa, Homo sapiens; identical to SEQ ID NO: 47572

SEQ ID NO: 47574 - protein, 266 aa, Homo sapiens
MRVTLATIAWMVSFVSNYSHTANILPDIENEDFIKDCVRIHNKFRSEVKPTASDMLYMTWDPALAQIAKAWASNCQFSHNTRLKPPHKLHPNFTSLGENIWTGSVPIFSVSSAITNWYDEIQDYDFKTRICKKVCGHYTQVVWADSYKVGCAVQFCPKVSGFDALSNGAHFICNYGPGGNYPTWPYKRGATCSACPNNDKCLDNLCVNRQRDQVKRYYSVVYPGWPIYPRNRYTSLFLIVNSVILILSVIITILVQHKYPNLVLLD

SEQ ID NO: 47575 - protein, 142 aa, Homo sapiens
MSDSLVVCEVDPELTEKLRKFRFRKETDNAAIIMKVDKDRQMVVLEEEFQNISPEELKMELPERQPRFVVYSYKYVHDDGRVSYPLCFIFSSPVGCKPEQQMMYAGSKNRLVQTAELTKVFEIRTTDDLTEAWLQEKLSFFR

SEQ ID NO: 47576 - protein, 142 aa, Homo sapiens; identical to SEQ ID NO: 47575

SEQ ID NO: 47577 - protein, 432 aa, Homo sapiens
MERRRITSAARRSYVSSGEMMVGGLAPGRRLGPGTRLSLARMPPPLPTRVDFSLAGALNAGFKETRASERAEMMELNDRFASYIEKVRFLEQQNKALAAELNQLRAKEPTKLADVYQAELRELRLRLDQLTANSARLEVERDNLAQDLATVRQKLQDETNLRLEAENNLAAYRQEADEATLARLDLERKIESLEEEIRFLRKIHEEEVRELQEQLARQQVHVELDVAKPDLTAALKEIRTQYEAMASSNMHEAEEWYRSKFADLTDAAARNAELLRQAKHEANDYRRQLQSLTCDLESLRGTNESLERQMREQEERHVREAASYQEALARLEEEGQSLKDEMARHLQEYQDLLNVKLALDIEIATYRKLLEGEENRITIPVQTFSNLQIRETSLDTKSVSEGHLKRNIVVKTVEMRDGEVIKESKQEHKDVM

SEQ ID NO: 47578 - protein, 179 aa, Homo sapiens
MERRRITSAARRSYVSSGEMMVGGLAPGRRLGPGTRLSLARMPPPLPTRVDFSLAGALNAGFKETRASERAEMMELNDRFASYIEKVRFLEQQNKALAAELNQLRAKEPTKLADVYQAELRELRLRLDQLTANSARLEVERDNLAQDLATVRQKKQMKPPWPVWIWRGRLSRWRRRSGS

SEQ ID NO: 47579 - protein, 407 aa, Homo sapiens [sequence omitted]

SEQ ID NO: 47580 - protein, 431 aa, Homo sapiens
MERRRITSAARRSYVSSGEMMVGGLAPGRRLGPGTRLSLARMPPPLPTRVDFSLAGALNAGFKETRASERAEMMELNDRFASYIEKVRFLEQQNKALAAELNQLRAKEPTKLADVYQAELRELRLRLDQLTANSARLEVERDNLAQDLATVRQKLQDETNLRLEAENNLAAYRQEADEATLARLDLERKIESLEEEIRFLRKIHEEEVRELQEQLARQQVHVELDVAKPDLTAALKEIRTQYEAMASSNMHEAEEWYRSKFADLTDAAARNAELLRQAKHEANDYRRQLQSLTCDLESLRGTNESLERQMREQEERHVREAASYQEALARLEEEGQSLKDEMARHLQEYQDLLNVKLALDIEIATYRKLLEGEENRITIPVQTFSNLQIRGGKSTKDGENHKVTRYLKSLTIRVIPIQAHQIVNGTPPARG

SEQ ID NO: 47581 - protein, 438 aa, Homo sapiens
MERRRITSAARRSYVSSGEMMVGGLAPGRRLGPGTRLSLARMPPPLPTRVDFSLAGALNAGFKETRASERAEMMELNDRFASYIEKVRFLEQQNKALAAELNQLRAKEPTKLADVYQAELRELRLRLDQLTANSARLEVERDNLAQDLATVRQKLQDETNLRLEAENNLAAYRQEADEATLARLDLERKIESLEEEIRFLRKIHEEEVRELQEQLARQQVHVELDVAKPDLTAALKEIRTQYEAMASSNMHEAEEWYRSKFADLTDAAARNAELLRQAKHEANDYRRQLQSLTCDLESLRGTNESLERQMREQEERHVREAASYQEALARLEEEGQSLKDEMARHLQEYQDLLNVKLALDIEIATYRKLLEGEENRITIPVQTFSNLQIRGQYSRASWEGHWSPAPSSRACRLLQTGTEDQGKGIQLSLGAFVTLQRS

SEQ ID NO: 47582 - protein, 286 aa, Homo sapiens
MAARVLRARGAAWAGGLLQRAAPCSLLPRLRTWTSSSNRSREDSWLKSLFVRKVDPRKDAHSNLLAKKETSNLYKLQFHNVKPECLEAYNKICQEVLPKIHEDKHYPCTLVGTWNTWYGEQDQAVHLWRYEGGYPALTEVMNKLRENKEFLEFRKARSDMLLSRKNQLLLEFSFWNEPVPRSGPNIYELRSYQLRPGTMIEWGNYWARAIRFRQDGNEAVGGFFSQIGQLYMVHHLWAYRDLQTREDIRNAAWHKHGWEELVYYTVPLIQEMESRIMIPLKTSPLQ

SEQ ID NO: 47583 - protein, 247 aa, Homo sapiens
MAARVLRARGAAWAGGLLQRAAPCSLLPRLRTWTSSSNRSREDSWLKSLFVRKVDPRKDAHSNLLAKKETSNLYKLQFKRCCQRFTKINTTLVLWWGLGTRGMASRTKLEFLEFRKARSDMLLSRKNQLLLEFSFWNEPVPRSGPNIYELRSYQLRPGTMIEWGNYWARAIRFRQDGNEAVGGFFSQIGQLYMVHHLWAYRDLQTREDIRNAAWHKHGWEELVYYTVPLIQEMESRIMIPLKTSPLQ

SEQ ID NO: 47584 - protein, 1560 aa, Homo sapiens [sequence omitted]

SEQ ID NO: 47585 - protein, 478 aa, Homo sapiens
MAAGGSGVGGKRSSKSDADSGFLGLRPTSVDPALRRRRRGPRNKKRGWRRLAQEPLGLEVDQFLEDVRLQERTSGGLLSEAPNEKLFFVDTGSKEKGLTKKRTKVQKKSLLLKKPLRVDLILENTSKVPAPKDVLAHQVPNAKKLRRKEQLWEKLAKQGELPREVRRAQARLLNPSATRAKPGPQDTVERPFYDLWASDNPLDRPLVGQDEFFLEQTKKKGVKRPARLHTKPSQAPAVEVAPAGASYNPSFEDHQTLLSAAHEVELQRQKEAEKLERQLALPATEQAATQESTFQELCEGLLEESDGEGEPGQGEGPEAGDAEVCPTPARLATTEKKTEQQRRREKAVHRLRVQQAALRAARLRHQELFRLRGIKAQVALRLAELARRQRRRQARREAEADKPRRLGRLKYQAPDIDVQLSSELTDSLRTLKPEGNILRDRFKSFQRRNMIEPRERAKFKRKYKVKLVEKRAFREIQL

SEQ ID NO: 47586 - protein, 472 aa, Homo sapiens
MAAGGSGVGGKRSSKSDADSGFLGLRPTSVDPALRRRRRGPRNKKRGWRRLAQEPLGLEVDQFLEDVRLQERTSGGLLSEAPNEKLFFVDTGSKEKGLTKKRTKVQKKSLLLKKPLRVDLILENTSKVPAPKDVLAHQVPNAKKLRRKEQLWEKLAKQGELPREVRRAQARLLNPSATRAKPGPQDTVERPFYDLWASDNPLDRPLVGQDEFFLEQTKKKGVKRPARLHTKPSQAPAVEVAPAGASYNPSFEDHQTLLSAAHEVELQRQKEAEKLERQLALPATEQAATQESTFQELCEGLLEESDGEGEPGQGEGPEAGDAEVCPTPARHHREEDGAAAARRLCTGCGYSRPRCGPPGSGTRSCSGCAGSPGGPEAGGARRQRRRQARREAEADKPRRLGRLKYQAPDIDVQLSSELTDSLRTLKPEGNILRDRFKSFQRRNMIEPRERAKFKRKYKVKLVEKRAFREIQL

SEQ ID NO: 47587 - protein, 263 aa, Homo sapiens
MAAGGSGVGGKRSSKSDADSGFLGLRPTSVDPALRRRRRGPRNKKRGWRRLAQEPLGLEVDQFLEDVRLQERTSGGLLSEAPNEKLFFVDTGSKEKGLTKKRTKVQKKSLLLKKPLRVDLILENTSKVPAPKDVLAHQVPNAKKLRRKEQLWASDNPLDRPLVGQDEFFLEQTKKKGVKRREAEADKPRRLGRLKYQAPDIDVQLSSELTDSLRTLKPEGNILRDRFKSFQRRNMIEPRERAKFKRKYKVKLVEKRAFREIQL

SEQ ID NO: 47588 - protein, 551 aa, Homo sapiens
MARGAEGGRGDAGWGLRGALAAVALLSALNAAGTVFALCQWRGLSSALRALEAQRGREQREDSALRSFLAELSRAPRGASAPPQDPASSARNKRSHSGEPAPHIRAESHDMLMMMTYSMVPIRVMVDLCNSTKGICLTGPSGPPGPPGAGGLPGHNGLDGQPGPQGPKGEKGANGKRGKMGIPGAAGNPGERGEKGDHGELGLQGNEGPPGQKGEKGDKGDVSNDVLLAGAKGDQGPPGPPGPPGPPGPPGPPGSRRAKGPRQPSMFNGQCPGETCAIPNDDTLVGKADEKASEHHSPQAESMITSIGNPVQVLKVTETFGTWIRESANKSDDRIWVTEHFSGIMVKEFKDQPSLLNGSYTFIHLPYYFHGCGHVVYNNSLYYHKGGSNTLVRFEFGQETSQTLKLENALYFDRKYLFANSKTYFNLAVDEKGLWIIYASSVDGSSILVAQLDERTFSVVQHVNTTYPKSKAGNAFIARGILYVTDTKDMRVTFAFDLLGGKQINANFDLRTSQSVLAMLAYNMRDQHLYSWEDGHLMLYPVQFLSTTLNQ

SEQ ID NO: 47589 - protein, 427 aa, Homo sapiens
MVDLCNSTKGICLTGPSGPPGPPGAGGLPGHNGLDGQPGPQGPKGEKGANGKRGKMGIPGAAGNPGERGEKGDHGELGLQGNEGPPGQKGEKGDKGDVSNDVLLAGAKGDQGPPGPPGPPGPPGPPGPPGSRRAKGPRQPSMFNGQCPGETCAIPNDDTLVGKADEKASEHHSPQAESMITSIGNPVQVLKVTETFGTWIRESANKSDDRIWVTEHFSGIMVKEFKDQPSLLNGSYTFIHLPYYFHGCGHVVYNNSLYYHKGGSNTLVRFEFGQETSQTLKLENALYFDRKYLFANSKTYFNLAVDEKGLWIIYASSVDGSSILVAQLDERTFSVVQHVNTTYPKSKAGNAFIARGILYVTDTKDMRVTFAFDLLGGKQINANFDLRTSQSVLAMLAYNMRDQHLYSWEDGHLMLYPVQFLSTTLNQ

SEQ ID NO: 47590 - protein, 427 aa, Homo sapiens; identical to SEQ ID NO: 47589

SEQ ID NO: 47591 - protein, 524 aa, Homo sapiens
MHSLDEPLDLKLSITKLRAAREKRERTLGVVRPRALHRELGLVDDSPTPGSPGSPPSGFLLNSKFPEKVEGRFSAAPLVDLSLSPPSGLDSPNGSSSLSPERQGNGDLPPVPSASDFQPLRYLDGVPSSFQFFLPLGSGGALHLPASSFLTPPKDKCLSPDLPLPKQLVCRWAKCNQLFELLQDLVDHVNDYHVKPEKDAGYCCHWEGCARHGRGFNARYKMLIHIRTHTNEKPHRCPTCSKSFSRLENLKIHNRSHTGEKPYVCPYEGCNKRYSNSSDRFKHTRTHYVDKPYYCKMPGCHKRYTDPSSLRKHIKAHGHFVSHEQQELLQLRPPPKPPLPAPDGGPYVSGAQIIIPNPAALFGGPGLPGLPLPLAPGPLDLSALACGNGGGSGGGGGMGPGLPGPVLPLNLAKNPLLPSPFGAGGLGLPVVSLLAGAAGGKAEGEKGRGSVPTRALGMEGHKTPLERTESSCSRPSPDGLPLLPGTVLDLSTGVNSAASSPEALAPGWVVIPPGSVLLKPAVVN

SEQ ID NO: 47592 - protein, 524 aa, Homo sapiens; identical to SEQ ID NO: 47591

SEQ ID NO: 47593 - protein, 775 aa, Homo sapiens
MMVQRLGLISPPASQVSTACNQISPSLQRAMNAANLNIPPSDTRSLISRESLASTTLSLTESQSASSMKQEWSQGYRALPSLSNHGSQNGLDLGDLLSLPPGTSMSSNSVSNSLPSYLFGTESSHSPYPSPRHSSTRSHSARSKKRALSLSPLSDGIGIDFNTIIRTSPTSLVAYINGSRASPANLSPQPEVYGHFLGVRGSCIPQPRPVPGSQKGVLVAPGGLALPAYGEDGALEHERMQQLEHGGLQPGLVNHMVVQHGLPGPDSQSAGLFKTERLEEFPGSTVDLPPAPPLPPLPPPPGPPPPYHAHAHLHHPELGPHAQQLALPQATLDDDGEMDGIGGKHCCRWIDCSALYDQQEELVRHIEKVHIDQRKGEDFTCFWAGCPRRYKPFNARYKLLIHMRVHSGEKPNKCTFEGCEKAFSRLENLKIHLRSHTGEKPYLCQHPGCQKAFSNSSDRAKHQRTHLDTKPYACQIPGCTKRYTDPSSLRKHVKAHSSKEQQARKKLRSSTELHPDLLTDCLTVQSLQPATSPRDAAAEGTVGRSPGPGPDLYSAPIFSSNYSSRSGTAAGAVPPPHPVSHPSPGHNVQGSPHNPSSQLPPLTAVDAGAERFAPSAPSPHHISPRRVPAPSSILQRTQPPYTQQPSGSHLKSYQPETNSSFQPNGIHVHGFYGQLQKFCPPHYPDSQRIVPPVSSCSVVPSFEDCLVPTSMGQASFDVFHRAFSTHSGITVYDLPSSSSSLFGESLRSGAEDATFLQISTVDRCPSQLSSVYTEG

SEQ ID NO: 47594 - protein, 930 aa, Homo sapiens
MNGRSCSMSLHRTSGTPQGPRMVSGHHIPAIRAHSGTPGPSPCGSTSSPTMASLANNLHLKMPSGGGMAPQNNVAESRIHLPALSPRRQMLTNGKPRFQVTQAGGMSGSHTLKPKQQEFGSPFPPNPGKGALGFGPQCKSIGKGSCNNLVVTSSPMMVQRLGLISPPASQVSTACNQISPSLQRAMNAANLNIPPSDTRSLISRESLASTTLSLTESQSASSMKQEWSQGYRALPSLSNHGSQNGLDLGDLLSLPPGTSMSSNSVSNSLPSYLFGTESSHSPYPSPRHSSTRSHSARSKKRALSLSPLSDGIGIDFNTIIRTSPTSLVAYINGSRASPANLSPQPEVYGHFLGVRGSCIPQPRPVPGSQKGVLVAPGGLALPAYGEDGALEHERMQQLEHGGLQPGLVNHMVVQHGLPGPDSQSAGLFKTERLEEFPGSTVDLPPAPPLPPLPPPPGPPPPYHAHAHLHHPELGPHAQQLALPQATLDDDGEMDGIGGKHCCRWIDCSALYDQQEELVRHIEKVHIDQRKGEDFTCFWAGCPRRYKPFNARYKLLIHMRVHSGEKPNKCTFEGCEKAFSRLENLKIHLRSHTGEKPYLCQHPGCQKAFSNSSDRAKHQRTHLDTKPYACQIPGCTKRYTDPSSLRKHVKAHSSKEQQARKKLRSSTELHPDLLTDCLTVQSLQPATSPRDAAAEGTVGRSPGPGPDLYSAPIFSSNYSSRSGTAAGAVPPPHPVSHPSPGHNVQGSPHNPSSQLPPLTAVDAGAERFAPSAPSPHHISPRRVPAPSSILQRTQPPYTQQPSGSHLKSYQPETNSSFQPNGIHVHGFYGQLQKFCPPHYPDSQRIVPPVSSCSVVPSFEDCLVPTSMGQASFDVFHRAFSTHSGITVYDLPSSSSSLFGESLRSGAEDATFLQISTVDRCPSQLSSVYTEG

SEQ ID NO: 47595 - protein, 89 aa, Homo sapiens
MMVQRLGLISPPASQVSTACNQISPSLQRAMNAANLNIPPSDTRSLISRESLASTTLSLTESQSASSMKQEWSQGYRALPSLSNHGSQN

SEQ ID NO: 47596 - protein, 244 aa, Homo sapiens
MNGRSCSMSLHRTSGTPQGPRMVSGHHIPAIRAHSGTPGPSPCGSTSSPTMASLANNLHLKMPSGGGMAPQNNVAESRIHLPALSPRRQMLTNGKPRFQVTQAGGMSGSHTLKPKQQEFGSPFPPNPGKGALGFGPQCKSIGKGSCNNLVVTSSPMMVQRLGLISPPASQVSTACNQISPSLQRAMNAANLNIPPSDTRSLISRESLASTTLSLTESQSASSMKQEWSQGYRALPSLSNHGSQN

SEQ ID NO: 47597 - protein, 89 aa, Homo sapiens; identical to SEQ ID NO: 47595

SEQ ID NO: 47598 - protein, 89 aa, Homo sapiens; identical to SEQ ID NO: 47595

SEQ ID NO: 47599 - protein, 244 aa, Homo sapiens; identical to SEQ ID NO: 47596

SEQ ID NO: 47600 - protein, 72 aa, Homo sapiens
MHRRRLALGLGFCLLAGTSLSVLWVYLENWLPVSYVPYYLPCPEILLEYRGVISAHCNLHLPGSSNCHASAT

SEQ ID NO: 47601 - protein, 160 aa, Homo sapiens
MHRRRLALGLGFCLLAGTSLSVLWVYLENWLPVSYVPYYLPCPEILPMMMALSCLCHQQHEAALQEGEATPARGMVTVPSAQAAGAQAHTAADTHTLVGAHRLRGNLQPRASAAHLPATEPDHWGHGVCRGEVHSFHPVLPGVSRGVLHAWVPGALLHLH

SEQ ID NO: 47602 - protein, 347 aa, Homo sapiens
MHRRRLALGLGFCLLAGTSLSVLWVYLENWLPVSYVPYYLPCPEIFNMKLHYKREKPLQPVVWSQYPQPKLLEHRPTQLLTLTPWLAPIVSEGTFNPELLQHIYQPLNLTIGVTVFAVGKYTHFIQSFLESAEEFFMRGYRVHYYIFTDNPAAVPGVPLGPHRLLSSIPIQGHSHWEETSMRRMETISQHIAKRAHREVDYLFCLDVDMVFRNPWGPETLGDLVAAIHPSYYAVPRQQFPYERRRVSTAFVADSEGDFYYGGAVFGGQVARVYEFTRGCHMAILADKANGIMAAWREESHLNRHFISNKPSKVLSPEYLWDDRKPQPPSLKLIRFSTLDKDISCLRS

SEQ ID NO: 47603 - protein, 294 aa, Homo sapiens
MHRRRLALGLGFCLLAGTSLSVLWVYLENWLPVSYVPYYLPCPEIFNMKLHYKREKPLQPVVWSQYPQPKLLEHRPTQLLTLTPWLAPIVSEGTFNPELLQHIYQPLNLTIGVTVFAVGNPSWSQPRSSSCVGTGCTTTSSLTTLQPFPGSRWVPTGFSAPSPSRVTPTGRRHPCAGWRPSASTLLRGLTGRWTTSSALMWTWCFGTRGALRPWETWWLPFTQATTPFPASSSPMSAGVFPLPLWQTAKGTSIMVGQSSGGRWPGYMSLLGAATWPSWRTRPMASWLPGGRKAT

SEQ ID NO: 47604 - protein, 330 aa, Homo sapiens
MHRRRLALGLGFCLLAGTSLSVLWVYLENWLPVSYVPYYLPCPEILSQYPQPKLLEHRPTQLLTLTPWLAPIVSEGTFNPELLQHIYQPLNLTIGVTVFAVGKYTHFIQSFLESAEEFFMRGYRVHYYIFTDNPAAVPGVPLGPHRLLSSIPIQGHSHWEETSMRRMETISQHIAKRAHREVDYLFCLDVDMVFRNPWGPETLGDLVAAIHPSYYAVPRQQFPYERRRVSTAFVADSEGDFYYGGAVFGGQVARVYEFTRGCHMAILADKANGIMAAWREESHLNRHFISNKPSKVLSPEYLWDDRKPQPPSLKLIRFSTLDKDISCLRS

SEQ ID NO: 47605 - protein, 477 aa, Homo sapiens
MPPCQPQRPLLLLLLLLACQPQVPSAQVMDFLFEKWKLYGDQCHHNLSLLPPPTELVCNRTFDKYSCWPDTPANTTANISCPWYLPWHHKVQHRFVFKRCGPDGQWVRGPRGQPWRDASQCQMDGEEIEVQKEVAKMYSSFQVMYTVGYSLSLGALLLALAILGGLSKLHCTRNAIHANLFASFVLKASSVLVIDGLLRTRYSQKIGDDLSVSTWLSDGAVAGCRVAAVFMQYGIVANYCWLLVEGLYLHNLLGLATLPERSFFSLYLGIGWGAPMLFVVPWAVVKCLFENVQCWTSNDNMGFWWILRFPVFLAILINFFIFVRIVQLLVAKLRARQMHHTDYKFRLAKSTLTLIPLLGVHEVVFAFVTDEHAQGTLRSAKLFFDLFLSSFQGLLVAVLYCFLNKEVQSELRRRWHRWRLGKVLWEERNTSNHRASSSPGHGPPSKELQFGRGGGSQDSSAETPLAGGLPRLAESPF

SEQ ID NO: 47606 - protein, 463 aa, Homo sapiens
MAGAPGPLRLALLLLGMVGRAGPRPQGATVSLWETVQKWREYRRQCQRSLTEDPPPATDLFCNRTFDEYACWPDGEPGSFVNVSCPWYLPWASSVPQGHVYRFCTAEGLWLQKDNSSLPWRDLSECEESKRGERSSPEEQLLFLYIIYTVGYALSFSALVIASAILLGFRHLHCTRNYIHLNLFASFILRALSVFIKDAALKWMYSTAAQQHQWDGLLSYQDSLSCRLVFLLMQYCVAANYYWLLVEGVYLYTLLAFSVLSEQWIFRLYVSIGWGVPLLFVVPWGIVKYLYEDEGCWTRNSNMNYWLIIRLPILFAIGVNFLIFVRVICIVVSKLKANLMCKTDIKCRLAKSTLTLIPLLGTHEVIFAFVMDEHARGTLRFIKLFTELSFTSFQGLMVAILYCFVNNEVQLEFRKSWERWRLEHLHIQRDSSMKPLKCPTSSLSSGATAGSSMYTATCQASCS

SEQ ID NO: 47607 - protein, 553 aa, Homo sapiens
MKLGSSRAGPGRGSAGLLPGVHELPMGIPAPWGTSPLSFHRKCSLWAPGRPFLTLVLLVSIKQVTGSLLEETTRKWAQYKQACLRDLLKEPSGIFCNGTFDQYVCWPHSSPGNVSVPCPSYLPWWSEESSGRAYRHCLAQGTWQTIENATDIWQDDSECSENHSFKQNVDRYALLSTLQLMYTVGYSFSLISLFLALTLLLFLRKLHCTRNYIHMNLFASFILRTLAVLVKDVVFYNSYSKRPDNENGWMSYLSEMSTSCRSVQVLLHYFVGANYLWLLVEGLYLHTLLEPTVLPERRLWPRYLLLGWAFPVLFVVPWGFARAHLENTGCWTTNGNKKIWWIIRGPMMLCVTVNFFIFLKILKLLISKLKAHQMCFRDYKYRLAKSTLVLIPLLGVHEILFSFITDDQVEGFAKLIRLFIQLTLSSFHGFLVALQYGFANGEVKAELRKYWVRFLLARHSGCRACVLGKDFRFLGKCPKKLSEGDGAEKLRKLQPSLNSGRLLHLAMRGLGELGAQPQQDHARWPRGSSLSECSEGDVTMANTMEEILEESEI

SEQ ID NO: 47608 - protein, 350 aa, Homo sapiens
MGIPAPWGTSPLSFHRKCSLWAPGRPFLTLVLLVSIKQVTGSLLEETTRKWAQYKQACLRDLLKEPSGIFCNGTFDQYVCWPHSSPGNVSVPCPSYLPWWSEESSGRAYRHCLAQGTWQTIENATDIWQDDSECSENHSFKQNVDRYALLSTLQLMYTVGYSFSLISLFLALTLLLFLRKLHCTRNYIHMNLFASFILRTLAVLVKDVVFYNSYSKRPDNENGWMSYLSEMSTSCRSVQVLLHYFVGANYLWLLVEGLYLHTLLEPTVLPERRLWPRYLLLGWAFPVLFVVPWGFARAHLENTGCWTTNGNKKIWWIIRGPMMLCVTALGLEETGLKRNGSIPFGHKEDI

SEQ ID NO: 47609 - protein, 554 aa, Homo sapiens
MKLGSSRAGPGRGSAGLLPGVHELPMGIPAPWGTSPLSFHRKCSLWAPGRPFLTLVLLVSIKQVTGSLLEETTRKWAQYKQACLRDLLKEPSGIFCNGTFDQYVCWPHSSPGNVSVPCPSYLPWWSEESSGRAYRHCLAQGTWQTIENATDIWQDDSECSENHSFKQNVDRYALLSTLQLMYTVGYSFSLISLFLALTLLLFLRKLHCTRNYIHMNLFASFILRTLAVLVKDVVFYNSYSKRPDNENGWMSYLSEMSTSCRSVQVLLHYFVGANYLWLLVEGLYLHTLLEPTVLPERRLWPRYLLLGWAFPVLFVVPWGFARAHLENTGCWTTNGNKKIWWIIRGPMMLCVTVNFFIFLKILKLLISKLKAHQMCFRDYKYRLAKSTLVLIPLLGVHEILFSFITDDQVEGFAKLIRLFIQLTLSSFHGFLVALQYGFANGEVKAELRKYWVRFLLARHSGCRACVLGKDFRFLGKCPKKLSEGDGAEKLRKLQPSLNSGRLLHLAMRGLGELGAQPQQDHARWPRGSSLSECSEGDVTMANTMEEILEEKRSQ

SEQ ID NO: 47610 - protein, 228 aa, Homo sapiens
  VARIANT 1: note = MOD_RES - Any amino acid
XATDIWQDDSECSENHSFKQNVDRYALLSTLQLMYTVGYSFSLISLFLALTLLLFLRKLHCTRNYIHMNLFASFILRTLAVLVKDVVFYNSYSKRPDNENGWMSYLSEMSTSCRSVQVLLHYFVGANYLWLLVEGLYLHTLLEPTVLPERRLWPRYLLLGWAFPVLFVVPWGFARAHLENTGCWTTNGNKKIWWIIRGPMMLCVTALGLEETGLKRNGSIPFGHKEDI

SEQ ID NO: 47611 - protein, 547 aa, Homo sapiens
MSTASSSSSSSSSQTPHPPSQRMRRSAAGSPPAVAAAGSGNGAGGGGGVGCAPAAGAGRLLQPIRATVPYQLLRGSQHSPTRPPVAAAAASLGSLPGPGAARGPSPSSPTPPAAAAPAEQAPRAKGRPRRSPESHRRSSSPERRSPGSPVCRADKAKSQQVRTSSTIRRTSSLDTITGPYLTGQWPRDPHVHYPSCMKDKATQTPSCWAEEGAEKRSHQRSASWGSADQLKEQIAKLRQQLQRSKQSSRHSKEKDRQSPLHGNHITISHTQATGSRSVPMPLSNISVPKSSVSRVPCNVEGISPELEKVFIKENNGKEEVSKPLDIPDGRRAPLPAHYRSSSTRSIDTQTPSVQERSSSCSSHSPCVSPFCPPESQDGSPCSTEDLLYDRDKDSGSSSPLPKYASSPKPNNSYMFKREPPEGCERVKVFEEMASRQPISAPLFSCPDKNKVNFIPTGSAFCPVKLLGPLLPASDLMLKNSPNSGQSSALATLTVEQLSSRVSFTSLSDDTSTAGSMEASVQQPSQQQQLLQELQGEDHISAQNYVII

SEQ ID NO: 47612 - protein, 573 aa, Homo sapiens
MANAEVSVPVGDVVVVPTEGNEGENPEDTKTQVILQLQPVQQGLFIDGHFYNRIYEAGSENNTAVVAVETHTIHKIEEGIDTGTIEANEDMEIAYPITCGESKAILLWKKFVCPGINVKCVKFNDQLISPKHFVHLAGKSTLKDWKRAIRLGGIMLRKMMDSGQIDFYQHDKVCSNTCRSTKFDLLISSARAPVPGQQTSVVQTPTSADGSITQIAISEESMEEAGLEWNSALTAAVTMATEEGVKKDSEEISEDTLMFWKGIADVGLMEEVVCNIQKEIEELLRGVQQRLIQAPFQVTDAAVLNNVAHTFGLMDTVKKVLDNRRNQVEQGEEQFLYTLTDLERQLEEQKKQGQDHRLKSQTVQNVVLMPVSTPKPPKRPRLQRPASTTVLSPSPPVQQPQFTVISPITITPVGQSFSMGNIPVATLSQGSSPVTVHTLPSGPQLFRYATVVSSAKSSSPDTVTIHPSSSLALLSSTAMQDGSTLGNMTTMVSPVELVAMESGLTSAIQAVESTSEDGQTIIEIDPAPDPEAEDTEGKAVILETELRTEEKVVAEMEEHQHQVHNVEIVVLED

SEQ ID NO: 47613 - protein, 563 aa, Homo sapiens
MANAEVSVPVGDVVVVPTEGNEGENPEDTKTQVILQLQPVQQGIYEAGSENNTAVVAVETHTIHKIEEGIDTGTIEANEDMEIAYPITCGESKAILLWKKFVCPGINVKCVKFNDQLISPKHFVHLAGKSTLKDWKRAIRLGGIMLRKMMDSGQIDFYQHDKVCSNTCRSTKFDLLISSARAPVPGQQTSVVQTPTSADGSITQIAISEESMEEAGLEWNSALTAAVTMATEEGVKKDSEEISEDTLMFWKGIADVGLMEEVVCNIQKEIEELLRGVQQRLIQAPFQVTDAAVLNNVAHTFGLMDTVKKVLDNRRNQVEQGEEQFLYTLTDLERQLEEQKKQGQDHRLKSQTVQNVVLMPVSTPKPPKRPRLQRPASTTVLSPSPPVQQPQFTVISPITITPVGQSFSMGNIPVATLSQGSSPVTVHTLPSGPQLFRYATVVSSAKSSSPDTVTIHPSSSLALLSSTAMQDGSTLGNMTTMVSPVELVAMESGLTSAIQAVESTSEDGQTIIEIDPAPDPEAEDTEGKAVILETELRTEEKVVAEMEEHQHQVHNVEIVVLED

SEQ ID NO: 47614 - protein, 563 aa, Homo sapiens; identical to SEQ ID NO: 47613

SEQ ID NO: 47615 - protein, 360 aa, Homo sapiens
MLRRLPALAARRPPARRRRIYEAGSENNTAVVAVETHTIHKIEEGIDTGTIEANEDMEIAYPITCGESKAILLWKKFVCPGINVKCVKFNDQLISPKHFVHLAGKSTLKDWKRAIRLGGIMLRKMMDSGQIDFYQHDKVCSNTCRSTKFDLLISSARAPVPGQQTSVVQTPTSADGSITQIAISEESMEEAGLEWNSALTAAVTMATEEGVKKDSEEISEDTLMFWKGIADVGLMEEVVCNIQKEIEELLRGVQQRLIQAPFQVTDAAVLNNVAHTFGLMDTVKKVLDNRRNQVEQGEEQFLYTLTDLERQLEEQKKQGQDHRLKSQTVQNVVLMPVSTPKPPKRPRLQRPASTTVLSPS

SEQ ID NO: 47616 - protein, 530 aa, Homo sapiens
MATPDVSVHMEEVVVVTTPDTAVDGSGVEGVKTVLVTTNLAPHGGDLTEDNMETENAAAAAAAAFTASSQLKEAVLVKMAEEGENLEAEIVYPITCGDSRANLIWRKFVCPGINVKCVQYDEHVISPKEFVHLAGKSTLKDWKRAIRMNGIMLRKIMDSGELDFYQHDKVCSNTCRSTKIDLSGARVSLSSPTSAEYIPLTPAAADVNGSPATITIETCEDPGDWTAAIGDDTFTFWRGLKDAGLLDEVIQEFHQELVETMRGLQQRVQDPPLQLRDAVLLNNIVQNFGMLDLVKKVLASHKCQMDRSREQYARDLAALEQQCDEHRRRAKELKHKSQHLSNVLMTLTPVSLPPPVKRPRLARATSGPAAMASQVLTQSAQLALGPGVPVPQLTSVPLGKVVSTLPSTVLGKGSLQAPPASSPASPLLGGYTVLASSGSTYPSTVEIHPDASSLTVLSTAAVQDGSTVFKVVSPLQLLTLPGLGPTLQNVAQASPGSSTIVTVPAGAAPGPEEHTATIEVAAMAEDHERK

SEQ ID NO: 47617 - protein, 479 aa, Homo sapiens
METENAAAAAAAAFTASSQLKEAVLVKMAEEGENLEAEIVYPITCGDSRANLIWRKFVCPGINVKCVQYDEHVISPKEFVHLAGKSTLKDWKRAIRMNGIMLRKIMDSGELDFYQHDKVCSNTCRSTKIDLSGARVSLSSPTSAEYIPLTPAAADVNGSPATITIETCEDPGDWTAAIGDDTFTFWRGLKDAGLLDEVIQEFHQELVETMRGLQQRVQDPPLQLRDAVLLNNIVQNFGMLDLVKKVLASHKCQMDRSREQYARDLAALEQQCDEHRRRAKELKHKSQHLSNVLMTLTPVSLPPPVKRPRLARATSGPAAMASQVLTQSAQLALGPGVPVPQLTSVPLGKVVSTLPSTVLGKGSLQAPPASSPASPLLGGYTVLASSGSTYPSTVEIHPDASSLTVLSTAAVQDGSTVFKVVSPLQLLTLPGLGPTLQNVAQASPGSSTIVTVPAGAAPGPEEHTATIEVAAMAEDHERK

SEQ ID NO: 47618 - protein, 530 aa, Homo sapiens; identical to SEQ ID NO: 47616

SEQ ID NO: 47619 - protein, 466 aa, Homo sapiens
MAMDVTRSQAQTALTLVEQILAEFQLQEEDLKKVMRRMQKEMDRGLRLETHEEASVKMLPTYVRSTPEGSEVGDFLSLDLGGTNFRVMLVKVGEGEEGQWSVKTKHQMYSIPEDAMTGTAEMLFDYISECISDFLDKHQMKHKKLPLGFTFSFPVRHEDIDKGILLNWTKGFKASGAEGNNVVGLLRDAIKRRGDFEMDVVAMVNDTVATMISCYYEDHQCEVGMIVGTGCNACYMEEMQNVELVEGDEGRMCVNTEWGAFGDSGELDEFLLEYDRLVDESSANPGQQLYEKLIGGKYMGELVRLVLLRLVDENLLFHGEASEQLRTRGAFETRFVSQVESDTGDRKQIYNILSTLGLRPSTTDCDIVRRACESVSTRAAHMCSAGLAGVINRMRESRSEDVMRITVGVDGSVYKLHPSFKERFHASVRRLTPSCEITFIESEEGSGRGAALVSAVACKKACMLGQ

SEQ ID NO: 47620 - protein, 464 aa, Homo sapiens
MPRPRSQLPQPNSQVEQILAEFQLQEEDLKKVMRRMQKEMDRGLRLETHEEASVKMLPTYVRSTPEGSEVGDFLSLDLGGTNFRVMLVKVGEGEEGQWSVKTKHQMYSIPEDAMTGTAEMLFDYISECISDFLDKHQMKHKKLPLGFTFSFPVRHEDIDKGILLNWTKGFKASGAEGNNVVGLLRDAIKRRGDFEMDVVAMVNDTVATMISCYYEDHQCEVGMIVGTGCNACYMEEMQNVELVEGDEGRMCVNTEWGAFGDSGELDEFLLEYDRLVDESSANPGQQLYEKLIGGKYMGELVRLVLLRLVDENLLFHGEASEQLRTRGAFETRFVSQVESDTGDRKQIYNILSTLGLRPSTTDCDIVRRACESVSTRAAHMCSAGLAGVINRMRESRSEDVMRITVGVDGSVYKLHPSFKERFHASVRRLTPSCEITFIESEEGSGRGAALVSAVACKKACMLGQ

SEQ ID NO: 47621 - protein, 465 aa, Homo sapiens [sequence omitted]

SEQ ID NO: 47622 - protein, 625 aa, Homo sapiens
MPGTKRFQHVIETPEPGKWELSGYEAAVPITEKSNPLTQDLDKADAENIVRLLGQCDAEIFQEEGQALSTYQRLYSESILTTMVQVAGKVQEVLKEPDGGLVVLSGGGTSGRMAFLMSVSFNQLMKGLGQKPLYTYLIAGGDRSVVASREGTEDSALHGIEELKKVAAGKKRVIVIGISVGLSAPFVAGQMDCCMNNTAVFLPVLVGFNPVSMARNDPIEDWSSTFRQVAERMQKMQEKQKAFVLNPAIGPEGLSGSSRMKGGSATKILLETLLLAAHKTVDQGIAASQRCLLEILRTFERAHQVTYSQSPKIATLMKSVSTSLEKKGHVYLVGWQTLGIIAIMDGVECIHTFGADFRDVRGFLIGDHSDMFNQKAELTNQGPQFTFSQEDFLTSILPSLTEIDTVVFIFTLDDNLTEVQTIVEQVKEKTNHIQALAHSTVGQTLLIPLKKLFPSIISITWPLLFFEYEGNFIQKFQRELSTKWVLNTVSTGAHVLLGKILQNHMLDLRISNSKLFWRALAMLQRFSGQSKARCIESLLRAIHFPQPLSDDIRAAPISCHVQVAHEKEQVIPIALLSLLFRCSITEAQAHLAAAPSVCEAVRSALAGPGQKRTADPLEILEPDVQ

SEQ ID NO: 47623 - protein, 435 aa, Homo sapiens
MDCCMNNTAVFLPVLVGFNPVSMARNDPIEDWSSTFRQVAERMQKMQEKQKAFVLNPAIGPEGLSGSSRMKGGSATKILLETLLLAAHKTVDQGIAASQRCLLEILRTFERAHQVTYSQSPKIATLMKSVSTSLEKKGHVYLVGWQTLGIIAIMDGVECIHTFGADFRDVRGFLIGDHSDMFNQKAELTNQGPQFTFSQEDFLTSILPSLTEIDTVVFIFTLDDNLTEVQTIVEQVKEKTNHIQALAHSTVGQTLLIPLKKLFPSIISITWPLLFFEYEGNFIQKFQRELSTKWVLNTVSTGAHVLLGKILQNHMLDLRISNSKLFWRALAMLQRFSGQSKARCIESLLRAIHFPQPLSDDIRAAPISCHVQVAHEKEQVIPIALLSLLFRCSITEAQAHLAAAPSVCEAVRSALAGPGQKRTADPLEILEPDVQ

SEQ ID NO: 47624 - protein, 552 aa, Homo sapiens
MRLLPLAPGRLRRGSPRHLPSCSPALLLLVLGGCLGVFGVAAGTRRPNVVLLLTDDQDEVLGGMTPLKKTKALIGEMGMTFSSAYVPSALCCPSRASILTGKYPHNHHVVNNTLEGNCSSKSWQKIQEPNTFPAILRSMCGYQTFFAGKYLNEYGAPDAGGLEHVPLGWSYWYALEKNSKYYNYTLSINGKARKHGENYSVDYLTDVLANVSLDFLDYKSNFEPFFMMIATPAPHSPWTAAPQYQKAFQNVFAPRNKNFNIHGTNKHWLIRQAKTPMTNSSIQFLDNAFRKRWQTLLSVDDLVEKLVKRLEFTGELNNTYIFYTSDNGYHTGQFSLPIDKRQLYEFDIKVPLLVRGPGIKPNQTSKMLVANIDLGPTILDIAGYDLNKTQMDGMSLLPILRGASNLTWRSDVLVEYQGEGRNVTDPTCPSLSPGVSQCFPDCVCEDAYNNTYACVRTMSALWNLQYCEFDDQEVFVEVYNLTADPDQITNIAKTIDPELLGKMNYRLMMLQSCSGPTCRTPGVFDPGYRFDPRLMFSNRGSVRTRRFSKHLL

SEQ ID NO: 47625 - protein, 469 aa, Homo sapiens
MYVPSALCCPSRASILTGKYPHNHHVVNNTLEGNCSSKSWQKIQEPNTFPAILRSMCGYQTFFAGKYLNEYGAPDAGGLEHVPLGWSYWYALEKNSKYYNYTLSINGKARKHGENYSVDYLTDVLANVSLDFLDYKSNFEPFFMMIATPAPHSPWTAAPQYQKAFQNVFAPRNKNFNIHGTNKHWLIRQAKTPMTNSSIQFLDNAFRKRWQTLLSVDDLVEKLVKRLEFTGELNNTYIFYTSDNGYHTGQFSLPIDKRQLYEFDIKVPLLVRGPGIKPNQTSKMLVANIDLGPTILDIAGYDLNKTQMDGMSLLPILRGASNLTWRSDVLVEYQGEGRNVTDPTCPSLSPGVSQCFPDCVCEDAYNNTYACVRTMSALWNLQYCEFDDQEVFVEVYNLTADPDQITNIAKTIDPELLGKMNYRLMMLQSCSGPTCRTPGVFDPGYRFDPRLMFSNRGSVRTRRFSKHLL

SEQ ID NO: 47626 - protein, 532 aa, Homo sapiens
MRLLPLAPGRLRRGSPRHLPSCSPALLLLVLGGCLGVFGVAAGTRRPNVVLLLTDDQDEVLGGMYVPSALCCPSRASILTGKYPHNHHVVNNTLEGNCSSKSWQKIQEPNTFPAILRSMCGYQTFFAGKYLNEYGAPDAGGLEHVPLGWSYWYALEKNSKYYNYTLSINGKARKHGENYSVDYLTDVLANVSLDFLDYKSNFEPFFMMIATPAPHSPWTAAPQYQKAFQNVFAPRNKNFNIHGTNKHWLIRQAKTPMTNSSIQFLDNAFRKRWQTLLSVDDLVEKLVKRLEFTGELNNTYIFYTSDNGYHTGQFSLPIDKRQLYEFDIKVPLLVRGPGIKPNQTSKMLVANIDLGPTILDIAGYDLNKTQMDGMSLLPILRGASNLTWRSDVLVEYQGEGRNVTDPTCPSLSPGVSQCFPDCVCEDAYNNTYACVRTMSALWNLQYCEFDDQEVFVEVYNLTADPDQITNIAKTIDPELLGKMNYRLMMLQSCSGPTCRTPGVFDPGYRFDPRLMFSNRGSVRTRRFSKHLL

SEQ ID NO: 47627 - protein, 717 aa, Homo sapiens
MPIGDCSVAAKPRKQLLCSLFQTTLGYRARASGWKPMVICRGSHAFKDLINTYRMIEQDDFDINTRLHTIVRGEDEAAMVESVGLALVKLPDVLNRLKPDIMIVHGDRFDALALATSAALMNIRILHIEGGEVSGTIDDSIRHAITKLAHYHVCCTRSAEQHLISMCEDHDRILLAGCPSYDKLLSAKNKDYMSIIRMWLGDDVKSKDYIVALQHPVTTDIKHSIKMFELTLDALISFNKRTLVLFPNIDAGSKEMVRVMRKKGIEHHPNFRAVKHVPFDQFIQLVAHAGCMIGNSSCGVREVGAFGTPVINLGTRQIGRETGENVLHVRDADTQDKILQALHLQFGKQYPCSKIYGDGNAVPRILKFLKSIDLQEPLQKKFCFPPVKENISQDIDHILETLSALAVDLGGTNLRVAIVSMKGEIVKKYTQFNPKTYEERINLILQMCVEAAAEAVKLNCRILGVGISTGGRVNPREGIVLHSTKLIQEWNSVDLRTPLSDTLHLPVWVDNDGNCAALAERKFGQGKGLENFVTLITGTGIGGGIIHQHELIHGSSFCAAELGHLVVSLDGPDCSCGSHGCIEAYASGMALQREAKKLHDEDLLLVEGMSVPKDEAVGALHLIQAAKLGNAKAQSILRTAGTALGLGVVNILHTMNPSLVILSGVLASHYIHIVKDVIRQQALSSVQDVDVVVSDLVDPALLGAASMVLDYTTRRIY

SEQ ID NO: 47628 - protein, 722 aa, Homo sapiens
MEKNGNNRKLRVCVATCNRADYSKLAPIMFGIKTEPEFFELDVVVLGSHLIDDYGNTYRMIEQDDFDINTRLHTIVRGEDEAAMVESVGLALVKLPDVLNRLKPDIMIVHGDRFDALALATSAALMNIRILHIEGGEVSGTIDDSIRHAITKLAHYHVCCTRSAEQHLISMCEDHDRILLAGCPSYDKLLSAKNKDYMSIIRMWLGDDVKSKDYIVALQHPVTTDIKHSIKMFELTLDALISFNKRTLVLFPNIDAGSKEMVRVMRKKGIEHHPNFRAVKHVPFDQFIQLVAHAGCMIGNSSCGVREVGAFGTPVINLGTRQIGRETGENVLHVRDADTQDKILQALHLQFGKQYPCSKIYGDGNAVPRILKFLKSIDLQEPLQKKFCFPPVKENISQDIDHILETLSALAVDLGGTNLRVAIVSMKGEIVKKYTQFNPKTYEERINLILQMCVEAAAEAVKLNCRILGVGISTGGRVNPREGIVLHSTKLIQEWNSVDLRTPLSDTLHLPVWVDNDGNCAALAERKFGQGKGLENFVTLITGTGIGGGIIHQHELIHGSSFCAAELGHLVVSLDGPDCSCGSHGCIEAYASGMALQREAKKLHDEDLLLVEGMSVPKDEAVGALHLIQAAKLGNAKAQSILRTAGTALGLGVVNILHTMNPSLVILSGVLASHYIHIVKDVIRQQALSSVQDVDVVVSDLVDPALLGAASMVLDYTTRRIY

SEQ ID NO: 47629 - protein, 753 aa, Homo sapiens
METYGYLQRESCFQGPHELYFKNLSKRNKQIMEKNGNNRKLRVCVATCNRADYSKLAPIMFGIKTEPEFFELDVVVLGSHLIDDYGNTYRMIEQDDFDINTRLHTIVRGEDEAAMVESVGLALVKLPDVLNRLKPDIMIVHGDRFDALALATSAALMNIRILHIEGGEVSGTIDDSIRHAITKLAHYHVCCTRSAEQHLISMCEDHDRILLAGCPSYDKLLSAKNKDYMSIIRMWLGDDVKSKDYIVALQHPVTTDIKHSIKMFELTLDALISFNKRTLVLFPNIDAGSKEMVRVMRKKGIEHHPNFRAVKHVPFDQFIQLVAHAGCMIGNSSCGVREVGAFGTPVINLGTRQIGRETGENVLHVRDADTQDKILQALHLQFGKQYPCSKIYGDGNAVPRILKFLKSIDLQEPLQKKFCFPPVKENISQDIDHILETLSALAVDLGGTNLRVAIVSMKGEIVKKYTQFNPKTYEERINLILQMCVEAAAEAVKLNCRILGVGISTGGRVNPREGIVLHSTKLIQEWNSVDLRTPLSDTLHLPVWVDNDGNCAALAERKFGQGKGLENFVTLITGTGIGGGIIHQHELIHGSSFCAAELGHLVVSLDGPDCSCGSHGCIEAYASGMALQREAKKLHDEDLLLVEGMSVPKDEAVGALHLIQAAKLGNAKAQSILRTAGTALGLGVVNILHTMNPSLVILSGVLASHYIHIVKDVIRQQALSSVQDVDVVVSDLVDPALLGAASMVLDYTTRRIY

SEQ ID NO: 47630 - protein, 132 aa, Homo sapiens
MFELTLDALISFNKRTLVLFPNIDAGSKEMVRVMRKKGIEHHPNFRAVKHVPFDQFIQLVAHAGCMIGNSSCGVREVGALTRLYTYVSCYKHTHTHTHTHPSSSNPKLRSQKVIQSENRGKSYQEGLKYTFF

SEQ ID NO: 47631 - protein, 722 aa, Homo sapiens; identical to SEQ ID NO: 47628

SEQ ID NO: 47632 - protein, 648 aa, Homo sapiens
MEKNGNNRKLRVCVATCNRADYSKLAPIMFGIKTEPEFFELDVVVLGSHLIDDYGNTYRMIEQDDFDINTRLHTIVRGEDEAAMVESVGLALVKLPDVLNRLKPDIMIVHGDRFDALALATSAALMNIRILHIEGGEVSGTIDDSIRHAITKLAHYHVCCTRSAEQHLISMCEDHDRILLAGCPSYDKLLSAKNKDYMSIIRMWLGDDVKSKDYIVALQHPVTTDIKHSIKMFELTLDALISFNKRTLVLFPNIDAGSKEMVRVMRKKGIEHHPNFRAVKHVPFDQFIQLVAHAGCMIGNSSCGVREVGAFGTPVINLGTRQIGRETGENVLHVRDADTQDKILQALHLQFGKQYPCSKIYGDGNAVPRILKFLKSIDLQEPLQKKFCFPPVKENISQDIDHILETLSALAVDLGGTNLRVAIVSMKGEIVKKYTQFNPKTYEERINLILQMCVEAAAEAVKLNCRILGVGIGGGIIHQHELIHGSSFCAAELGHLVVSLDGPDCSCGSHGCIEAYASGMALQREAKKLHDEDLLLVEGMSVPKDEAVGALHLIQAAKLGNAKAQSILRTAGTALGLGVVNILHTMNPSLVILSGVLASHYIHIVKDVIRQQALSSVQDVDVVVSDLVDPALLGAASMVLDYTTRRIY

SEQ ID NO: 47633 - protein, 612 aa, Homo sapiens
MIEQDDFDINTRLHTIVRGEDEAAMVESVGLALVKLPDVLNRLKPDIMIVHGDRFDALALATSAALMNIRILHIEGGEVSGTIDDSIRHAITKLAHYHVCCTRSAEQHLISMCEDHDRILLAGCPSYDKLLSAKNKDYMSIIRMWLGSKEMVRVMRKKGIEHHPNFRAVKHVPFDQFIQLVAHAGCMIGNSSCGVREVGAFGTPVINLGTRQIGRETGENVLHVRDADTQDKILQALHLQFGKQYPCSKIYGDGNAVPRILKFLKSIDLQEPLQKKFCFPPVKENISQDIDHILETLSALAVDLGGTNLRVAIVSMKGEIVKKYTQFNPKTYEERINLILQMCVEAAAEAVKLNCRILGVGISTGGRVNPREGIVLHSTKLIQEWNSVDLRTPLSDTLHLPVWVDNDGNCAALAERKFGQGKGLENFVTLITGTGIGGGIIHQHELIHGSSFCAAELGHLVVSLDGPDCSCGSHGCIEAYASGMALQREAKKLHDEDLLLVEGMSVPKDEAVGALHLIQAAKLGNAKAQSILRTAGTALGLGVVNILHTMNPSLVILSGVLASHYIHIVKDVIRQQALSSVQDVDVVVSDLVDPALLGAASMVLDYTTRRIY

SEQ ID NO: 47634 - protein, 289 aa, Homo sapiens
MKLIILEHYSQASEWAAKYIRNRIIQFNPGPEKYFTLGLPTGSTPLGCYKKLIEYYKNGDLSFKYVKTFNMDEYVGLPRDHPESYHSFMWNNFFKHIDIHPENTHILDGNAVDLQAECDAFEEKIKAAGGIELFVGGIGPDGHIAFNEPGSSLVSRTRVKTLAMDTILANARFFDGELTKVPTMALTVGVGTVMDAREVMILITGAHKAFALYKAIEEGVNHMWTVSAFQQHPRTVFVCDEDATLELKVKTVKYFKGLMLVHNKLVDPLYSIKEKETEKSQSSKKPYSD

SEQ ID NO: 47635 - protein, 255 aa, Homo sapiens
MKLIILEHYSQASEWAAKYIRNRIIQFNPGPEKYFTLGLPTGLPRDHPESYHSFMWNNFFKHIDIHPENTHILDGNAVDLQAECDAFEEKIKAAGGIELFVGGIGPDGHIAFNEPGSSLVSRTRVKTLAMDTILANARFFDGELTKVPTMALTVGVGTVMDAREVMILITGAHKAFALYKAIEEGVNHMWTVSAFQQHPRTVFVCDEDATLELKVKTVKYFKGLMLVHNKLVDPLYSIKEKETEKSQSSKKPYSD

SEQ ID NO: 47636 - protein, 289 aa, Homo sapiens; identical to SEQ ID NO: 47634

SEQ ID NO: 47637 - protein, 138 aa, Homo sapiens
MKLIILEHYSQASEWAAKYIRNRIIQFNPGPEKYFTLGLPTGSTPLGCYKKLIEYYKNGDLSFKYVKTFNMDEYVGLPRDHPESYHSFMWNNFFKHIDIHPENTHILDGNAVDLQAECDAFEEKIKAAGGIELFVGGI

SEQ ID NO: 47638 - protein, 289 aa, Homo sapiens; identical to SEQ ID NO: 47634

SEQ ID NO: 47639 - protein, 29 aa, Homo sapiens
MKLIILEHYSQASEWAAKYIRNRIIQFNP

SEQ ID NO: 47640 - protein, 289 aa, Homo sapiens; identical to SEQ ID NO: 47634

SEQ ID NO: 47641 - protein, 161 aa, Homo sapiens
MKLIILEHYSQASEWAAKYIRNRIIQFNPGPEKYFTLGLPTGSTPLGCYKKLIEYYKNGDLSFKYVKTFNMDEYVGLPRDHPESYHSFMWNNFFKHIDIHPENTHILDGNAVDLQAECDAFEEKIKAAGGIELFVGGIGPDGHIAFNEPGSSLVSRTRVKT

SEQ ID NO: 47642 - protein, 212 aa, Homo sapiens
MKLIILEHYSQASEWAAKYIRNRIIQFNPGPEKYFTLGLPTGSTPLGCYKKLIEYYKNGDLSFKYVKTFNEPGSSLVSRTRVKTLAMDTILANARFFDGELTKVPTMALTVGVGTVMDAREVMILITGAHKAFALYKAIEEGVNHMWTVSAFQQHPRTVFVCDEDATLELKVKTVKYFKGLMLVHNKLVDPLYSIKEKETEKSQSSKKPYSD

SEQ ID NO: 47643 - protein, 276 aa, Homo sapiens
MRLVILDNYDLASEWAAKYICNRIIQFKPGQDRYFTLGLPTGSTPLGCYKKLIEYHKNGHLSFKYVKTFNMDEYVGLPRNHPESYHSYMWNNFFKHIDIDPNNAHILDGNAADLQAECDAFENKIKEAGGIDLFVGGIGPDGHIAFNEPGSSLVSRTRLKTLAMDTILANAKYFDGDLSKVPTMALTVGVGTVMDAREVMILITGAHKAFALYKAIEEGVNHMWTVSAFQQHPRTIFVCDEDATLELRVKTVKYFKGLMHVHNKLVDPLFSMKDGN

SEQ ID NO: 47644 - protein, 259 aa, Homo sapiens
MRLVILDNYDLASEWAAKYICNRIIQFKPGQDRYFTLGLPTGSTPLGCYKKLIEYHKNGHLSFKYVKTFNMDEYVGLPRNHPESYHSYMWNNFFKHIDIDPNNAHILDGNAADLQAECDAFENKIKEAGGIDLFVGGIGPDGHIAFNEPGSSLVSRTRLKTLAMDTILANAKYFDGDLSKVPTMALTVGVGTVMDAREVMILITGAHKAFALYKAIEEGVNHMWTVSAFQQHPRTIFVCDEDATLELRVKTVKYFKGEH

SEQ ID NO: 47645 - protein, 242 aa, Homo sapiens
MRLVILDNYDLASEWAAKYICNRIIQFKPGQDRYFTLGLPTGLPRNHPESYHSYMWNNFFKHIDIDPNNAHILDGNAADLQAECDAFENKIKEAGGIDLFVGGIGPDGHIAFNEPGSSLVSRTRLKTLAMDTILANAKYFDGDLSKVPTMALTVGVGTVMDAREVMILITGAHKAFALYKAIEEGVNHMWTVSAFQQHPRTIFVCDEDATLELRVKTVKYFKGLMHVHNKLVDPLFSMKDGN

SEQ ID NO: 47646 - protein, 428 aa, Homo sapiens
MLRTLLRRRLFSYPTKYYFMVLVLSLITFSVLRIHQKPEFVSVRHLELAGENPSSDINCTKVLQGDVNEIQKVKLEILTVKFKKRPRWTPDDYINMTSDCSSFIKRRKYIVEPLSKEEAEFPIAYSIVVHHKIEMLDRLLRAIYMPQNFYCIHVDTKSEDSYLAAVMGIASCFSNVFVASRLESVVYASWSRVQADLNCMKDLYAMSANWKYLINLCGMDFPIKTNLEIVRKLKLLMGENNLETERMPSHKEERWKKRYEVVNGKLTNTGTVKMLPPLETPLFSGSAYFVVSREYVGYVLQNEKIQKLMEWAQDTYSPDEYLWATIQRIPEVPGSLPASHKYDLSDMQAVARFVKWQYFEGDVSKGAPYPPCDGVHVRSVCIFGAGDLNWMLRKHHLFANKFDVDVDLFAIQCLDEHLRHKALETLKH

SEQ ID NO: 47647 - protein, 428 aa, Homo sapiens; identical to SEQ ID NO: 47646

SEQ ID NO: 47648 - protein, 428 aa, Homo sapiens; identical to SEQ ID NO: 47646

SEQ ID NO: 47649 - protein, 428 aa, Homo sapiens; identical to SEQ ID NO: 47646

SEQ ID NO: 47650 - protein, 402 aa, Homo sapiens
MNFWRYCFFAFTLLSVVIFVRFYSSQLSPPKSYEKLNSSSERYFRKTACNHALEKMPVFLWENILPSPLRSVPCKDYLTQNHYITSPLSEEEAAFPLAYVMVIHKDFDTFERLFRAIYMPQNVYCVHVDEKAPAEYKESVRQLLSCFQNAFIASKTESVVYAGISRLQADLNCLKDLVASEVPWKYVINTCGQDFPLKTNREIVQHLKGFKGKNITPGVLPPDHAIKRTKYVHQEHTDKGGFFVKNTNILKTSPPHQLTIYFGTAYVALTRDFVDFVLRDQRAIDLLQWSKDTYSPDEHFWVTLNRVSGVPGSMPNASWTGNLRAIKWSDMEDRHGGCHGHYVHGICIYGNGDLKWLVNSPSLFANKFELNTYPLTVECLELRHRERTLNQSETAIQPSWYF

SEQ ID NO: 47651 - protein, 400 aa, Homo sapiens
MPLSMRYLFIISVSSVIIFIVFSVFNFGGDPSFQRLNISDPLRLTQVCTSFINGKTRFLWKNKLMIHEKSSCKEYLTQSHYITAPLSKEEADFPLAYIMVIHHHFDTFARLFRAIYMPQNIYCVHVDEKATTEFKDAVEQLLSCFPNAFLASKMEPVVYGGISRLQADLNCIRDLSAFEVSWKYVINTCGQDFPLKTNKEIVQYLKGFKGKNITPGVLPPAHAIGRTKYVHQEHLGKELSYVIRTTALKPPPPHNLTIYFGSAYVALSREFANFVLHDPRAVDLLQWSKDTFSPDEHFWVTLNRIPGVPGSMPNASWTGNLRAIKWSDMEDRHGGCHGHYVHGICIYGNGDLKWLVNSPSLFANKFELNTYPLTVECLELRHRERTLNQSETAIQPSWYF

SEQ ID NO: 47652 - protein, 402 aa, Homo sapiens
MMGSWKHCLFSASLISALIFVFVYNTELWENKRFLRAALSNASLLAEACHQIFEGKVFYPTENALKTTLDEATCYEYMVRSHYVTETLSEEEAGFPLAYTVTIHKDFGTFERLFRAIYMPQNVYCVHLDQKATDAFKGAVKQLLSCFPNAFLASKKESVVYGGISRLQADLNCLEDLVASEVPWKYVINTCGQDFPLKTNREIVQYLKGFKGKNITPGVLPPDHAVGRTKYVHQELLNHKNSYVIKTTKLKTPPPHDMVIYFGTAYVALTRDFANFVLQDQLALDLLSWSKDTYSPDEHFWVTLNRIPGVPGSMPNASWTGNLRAIKWSDMEDRHGGCHGHYVHGICIYGNGDLKWLVNSPSLFANKFELNTYPLTVECLELRHRERTLNQSETAIQPSWYF

SEQ ID NO: 47653 - protein, 402 aa, Homo sapiens; identical to SEQ ID NO: 47652

SEQ ID NO: 47654 - protein, 438 aa, Homo sapiens
MVQWKRLCQLHYLWALGCYMLLATVALKLSFRLKCDSDHLGLESRESQSQYCRNILYNFLKLPAKRSINCSGVTRGDQEAVLQAILNNLEVKKKREPFTDTHYLSLTRDCEHFKAERKFIQFPLSKEEVEFPIAYSMVIHEKIENFERLLRAVYAPQNIYCVHVDEKSPETFKEAVKAIISCFPNVFIASKLVRVVYASWSRVQADLNCMEDLLQSSVPWKYFLNTCGTDFPIKSNAEMVQALKMLNGRNSMESEVPPKHKETRWKYHFEVVRDTLHLTNKKKDPPPYNLTMFTGNAYIVASRDFVQHVLKNPKSQQLIEWVKDTYSPDEHLWATLQRARWMPGSVPNHPKYDISDMTSIARLVKWQGHEGDIDKGAPYAPCSGIHQRAICVYGAGDLNWMLQNHHLLANKFDPKVDDNALQCLEEYLRYKAIYGTEL

SEQ ID NO: 47655 - protein, 87 aa, Homo sapiens
MVQWKRLCQLHYLWALGCYMLLATVALKLSFRLKCDSDHLGLESRESQSQYCRNILYNFLKLPAKRSINCSGVTRGDQEAVLQAILN

SEQ ID NO: 47656 - protein, 153 aa, Homo sapiens
MVQWKRLCQLHYLWALGCYMLLATVALKLSFRLKCDSDHLGLESRESQSQYCRNILYNFLKLPAKRSINCSGVTRGDQEAVLQAILNNLEVKKKREPFTDTHYLSLTRDCEHFKAERKFIQFPLSKEEVEFPIAYSMVIHEKIENFERLLRAV

SEQ ID NO: 47657 - protein, 53 aa, Homo sapiens
MVQWKRLCQLHYLWALGCYMLLATVALKLSFRLKCDSDHLGLESRESQSQYCR

SEQ ID NO: 47658 - protein, 438 aa, Homo sapiens; identical to SEQ ID NO: 47654

SEQ ID NO: 47659 - protein, 346 aa, Homo sapiens
MESTLGAGIVIAEALQNQLAWLENVWLWITFLGDPKILFLFYFPAAYYASRRVGIAVLWISLITEWLNLIFKWFLFGDRPFWWVHESGYYSQAPAQVHQFPSSCETGPGSPSGHCMITGAALWPIMTALSSQVATRARSRWVRVMPSLAYCTFLLAVGLSRIFILAHFPHQVLAGLITGAVLGWLMTPRVPMERELSFYGLTALALMLGTSLIYWTLFTLGLDLSWSISLAFKWCERPEWIHVDSRPFASLSRDSGAALGLGIALHSPCYAQVRRAQLGNGQKIACLVLAMGLLGPLDWLGHPPQISLFYIFNFLKYTLWPCLVLALVPWAVHMFSAQEAPPIHSS

SEQ ID NO: 47660 - protein, 154 aa, Homo sapiens
MDFLHRNGVLIIQHLQKDYRAYYTFLNFMSNVGDPRNIFFIYFPLCFQFNQTVGTKMIWVAVIGDWLNLIFKWILFGHRPYWWVQETQIYPNHSSPCLEQFPTTCETGPGSPSGHAMGASCVWYVMVTAALSHTVCGMDKFSITLHRHAGGRGL

SEQ ID NO: 47661 - protein, 355 aa, Homo sapiens
MDFLHRNGVLIIQHLQKDYRAYYTFLNFMSNVGDPRNIFFIYFPLCFQFNQTVGTKMIWVAVIGDWLNLIFKWILFGHRPYWWVQETQIYPNHSSPCLEQFPTTCETGPGSPSGHAMGASCVWYVMVTAALSHTVCGMDKFSITLHRLTWSFLWSVFWLIQISVCISRVFIATHFPHQVILGVIGGMLVAEAFEHTPGIQTASLGTYLKTNLFLFLFAVGFYLLLRVLNIDLLWSVPIAKKWCANPDWIHIDTTPFAGLVRNLGVLFGLGFAINSEMFLLSCRGGNNYTLSFRLLCALTSLTILQLYHFLQIPTHEEHLFYVLSFCKSASIPLTVVAFIPYSVHMLMKQSGKKSQ

SEQ ID NO: 47662 - protein, 558 aa, Homo sapiens
MAALTRDPQFQKLQQWYREHRSELNLRRLFDANKDRFNHFSLTLNTNHGHILVDYSKNLVTEDVMRMLVDLAKSRGVEAARERMFNGEKINYTEGRAVLHVALRNRSNTPILVDGKDVMPEVNKVLDKMKSFCQRVRSGDWKGYTGKTITDVINIGIGGSDLGPLMVTEALKPYSSGGPRVWYVSNIDGTHIAKTLAQLNPESSLFIIASKTFTTQETITNAETAKEWFLQAAKDPSAVAKHFVALSTNTTKVKEFGIDPQNMFEFWDWVGGRYSLWSAIGLSIALHVGFDNFEQLLSGAHWMDQHFRTTPLEKNAPVLLALLGIWYINCFGCETHAMLPYDQYLHRFAAYFQQGDMESNGKYITKSGTRVDHQTGPIVWGEPGTNGQHAFYQLIHQGTKMIPCDFLIPVQTQHPIRKGLHHKILLANFLAQTEALMRGKSTEEARKELQAAGKSPEDLERLLPHKVFEGNRPTNSIVFTKLTPFMLGALVAMYEHKIFVQGIIWDINSFDQWGVELGKQLAKKIEPELDGSAQVTSHDASTNGLINFIKQQREARVQ

SEQ ID NO: 47663 - protein, 520 aa, Homo sapiens
SRHGRSHPGPPVPEAAAMVPRAPLRAEPAPPLRCQQGPLQPLQVRAGRRRGLPRAAPGTGHAGLGSGGGGSGARGPQSPTSRPRTGAQAESALRPWSLLGVRSWGLAASPGVSAPGLLRYEEKRAPPWGHFPSSSPCSSGHLSRGSFRSCEERPWLTQQAGKGCPFPSAPGHMSLGASAGRAARAGVFEGAGWKDGDVGRDSCRRHLCTTGKWEGVFEQIMGGSAAKGALITDTGGGGGGERLWLRARRPDGHPCHLDGCLSNLRQKVEALGRGGPPLQSGLLIQGLPASTVCEDGFFLWAAVADHPGGPAGDRHHHCAGWPRPLWGVGQGGCFFWEQLLLRAWLPARETRVWSAASPSFCSLTLNTNHGHILVDYSKNLVTEDVMRMLVDLAKSRGVEAARERMFNGEKINYTEVSRPHIPSGASFLPFGVYLTVSRITLCLHPFSWAMLLLNEGPEGLFPPACSRALGCAFHKIGLVSSLEWFPVSAWEEHISYPQGEFLKADIFLEKLTLIYPQCKF

SEQ ID NO: 47664 - protein, 569 aa, Homo sapiens
MVALCSLQHLGSSDPRALPTLPTATSGQRPAKRRRKSPAMAALTRDPQFQKLQQWYREHRSELNLRRLFDANKDRFNHFSLTLNTNHGHILVDYSKNLVTEDVMRMLVDLAKSRGVEAARERMFNGEKINYTEGRAVLHVALRNRSNTPILVDGKDVMPEVNKVLDKMKSFCQGPLMVTEALKPYSSGGPRVWYVSNIDGTHIAKTLAQLNPESSLFIIASKTFTTQETITNAETAKEWFLQAAKDPSAVAKHFVALSTNTTKVKEFGIDPQNMFEFWDWVGGRYSLWSAIGLSIALHVGFDNFEQLLSGAHWMDQHFRTTPLEKNAPVLLALLGIWYINCFGCETHAMLPYDQYLHRFAAYFQQGDMESNGKYITKSGTRVDHQTGPIVWGEPGTNGQHAFYQLIHQGTKMIPCDFLIPVQTQHPIRKGLHHKILLANFLAQTEALMRGKSTEEARKELQAAGKSPEDLERLLPHKVFEGNRPTNSIVFTKLTPFMLGALVAMYEHKIFVQGIIWDINSFDQWGVELGKQLAKKIEPELDGSAQVTSHDASTNGLINFIKQQREARVQ

SEQ ID NO: 47665 - protein, 966 aa, Homo sapiens
MAAVAAVAARRRRSWASLVLAFLGVCLGITLAVDRSNFKTCEESSFCKRQRSIRPGLSPYRALLDSLQLGPDSLTVHLIHEVTKVLLVLELQGLQKNMTRFRIDELEPRRPRYRVPDVLVADPPIARLSVSGRDENSVELTMAEGPYKIILTARPFRLDLLEDRSLLLSVNARGLLEFEHQRAPRVSFSDKVNLTLGSIWDKIKNLFSRQGSKDPAEGDGAQPEETPRDGDKPEETQGKAEKDEPGAWEETFKTHSDSKPYGPMSVGLDFSLPGMEHVYGIPEHADNLRLKVTEGGEPYRLYNLDVFQYELYNPMALYGSVPVLLAHNPHRDLGIFWLNAAETWVDISSNTAGKTLFGKMMDYLQGSGETPQTDVRWMSETGIIDVFLLLGPSISDVFRQYASLTGTQALPPLFSLGYHQSRWNYRDEADVLEVDQGFDDHNLPCDVIWLDIEHADGKRYFTWDPSRFPQPRTMLERLASKRRKLVAIVDPHIKVDSGYRVHEELRNLGLYVKTRDGSDYEGWCWPGSAGYPDFTNPTMRAWWANMFSYDNYEGSAPNLFVWNDMNEPSVFNGPEVTMLKDAQHYGGWEHRDVHNIYGLYVHMATADGLRQRSGGMERPFVLARAFFAGSQRFGAVWTGDNTAEWDHLKISIPMCLSLGLVGLSFCGADVGGFFKNPEPELLVRWYQMGAYQPFFRAHAHLDTGRREPWLLPSQHNDIIRDALGQRYSLLPFWYTLLYQAHREGIPVMRPLWVQYPQDVTTFNIDDQYLLGDALLVHPVSDSGAHGVQVYLPGQGEVWYDIQSYQKHHGPQTLYLPVTLSSIPVFQRGGTIVPRWMRVRRSSECMKDDPITLFVALSPQGTAQGELFLDDGHTFNYQTRQEFLLRRFSFSGNTLVSSSADPEGHFETPIWIERVVIIGAGKPAAVVLQTKGSPESRLSFQHDPETSVLVLRKPGINVASDWSIHLR

SEQ ID NO: 47666 - protein, 944 aa, Homo sapiens
MAAVAAVAARRRRSWASLVLAFLGVCLGITLAVDRSNFKTCEESSFCKRQRSIRPGLSPYRALLDSLQLGPDSLTVHLIHEVTKVLLVLELQGLQKNMTRFRIDELEPRRPRYRVPDVLVADPPIARLSVSGRDENSVELTMAEGPYKIILTARPFRLDLLEDRSLLLSVNARGLLEFEHQRAPRVSQGSKDPAEGDGAQPEETPRDGDKPEETQGKAEKDEPGAWEETFKTHSDSKPYGPMSVGLDFSLPGMEHVYGIPEHADNLRLKVTEGGEPYRLYNLDVFQYELYNPMALYGSVPVLLAHNPHRDLGIFWLNAAETWVDISSNTAGKTLFGKMMDYLQGSGETPQTDVRWMSETGIIDVFLLLGPSISDVFRQYASLTGTQALPPLFSLGYHQSRWNYRDEADVLEVDQGFDDHNLPCDVIWLDIEHADGKRYFTWDPSRFPQPRTMLERLASKRRKLVAIVDPHIKVDSGYRVHEELRNLGLYVKTRDGSDYEGWCWPGSAGYPDFTNPTMRAWWANMFSYDNYEGSAPNLFVWNDMNEPSVFNGPEVTMLKDAQHYGGWEHRDVHNIYGLYVHMATADGLRQRSGGMERPFVLARAFFAGSQRFGAVWTGDNTAEWDHLKISIPMCLSLGLVGLSFCGADVGGFFKNPEPELLVRWYQMGAYQPFFRAHAHLDTGRREPWLLPSQHNDIIRDALGQRYSLLPFWYTLLYQAHREGIPVMRPLWVQYPQDVTTFNIDDQYLLGDALLVHPVSDSGAHGVQVYLPGQGEVWYDIQSYQKHHGPQTLYLPVTLSSIPVFQRGGTIVPRWMRVRRSSECMKDDPITLFVALSPQGTAQGELFLDDGHTFNYQTRQEFLLRRFSFSGNTLVSSSADPEGHFETPIWIERVVIIGAGKPAAVVLQTKGSPESRLSFQHDPETSVLVLRKPGINVASDWSIHLR

SEQ ID NO: 47667 - protein, 847 aa, Homo sapiens
MTRFRIDELEPRRPRYRVPDVLVADPPIARLSVSGRDENSVELTMAEGPYKIILTARPFRLDLLEDRSLLLSVNARGLLEFEHQRAPRVSQGSKDPAEGDGAQPEETPRDGDKPEETQGKAEKDEPGAWEETFKTHSDSKPYGPMSVGLDFSLPGMEHVYGIPEHADNLRLKVTEGGEPYRLYNLDVFQYELYNPMALYGSVPVLLAHNPHRDLGIFWLNAAETWVDISSNTAGKTLFGKMMDYLQGSGETPQTDVRWMSETGIIDVFLLLGPSISDVFRQYASLTGTQALPPLFSLGYHQSRWNYRDEADVLEVDQGFDDHNLPCDVIWLDIEHADGKRYFTWDPSRFPQPRTMLERLASKRRKLVAIVDPHIKVDSGYRVHEELRNLGLYVKTRDGSDYEGWCWPGSAGYPDFTNPTMRAWWANMFSYDNYEGSAPNLFVWNDMNEPSVFNGPEVTMLKDAQHYGGWEHRDVHNIYGLYVHMATADGLRQRSGGMERPFVLARAFFAGSQRFGAVWTGDNTAEWDHLKISIPMCLSLGLVGLSFCGADVGGFFKNPEPELLVRWYQMGAYQPFFRAHAHLDTGRREPWLLPSQHNDIIRDALGQRYSLLPFWYTLLYQAHREGIPVMRPLWVQYPQDVTTFNIDDQYLLGDALLVHPVSDSGAHGVQVYLPGQGEVWYDIQSYQKHHGPQTLYLPVTLSSIPVFQRGGTIVPRWMRVRRSSECMKDDPITLFVALSPQGTAQGELFLDDGHTFNYQTRQEFLLRRFSFSGNTLVSSSADPEGHFETPIWIERVVIIGAGKPAAVVLQTKGSPESRLSFQHDPETSVLVLRKPGINVASDWSIHLR

SEQ ID NO: 47668 - protein, 914 aa, Homo sapiens
MEAAVKEEISLEDEAVDKNIFRDCNKIAFYRRQKQWLSKKSTYQALLDSVTTDEDSTRFQIINEASKVPLLAEIYGIEGNIFRLKINEETPLKPRFEVPDVLTSKPSTVRLISCSGDTGSLILADGKGDLKCHITANPFKVDLVSEEEVVISINSLGQLYFEHLQILHKQRAAKENEEETSVDTSQENQEDLGLWEEKFGKFVDIKANGPSSIGLDFSLHGFEHLYGIPQHAESHQLKNTGDGDAYRLYNLDVYGYQIYDKMGIYGSVPYLLAHKLGRTIGIFWLNASETLVEINTEPAVEYTLTQMGPVAAKQKVRSRTHVHWMSESGIIDVFLLTGPTPSDVFKQYSHLTGTQAMPPLFSLGYHQCRWNYEDEQDVKAVDAGFDEHDIPYDAMWLDIEHTEGKRYFTWDKNRFPNPKRMQELLRSKKRKLVVISDPHIKIDPDYSVYVKAKDQGFFVKNQEGEDFEGVCWPGLSSYLDFTNPKVREWYSSLFAFPVYQGSTDILFLWNDMNEPSVFRGPEQTMQKNAIHHGNWEHRELHNIYGFYHQMATAEGLIKRSKGKERPFVLTRSFFAGSQKYGAVWTGDNTAEWSNLKISIPMLLTLSITGISFCGADIGGFIGNPETELLVRWYQAGAYQPFFRGHATMNTKRREPWLFGEEHTRLIREAIRERYGLLPYWYSLFYHAHVASQPVMRPLWVEFPDELKTFDMEDEYMLGSALLVHPVTEPKATTVDVFLPGSNEVWYDYKTFAHWEGGCTVKIPVALDTIPVFQRGGSVIPIKTTVGKSTGWMTESSYGLRVALSTKGSSVGELYLDDGHSFQYLHQKQFLHRKFSFCSSVLINSFADQRGHYPSKCVVEKILVLGFRKEPSSVTTHSSDGKDQPVAFTYCAKTSILSLEKLSLNIATDWEVRII

SEQ ID NO: 47669 - protein, 282 aa, Homo sapiens
MEAAVKEEISLEDEAVDKNIFRDCNKIAFYRRQKQWLSKKSTYQALLDSVTTDEDSTRFQIINEASKVRCQDQSPTTLDAFKGKETTVQEETQDLSTRQHLAQKEAEEPDKQGQITWDISNVAPKTENFEDLLEQTPCSACLQGFTRDNTSSSFSEDAGISLSTSVKLPLASSSKPNENEALPNQPPSQQIRHNYRLLASTVSAEMARNRQLIWELARQSEAHLDRPVVLGEQASAQREVASILCRKSVLAINQLAATVEGTISVLQQFNELLDHPLDPGRS

SEQ ID NO: 47670 - protein, 409 aa, Homo sapiens
MRRYLRVVVLCVACGFCSLLYAFSQLAVSLEEGTGGGGGKPQAAVASWLAGGGRGAVRGAGVAGPAAHPGVSDRYSLKIQPVEKMHLAVVACGERLEETMTMLKSAIIFSIKPLQFHIFAEDQLHHSFKGRLDNWSFLQTFNYTLYPITFPSENAAEWKKLFKPCASQRLFLPLILKEVDSLLYVDTDILFLRPVDDIWSLLKKFNSTQIAAMAPEHEEPRIGWYNRFARHPYYGKTGVNSGVMLMNMTRMRRKYFKNDMTTVRLQWGDILMPLLKKYKLNITWGDQDLLNIVFFHNPESLFVFPCQWNYRPDHCIYGSNCQEAEEGGIFILHGNRGVYHDDKQPAFRAVYEALRNCSFEDDNIRSLLKPLELELQKTVHTYCGKIYKIFIKQLAKSVRDRYARSPKEK

SEQ ID NO: 47671 - protein, 440 aa, Homo sapiens
MRRYLRVVVLCVACGFCSLLYAFSQLAVSLEEGTGGGGGKPQAAVASWLAGGGRGAVRGAGVAGPAAHPGVSDRCKDFSLCYWNPYWMLPSDVCGMNCFWEAAFRYSLKIQPVEKMHLAVVACGERLEETMTMLKSAIIFSIKPLQFHIFAEDQLHHSFKGRLDNWSFLQTFNYTLYPITFPSENAAEWKKLFKPCASQRLFLPLILKEVDSLLYVDTDILFLRPVDDIWSLLKKFNSTQIAAMAPEHEEPRIGWYNRFARHPYYGKTGVNSGVMLMNMTRMRRKYFKNDMTTVRLQWGDILMPLLKKYKLNITWGDQDLLNIVFFHNPESLFVFPCQWNYRPDHCIYGSNCQEAEEGGIFILHGNRGVYHDDKQPAFRAVYEALRNCSFEDDNIRSLLKPLELELQKTVHTYCGKIYKIFIKQLAKSVRDRYARSPKEK

SEQ ID NO: 47672 - protein, 443 aa, Homo sapiens
MKLRSKAAALLLLALAALLLALLSLRAGRAEPPALPARPASAPQRHPAPVPARWPGPGALPGASPGVRRRRPPRPRPRAGRRGAARLEKLARRPGEPRSFQAVLPPELWIHLAVVACGNRLEETLVMLKSAVLFSHRKIQFHIFTEDSLKPEFDKQLRQWPDSYTKKFEHRIYPITFSVGNPQEWKKLFKPCAAQRLFLPVILKDVDSLLYVDTDVLFLRPVDDIWKLLRLFNSTQLAAMAPEHEIPKIGWYSRFARHPFYGSAGVNSGVMLMNLTRIRSTQFKNSMIPTGLAWEDMLYPLYQKYKNAITWGDQDLLNIIFYFNPECLYVFPCQWNYRPDHCMYGSNCREAEHEGVSVLHGNRGVYHDDKQPTFRALYEAIRDFPFQDNLFQSMYYPLQLKFLETVHTLCGRIPQVFLKQIEKTMKRAYEKHVIIHVGPNQMH

SEQ ID NO: 47673 - protein, 617 aa, Homo sapiens
MRCLAARVNYKTLIIICALFTLVTVLLWNKCSSDKAIQFPRRSSSGFRVDGFEKRAAASESNNYMNHVAKQQSEEAFPQEQQKAPPVVGGFNSNVGSKVLGLKYEEIDCLINDEHTIKGRREGNEVFLPFTWVEKYFDVYGKVVQYDGYDRFEFSHSYSKVYAQRAPYHPDGVFMSFEGYNVEVRDRVKCISGVEGVPLSTQWGPQGYFYPIQIAQYGLSHYSKNLTEKPPHIEVYETAEDRDKNKPNDWTVPKGCFMANVADKSRFTNVKQFIAPETSEGVSLQLGNTKDFIISFDLKFLTNGSVSVVLETTEKNQLFTIHYVSNAQLIAFKERDIYYGIGPRTSWSTVTRDLVTDLRKGVGLSNTKAVKPTKIMPKKVVRLIAKGKGFLDNITISTTAHMAAFFAASDWLVRNQDEKGGWPIMVTRKLGEGFKSLEPGWYSAMAQGQAISTLVRAYLLTKDHIFLNSALRATAPYKFLSEQHGVKAVFMNKHDWYEEYPTTPSSFVLNGFMYSLIGLYDLKETAGEKLGKEARSLYERGMESLKAMLPLYDTGSGTIYDLRHFMLGIAPNLARWDYHTTHINQLQLLSTIDESPVFKEFVKRWKSYLKGSRAKHN

SEQ ID NO: 47674 - protein, 553 aa, Homo sapiens
MNHVAKQQSEEAFPQEQQKAPPVVGGFNSNVGSKVLGLKYEEIDCLINDEHTIKGRREGNEVFLPFTWVEKYFDVYGKVVQYDGYDRFEFSHSYSKVYAQRAPYHPDGVFMSFEGYNVEVRDRVKCISGVEGVPLSTQWGPQGYFYPIQIAQYGLSHYSKNLTEKPPHIEVYETAEDRDKNKPNDWTVPKGCFMANVADKSRFTNVKQFIAPETSEGVSLQLGNTKDFIISFDLKFLTNGSVSVVLETTEKNQLFTIHYVSNAQLIAFKERDIYYGIGPRTSWSTVTRDLVTDLRKGVGLSNTKAVKPTKIMPKKVVRLIAKGKGFLDNITISTTAHMAAFFAASDWLVRNQDEKGGWPIMVTRKLGEGFKSLEPGWYSAMAQGQAISTLVRAYLLTKDHIFLNSALRATAPYKFLSEQHGVKAVFMNKHDWYEEYPTTPSSFVLNGFMYSLIGLYDLKETAGEKLGKEARSLYERGMESLKAMLPLYDTGSGTIYDLRHFMLGIAPNLARWDYHTTHINQLQLLSTIDESPVFKEFVKRWKSYLKGSRAKHN

SEQ ID NO: 47675 - protein, 651 aa, Homo sapiens
MARGSAVAWAALGPLLWGCALGLQGGMLYPQESPSRECKELDGLWSFRADFSDNRRRGFEEQWYRRPLWESGPTVDMPVPSSFNDISQDWRLRHFVGWVWYEREVILPERWTQDLRTRVVLRIGSAHSYAIVWVNGVDTLEHEGGYLPFEADISNLVQVGPLPSRLRITIAINNTLTPTTLPPGTIQYLTDTSKYPKGYFVQNTYFDFFNYAGLQRSVLLYTTPTTYIDDITVTTSVEQDSGLVNYQISVKGSNLFKLEVRLLDAENKVVANGTGTQGQLKVPGVSLWWPYLMHERPAYLYSLEVQLTAQTSLGPVSDFYTLPVGIRTVAVTKSQFLINGKPFYFHGVNKHEDADIRGKGFDWPLLVKDFNLLRWLGANAFRTSHYPYAEEVMQMCDRYGIVVIDECPGVGLALPQFFNNVSLHHHMQVMEEVVRRDKNHPAVVMWSVANEPASHLESAGYYLKMVIAHTKSLDPSRPVTFVSNSNYAADKGAPYVDVICLNSYYSWYHDYGHLELIQLQLATQFENWYKKYQKPIIQSEYGAETIAGFHQDPPLMFTEEYQKSLLEQYHLGLDQKRRKYVVGELIWNFADFMTEQSPTRVLGNKKGIFTRQRQPKSAAFLLRERYWKIANETRYPHSVAKSQCLENSLFT

SEQ ID NO: 47676 - protein, 600 aa, Homo sapiens
MARGSAVAWAALGPLLWGCALGLQGGMLYPQESPSRECKELDGLWSFRADFSDNRRRGFEEQWYRRPLWESGPTVDMPVPSSFNDISQDWRLRHFVGWVWYEREVILPERWTQDLRTRVVLRIGSAHSYAIVWVNGVDTLEHEGGYLPFEADISNLVQVGPLPSRLRITIAINNTLTPTTLPPGTIQYLTDTSKYPKGYFVQNTYFDFFNYAGLQRSVLLYTTPTTYIDDITVTTSVEQDSGLVNYQISVKGSNLFKLEVRLLDAENKVVANGTGTQGQLKVPGVSLWWPYLMHERPAYLYSLEIRGKGFDWPLLVKDFNLLRWLGANAFRTSHYPYAEEVMQMCDRYGIVVIDECPGVGLALPQFFNNVSLHHHMQVMEEVVRRDKNHPAVVMWSVANEPASHLESAGYYLKMVIAHTKSLDPSRPVTFVSNSNYAADKGAPYVDVICLNSYYSWYHDYGHLELIQLQLATQFENWYKKYQKPIIQSEYGAETIAGFHQDPPLMFTEEYQKSLLEQYHLGLDQKRRKYVVGELIWNFADFMTEQSPTRVLGNKKGIFTRQRQPKSAAFLLRERYWKIANETRYPHSVAKSQCLENSLFT

SEQ ID NO: 47677 - protein, 224 aa, Homo sapiens
MASSTPSSSATSSNAGADPNTTNLRPTTYDTWCGVAHGCTRKLGLKICGFLQRTNSLEEKSRLVSAFKERQSSKNLLSCENSDRDARFRRTETDFSNLFARDLLPAKNGEEQTVQFLLEVVDILLNYVRKTFDRSTKVLDFHHPHQLLEGMEGFNLELSDHPESLEQILVDCRDTLKYGVRTGHPRFFNQLSTGLDIIGLAGEWLTSTANTNMPSDMRECWLLR

SEQ ID NO: 47678 - protein, 594 aa, Homo sapiens
MASSTPSSSATSSNAGADPNTTNLRPTTYDTWCGVAHGCTRKLGLKICGFLQRTNSLEEKSRLVSAFKERQSSKNLLSCENSDRDARFRRTETDFSNLFARDLLPAKNGEEQTVQFLLEVVDILLNYVRKTFDRSTKVLDFHHPHQLLEGMEGFNLELSDHPESLEQILVDCRDTLKYGVRTGHPRFFNQLSTGLDIIGLAGEWLTSTANTNMFTYEIAPVFVLMEQITLKKMREIVGWSSKDGDGIFSPGGAISNMYSIMAARYKYFPEVKTKGMAAVPKLVLFTSEQSHYSIKKAGAALGFGTDNVILIKCNERGKIIPADFEAKILEAKQKGYVPFYVNATAGTTVYGAFDPIQEIADICEKYNLWLHVDAAWGGGLLMSRKHRHKLNGIERANSVTWNPHKMMGVLLQCSAILVKEKGILQGCNQMCAGYLFQPDKQYDVSYDTGDKAIQCGRHVDIFKFWLMWKAKGTVGFENQINKCLELAEYLYAKIKNREEFEMVFNGEPEHTNVCFWYIPQSLRGVPDSPQRREKLHKVAPKIKALMMESGTTMVGYQPQGDKANFFRMVISNPAATQSDIDFLIEEIERLGQDL

SEQ ID NO: 47679 - protein, 224 aa, Homo sapiens; identical to SEQ ID NO: 47677

SEQ ID NO: 47680 - protein, 37 aa, Homo sapiens
MASSTPSSSATSSNAGADPNTTNLRPTTYDTWCGVAH

SEQ ID NO: 47681 - protein, 85 aa, Homo sapiens
MASSTPSSSATSSNAGADPNTTNLRPTTYDTWCGVAHGCTRKLGLKICGFLQRTNSLEEKSRLVSAFKERQSSKNLLSCENSDRD

SEQ ID NO: 47682 - protein, 115 aa, Homo sapiens
MASSTPSSSATSSNAGADPNTTNLRPTTYDTWCGVAHGCTRKLGLKICGFLQRTNSLEEKSRLVSAFKERQSSKNLLSCENSDRDARFRRTETDFSNLFARDLLPAKNGEEQTVQ

SEQ ID NO: 47683 - protein, 121 aa, Homo sapiens
MASSTPSSSATSSNAGADPNTTNLRPTTYDTWCGVAHGCTRKLGLKICGFLQRTNSLEEKSRLVSAFKERQSSKNLLSCENSDRDARFRRTETDFSNLFARDLLPAKNGEEQTVQFLLEVV

SEQ ID NO: 47684 - protein, 585 aa, Homo sapiens
MASPGSGFWSFGSEDGSGDSENPGTARAWCQVAQKFTGGIGNKLCALLYGDAEKPAESGGSQPPRAAARKAACACDQKPCSCSKVDVNYAFLHATDLLPACDGERPTLAFLQDVMNILLQYVVKSFDRSTKVIDFHYPNELLQEYNWELADQPQNLEEILMHCQTTLKYAIKTGHPRYFNQLSTGLDMVGLAADWLTSTANTNMFTYEIAPVFVLLEYVTLKKMREIIGWPGGSGDGIFSPGGAISNMYAMMIARFKMFPEVKEKGMAALPRLIAFTSEHSHFSLKKGAAALGIGTDSVILIKCDERGKMIPSDLERRILEAKQKGFVPFLVSATAGTTVYGAFDPLLAVADICKKYKIWMHVDAAWGGGLLMSRKHKWKLSGVERANSVTWNPHKMMGVPLQCSALLVREEGLMQNCNQMHASYLFQQDKHYDLSYDTGDKALQCGRHVDVFKLWLMWRAKGTTGFEAHVDKCLELAEYLYNIIKNREGYEMVFDGKPQHTNVCFWYIPPSLRTLEDNEERMSRLSKVAPVIKARMMEYGTTMVSYQPLGDKVNFFRMVISNPAATHQDIDFLIEEIERLGQDL

SEQ ID NO: 47685 - protein, 129 aa, Homo sapiens
MNILLQYVVKSFDRSTKVIDFHYPNELLQEYNWELADQPQNLEEILMHCQTTLKYAIKTGHPRYFNQLSTGLDMVGLAADWLTSTANTNMFTYEIAPVFVLLEYVTLKKMREIIGWPGGSGDGIFSPGT

SEQ ID NO: 47686 - protein, 585 aa, Homo sapiens; identical to SEQ ID NO: 47684

SEQ ID NO: 47687 - protein, 188 aa, Homo sapiens
MASPGSGFWSFGSEDGSGDSENPGTARAWCQVAQKFTGGIGNKLCALLYGDAEKPAESGGSQPPRAAARKAACACDQKPCSCSKVDVNYAFLHATDLLPACDGERPTLAFLQDVMNILLQYVVKSFDRSTKVIDFHYPNELLQEYNWELADQPQNLEEILMHCQTTLKYAIKTGIVSSKIIKLFFRLQ

SEQ ID NO: 47688 - protein, 558 aa, Homo sapiens
MYRYLGEALLLSRAGPAALGSASADSAALLGWARGQPAAAPQPGLALAARRHYSEAVADREDDPNFFKMVEGFFDRGASIVEDKLVEDLRTRESEEQKRNRVRGILRIIKPCNHVLSLSFPIRRDDGSWEVIEGYRAQHSQHRTPCKGGIRYSTDVSVDEVKALASLMTYKCAVVDVPFGGAKAGVKINPKNYTDNELEKITRRFTMELAKKGFIGPGIDVPAPDMSTGEREMSWIADTYASTIGHYDINAHACVTGKPISQGGIHGRISATGRGVFHGIENFINEASYMSILGMTPGFGDKTFVVQGFGNVGLHSMRYLHRFGAKCIAVGESDGSIWNPDGIDPKELEDFKLQHGSILGFPKAKPYEGSILEADCDILIPAASEKQLTKSNAPRVKAKIIAEGANGPTTPEADKIFLERNIMVIPDLYLNAGGVTVSYFEWLKNLNHVSYGRLTFKYERDSNYHLLMSVQESLERKFGKHGGTIPIVPTAEFQDRISGASEKDIVHSGLAYTMERSARQIMRTAMKYNLGLDLRTAAYVNAIEKVFKVYNEAGVTFT

SEQ ID NO: 47689 - protein, 515 aa, Homo sapiens
MYRYLGPGTARRRPAAGAGIGRPAPLQRGGGRPRGRPQLLQDGGGLLRSRRQHRGGQAGGGPEDPGERGAEAEPGARHPADHQALQPCAESLLPQHSQHRTPCKGGIRYSTDVSVDEVKALASLMTYKCAVVDVPFGGAKAGVKINPKNYTDNELEKITRRFTMELAKKGFIGPGIDVPAPDMSTGEREMSWIADTYASTIGHYDINAHACVTGKPISQGGIHGRISATGRGVFHGIENFINEASYMSILGMTPGFGDKTFVVQGFGNVGLHSMRYLHRFGAKCIAVGESDGSIWNPDGIDPKELEDFKLQHGSILGFPKAKPYEGSILEADCDILIPAASEKQLTKSNAPRVKAKIIAEGANGPTTPEADKIFLERNIMVIPDLYLNAGGVTVSYFEWLKNLNHVSYGRLTFKYERDSNYHLLMSVQESLERKFGKHGGTIPIVPTAEFQDRISGASEKDIVHSGLAYTMERSARQIMRTAMKYNLGLDLRTAAYVNAIEKVFKVYNEAGVTFT

SEQ ID NO: 47690 - protein, 490 aa, Homo sapiens [sequence omitted]

SEQ ID NO: 47691 - protein, 257 aa, Homo sapiens
ENFIVEGFGNVGLHSMRYLHRFGAKCIAVGESDGSIWNPDGIDPKELEDFKLQHGSILGFPKAKPYEGSILEADCDILIPAASEKQLTKSNAPRVKAKIIAEGANGPTTPEADKIFLERNIMVIPDLYLNAGGVTVSYFEWLKNLNHVSYGRLTFKYERDSNYHLLMSVQESLERKFGKHGGTIPIVPTAEFQDRISGASEKDIVHSGLAYTMERSARQIMRTAMKYNLGLDLRTAAYVNAIEKVFKVYNEAGVTFT

SEQ ID NO: 47692 - protein, 391 aa, Homo sapiens
MTYKCAVVDVPFGGAKAGVKINPKNYTDNELEKITRRFTMELAKKGFIGPGIDVPAPDMSTGEREMSWIADTYASTIGHYDINAHACVTGKPISQGGIHGRISATGRGVFHGIENFINEASYMSILGMTPGFGDKTFVVQGFGNVGLHSMRYLHRFGAKCIAVGESDGSIWNPDGIDPKELEDFKLQHGSILGFPKAKPYEGSILEADCDILIPAASEKQLTKSNAPRVKAKIIAEGANGPTTPEADKIFLERNIMVIPDLYLNAGGVTVSYFEWLKNLNHVSYGRLTFKYERDSNYHLLMSVQESLERKFGKHGGTIPIVPTAEFQDRISGASEKDIVHSGLAYTMERSARQIMRTAMKYNLGLDLRTAAYVNAIEKVFKVYNEAGVTFT

SEQ ID NO: 47693 - protein, 425 aa, Homo sapiens
MTCPCDNASSVFLGFCIRYSTDVSVDEVKALASLMTYKCAVVDVPFGGAKAGVKINPKNYTDNELEKITRRFTMELAKKGFIGPGIDVPAPDMSTGEREMSWIADTYASTIGHYDINAHACVTGKPISQGGIHGRISATGRGVFHGIENFINEASYMSILGMTPGFGDKTFVVQGFGNVGLHSMRYLHRFGAKCIAVGESDGSIWNPDGIDPKELEDFKLQHGSILGFPKAKPYEGSILEADCDILIPAASEKQLTKSNAPRVKAKIIAEGANGPTTPEADKIFLERNIMVIPDLYLNAGGVTVSYFEWLKNLNHVSYGRLTFKYERDSNYHLLMSVQESLERKFGKHGGTIPIVPTAEFQDRISGASEKDIVHSGLAYTMERSARQIMRTAMKYNLGLDLRTAAYVNAIEKVFKVYNEAGVTFT

SEQ ID NO: 47694 - protein, 558 aa, Homo sapiens
MYRYLAKALLPSRAGPAALGSAANHSAALLGRGRGQPAAASQPGLALAARRHYSELVADREDDPNFFKMVEGFFDRGASIVEDKLVKDLRTQESEEQKRNRVRGILRIIKPCNHVLSLSFPIRRDDGSWEVIEGYRAQHSQHRTPCKGGIRYSTDVSVDEVKALASLMTYKCAVVDVPFGGAKAGVKINPKNYTENELEKITRRFTMELAKKGFIGPGVDVPAPDMNTGEREMSWIADTYASTIGHYDINAHACVTGKPISQGGIHGRISATGRGVFHGIENFINEASYMSILGMTPGFRDKTFVVQGFGNVGLHSMRYLHRFGAKCIAVGESDGSIWNPDGIDPKELEDFKLQHGSILGFPKAKPYEGSILEVDCDILIPAATEKQLTKSNAPRVKAKIIAEGANGPTTPEADKIFLERNILVIPDLYLNAGGVTVSYFEWLKNLNHVSYGRLTFKYERDSNYHLLLSVQESLERKFGKHGGTIPIVPTAEFQDSISGASEKDIVHSALAYTMERSARQIMHTAMKYNLGLDLRTAAYVNAIEKVFKVYSEAGVTFT

SEQ ID NO: 47695 - protein, 1113 aa, Homo sapiens
MIAVSFKCRCQILRRLTKDESPYTKSASQTKPPDGALAVRRQSIPEEFKGSTVVELMKKEGTTLGLTVSGGIDKDGKPRVSNLRQGGIAARSDQLDVGDYIKAVNGINLAKFRHDEIISLLKNVGERVVLEVEYELPPVSVQGSSVIFRTVEVTLHKEGNTFGFVIRGGAHDDRNKSRPVVITCVRPGGPADREGTIKPGDRLLSVDGIRLLGTTHAEAMSILKQCGQEAALLIEYDVSVMDSVATASGPLLVEVAKTPGASLGVALTTSMCCNKQVIVIDKIKSASIADRCGALHVGDHILSIDGTSMEYCTLAEATQFLANTTDQVKLEILPHHQTRLALKGPDHVKIQRSDRQLTWDSWASNHSSLHTNHHYNTYHPDHCRVPALTFPKAPPPNSPPALVSSSFSPTSMSAYSLSSLNMGTLPRSLYSTSPRGTMMRRRLKKKDFKSSLSLASSTVGLAGQVVHTETTEVVLTADPVTGFGIQLQGSVFATETLSSPPLISYIEADSPAERCGVLQIGDRVMAINGIPTEDSTFEEASQLLRDSSITSKVTLEIEFDVAESVIPSSGTFHVKLPKKHNVELGITISSPSSRKPGDPLVISDIKKGSVAHRTGTLELGDKLLAIDNIRLDNCSMEDAVQILQQCEDLVKLKIRKDEDNSDEQESSGAIIYTVELKRYGGPLGITISGTEEPFDPIIISSLTKGGLAERTGAIHIGDRILAINSSSLKGKPLSEAIHLLQMAGETVTLKIKKQTDAQSASSPKKFPISSHLSDLGDVEEDSSPAQKPGKLSDMYPSTVPSVDSAVDSWDGSAIDTSYGTQGTSFQASGYNFNTYDWRSPKQRGSLSPVTKPRSQTYPDVGLSYEDWDRSTASGFAGAADSAETEQEENFWSQALEDLETCGQSGILRELEATIMSGSTMSLNHEAPTPRSQLGRQASFQERSSSRPHYSQTTRSNTLPSDVGRKSVTLRKMKQEIKEIMSPTPVELHKVTLYKDSDMEDFGFSVADGLLEKGVYVKNIRPAGPGDLGGLKPYDRLLQVNHVRTRDFDCCLVVPLIAESGNKLDLVISRNPLASQKSIDQQSLPGDWSEQNSAFFQQPSHGGNLETREPTNTL

SEQ ID NO: 47696 - protein, 1128 aa, Homo sapiens
MIAVSFKCRCQILRRLTKDESPYTKSASQTKPPDGALAVRRQSIPEEFKGSTVVELMKKEGTTLGLTVSGGIDKDGKPRVSNLRQGGIAARSDQLDVGDYIKAVNGINLAKFRHDEIISLLKNVGERVVLEVEYELPPVSVQGSSVIFRTVEVTLHKEGNTFGFVIRGGAHDDRNKSRPVVITCVRPGGPADREGTIKPGDRLLSVDGIRLLGTTHAEAMSILKQCGQEAALLIEYDVSVMDSVATASGPLLVEVAKTPGASLGVALTTSMCCNKQVIVIDKIKSASIADRCGALHVGDHILSIDGTSMEYCTLAEATQFLANTTDQVKLEILPHHQTRLALKGPDHVKIQRSDRQLTWDSWASNHSSLHTNHHYNTYHPDHCRVPALTFPKAPPPNSPPALVSSSFSPTSMSAYSLSSLNMGTLPRSLYSTSPRGTMMRRRLKKKDFKSSLSLASSTVGLAGQVVHTETTEVVLTADPVTGFGIQLQGSVFATETLSSPPLISYIEADSPAERCGVLQIGDRVMAINGIPTEDSTFEEASQLLRDSSITSKVTLEIEFDVAESVIPSSGTFHVKLPKKHNVELGITISSPSSRKPGDPLVISDIKKGSVAHRTGTLELGDKLLAIDNIRLDNCSMEDAVQILQQCEDLVKLKIRKDEDNSDEQESSGAIIYTVELKRYGGPLGITISGTEEPFDPIIISSLTKGGLAERTGAIHIGDRILAINSSSLKGKPLSEAIHLLQMAGETVTLKIKKQTDAQSASSPKKFPISSHLSDLGDVEEDSSPAQKPGKLSDMYPSTVPSVDSAVDSWDGSAIDTSYGTQGTSFQASGYNFNTYDWRSPKQRGSLSPVTKPRSQTYPDVGLSYEDWDRSTASGFAGAADSAETEQEENFWSQALEDLETCGQSGILRELEEKADRRVSLRNMTLLATIMSGSTMSLNHEAPTPRSQLGRQASFQERSSSRPHYSQTTRSNTLPSDVGRKSVTLRKMKQEIKEIMSPTPVELHKVTLYKDSDMEDFGFSVADGLLEKGVYVKNIRPAGPGDLGGLKPYDRLLQVNHVRTRDFDCCLVVPLIAESGNKLDLVISRNPLASQKSIDQQSLPGDWSEQNSAFFQQPSHGGNLETREPTNTL

SEQ ID NO: 47697 - protein, 1076 aa, Homo sapiens
MIAVSFKCRCQILRRLTKDESPYTKSASQTKPPDGALAVRRQSIPEEFKGSTVVELMKKEGTTLGLTVSGGIDKDGKPRVSNLRQGGIAARSDQLDVGDYIKAVNGINLAKFRHDEIISLLKNVGERVVLEVEYELPPVSVQGSSVIFRTVEVTLHKEGNTFGFVIRGGAHDDRNKSRPVVITCVRPGGPADREGTIKPGDRLLSVDGIRLLGTTHAEAMSILKQCGQEAALLIEYDVSVMDSVATASGPLLVEVAKTPGASLGVALTTSMCCNKQVIVIDKIKSASIADRCGALHVGDHILSIDGTSMEYCTLAEATQFLANTTDQVKLEILPHHQTRLALKGPDHAALVSSSFSPTSMSAYSLSSLNMGTLPRSLYSTSPRGTMMRRRLKKKDFKSSLSLASSTVGLAGQVVHTETTEVVLTADPVTGFGIQLQGSVFATETLSSPPLISYIEADSPAERCGVLQIGDRVMAINGIPTEDSTFEEASQLLRDSSITSKVTLEIEFDVAESVIPSSGTFHVKLPKKHNVELGITISSPSSRKPGDPLVISDIKKGSVAHRTGTLELGDKLLAIDNIRLDNCSMEDAVQILQQCEDLVKLKIRKDEDNSDEQESSGAIIYTVELKRYGGPLGITISGTEEPFDPIIISSLTKGGLAERTGAIHIGDRILAINSSSLKGKPLSEAIHLLQMAGETVTLKIKKQTDAQSASSPKKFPISSHLSDLGDVEEDSSPAQKPGKLSDMYPSTVPSVDSAVDSWDGSAIDTSYGTQGTSFQASGYNFNTYDWRSPKQRGSLSPVTKPRSQTYPDVGLSYEDWDRSTASGFAGAADSAETEQEENFWSQALEDLETCGQSGILRELEEKADRRVSLRNMTLLATIMSGSTMSLNHEAPTPRSQLGRQASFQERSSSRPHYSQTTRSNTLPSDVGRKSVTLRKMKQEIKEIMSPTPVELHKVTLYKDSDMEDFGFSVADGLLEKGVYVKNIRPAGPGDLGGLKPYDRLLQVNHVRTRDFDCCLVVPLIAESGNKLDLVISRNPLASQKSIDQQSLPGDWSEQNSAFFQQPSHGGNLETREPTNTL

SEQ ID NO: 47698 - protein, 836 aa, Homo sapiens
MVQFSTSEFRLTPHIDNLEVANSFAVTNAFCSQFSRGVYAIFGFYDKKSVNTITSFCGTLHVSFITPSFPTDGTHPFVIQMRPDLKGALLSLIEYYQWDKFAYLYDSDRGLSTLQAVLDSAAEKKWQVTAINVGNINNDKKDEMYRSLFQDLELKKERRVILDCERDKVNDIVDQVITIGKHVKGYHYIIANLGFTDGDLLKIQFGGANVSGFQIVDYDDSLVSKFIERWSTLEEKEYPGAHTTTIKYTSALTYDAVQVMTEAFRNLRKQRIEISRRGNAGDCLANPAVPWGQGVEIERALKQVQVEGLSGNIKFDQNGKRINYTINIMELKTNGPRKIGYWSEVDKMVVTLTELPSGNDTSGLENKTVVVTTILESPYVMMKKNHEMLEGNERYEGYCVDLAAEIAKHCGFKYKLTIVGDGKYGARDADTKIWNGMVGELVYGKADIAIAPLTITLVREEVIDFSKPFMSLGISIMIKKPQKSKPGVFSFLDPLAYEIWMCIVFAYIGVSVVLFLVSRFSPYEWHTEEFEDGRETQSSESTNEFGIFNSLWFSLGAFMQQGCDISPRSLSGRIVGGVWWFFTLIIISSYTANLAAFLTVERMVSPIESAEDLSKQTEIAYGTLDSGSTKEFFRRSKIAVFDKMWTYMRSAEPSVFVRTTAEGVARVRKSKGKYAYLLESTMNEYIEQRKPCDTMKVGGNLDSKGYGIATPKGSSLRTPVNLAVLKLSEQGVLDKLKNKWWYDKGECGAKDSGSKEKTSALSLSNVAGVFYILVGGLGLAMLVALIEFCYKSRAEAKRMKVAKNAQNINPSSSQNSQNFATYKEGYNVYGIESVKI

SEQ ID NO: 47699 - protein, 901 aa, Homo sapiens
MSTMRLLTLALLFSCSVARAACDPKIVNIGAVLSTRKHEQMFREAVNQANKRHGSWKIQLNATSVTHKPNAIQMALSVCEDLISSQVYAILVSHPPTPNDHFTPTPVSYTAGFYRIPVLGLTTRMSIYSDKSIHLSFLRTVPPYSHQSSVWFEMMRVYSWNHIILLVSDDHEGRAAQKRLETLLEERESKAEKVLQFDPGTKNVTALLMEAKELEARVIILSASEDDAATVYRAAAMLNMTGSGYVWLVGEREISGNALRYAPDGILGLQLINGKNESAHISDAVGVVAQAVHELLEKENITDPPRGCVGNTNIWKTGPLFKRVLMSSKYADGVTGRVEFNEDGDRKFANYSIMNLQNRKLVQVGIYNGTHVIPNDRKIIWPGGETEKPRGYQMSTRLKIVTIHQEPFVYVKPTLSDGTCKEEFTVNGDPVKKVICTGPNDTSPGSPRHTVPQCCYGFCIDLLIKLARTMNFTYEVHLVADGKFGTQERVNNSNKKEWNGMMGELLSGQADMIVAPLTINNERAQYIEFSKPFKYQGLTILVKKEIPRSTLDSFMQPFQSTLWLLVGLSVHVVAVMLYLLDRFSPFGRFKVNSEEEEEDALTLSSAMWFSWGVLLNSGIGEGAPRSFSARILGMVWAGFAMIIVASYTANLAAFLVLDRPEERITGINDPRLRNPSDKFIYATVKQSSVDIYFRRQVELSTMYRHMEKHNYESAAEAIQAVRDNKLHAFIWDSAVLEFEASQKCDLVTTGELFFRSGFGIGMRKDSPWKQNVSLSILKSHENGFMEDLDKTWVRYQECDSRSNAPATLTFENMAGVFMLVAGGIVAGIFLIFIEIAYKRHKDARRKQMQLAFAAVNVWRKNLQSTGGGRGALQNQKDTVLPRRAIEREEGQLQLCSRHRES

SEQ ID NO: 47700 - protein, 885 aa, Homo sapiens
MSTMRLLTLALLFSCSVARAACDPKIVNIGAVLSTRKHEQMFREAVNQANKRHGSWKIQLNATSVTHKPNAIQMALSVCEDLISSQVYAILVSHPPTPNDHFTPTPVSYTAGFYRIPVLGLTTRMSIYSDKSIHLSFLRTVPPYSHQSSVWFEMMRVYSWNHIILLVSDDHEGRAAQKRLETLLEERESKAEKVLQFDPGTKNVTALLMEAKELEARVIILSASEDDAATVYRAAAMLNMTGSGYVWLVGEREISGNALRYAPDGILGLQLINGKNESAHISDAVGVVAQAVHELLEKENITDPPRGCVGNTNIWKTGPLFKRVLMSSKYADGVTGRVEFNEDGDRKFANYSIMNLQNRKLVQVGIYNGTHVIPNDRKIIWPGGETEKPRGYQMSTRLKIVTIHQEPFVYVKPTLSDGTCKEEFTVNGDPVKKVICTGPNDTSPGSPRHTVPQCCYGFCIDLLIKLARTMNFTYEVHLVADGKFGTQERVNNSNKKEWNGMMGELLSGQADMIVAPLTINNERAQYIEFSKPFKYQGLTILVKKEIPRSTLDSFMQPFQSTLWLLVGLSVHVVAVMLYLLDRFSPFGRFKVNSEEEEEDALTLSSAMWFSWGVLLNSGIGEGAPRSFSARILGMVWAGFAMIIVASYTANLAAFLVLDRPEERITGINDPRLRNPSDKFIYATVKQSSVDIYFRRQVELSTMYRHMEKHNYESAAEAIQAVRDNKLHAFIWDSAVLEFEASQKCDLVTTGELFFRSGFGIGMRKDSPWKQNVSLSILKSHENGFMEDLDKTWVRYQECDSRSNAPATLTFENMAGVFMLVAGGIVAGIFLIFIEIAYKRHKDARRKQMQLAFAAVNVWRKNLQQYHPTDITGPLNLSDPSVSTVV

SEQ ID NO: 47701 - protein, 922 aa, Homo sapiens
MVQLRKLLRVLTLMKFPCCVLEVLLCALAAAARGQEMYAPHSIRIEGDVTLGGLFPVHAKGPSGVPCGDIKRENGIHRLEAMLYALDQINSDPNLLPNVTLGARILDTCSRDTYALEQSLTFVQALIQKDTSDVRCTNGEPPVFVKPEKVVGVIGASGSSVSIMVANILRLFQIPQISYASTAPELSDDRRYDFFSRVVPPDSFQAQAMVDIVKALGWNYVSTLASEGSYGEKGVESFTQISKEAGGLCIAQSVRIPQERKDRTIDFDRIIKQLLDTPNSRAVVIFANDEDIKQILAAAKRADQVGHFLWVGSDSWGSKINPLHQHEDIAEGAITIQPKRATVEGFDAYFTSRTLENNRRNVWFAEYWEENFNCKLTISGSKKEDTDRKCTGQERIGKDSNYEQEGKVQFVIDAVYAMAHALHHMNKDLCADYRGVCPEMEQAGGKKLLKYIRNVNFNGSAGTPVMFNKNGDAPGRYDIFQYQTTNTSNPGYRLIGQWTDELQLNIEDMQWGKGVREIPASVCTLPCKPGQRKKTQKGTPCCWTCEPCDGYQYQFDEMTCQHCPYDQRPNENRTGCQDIPIIKLEWHSPWAVIPVFLAMLGIIATIFVMATFIRYNDTPIVRASGRELSYVLLTGIFLCYIITFLMIAKPDVAVCSFRRVFLGLGMCISYAALLTKTNRIYRIFEQGKKSVTAPRLISPTSQLAITSSLISVQLLGVFIWFGVDPPNIIIDYDEHKTMNPEQARGVLKCDITDLQIICSLGYSILLMVTCTVYAIKTRGVPENFNEAKPIGFTMYTTCIVWLAFIPIFFGTAQSAEKLYIQTTTLTISMNLSASVALGMLYMPKVYIIIFHPELNVQKRKRSFKAVVTAATMSSRLSHKPSDRPNGEAKTELCENVDPNNCIPPVRKSVQKSVTWYTIPPTV

SEQ ID NO: 47702 - protein, 894 aa, Homo sapiens
MARQKKMGQSVLRAVFFLVLGLLGHSHGGFPNTISIGGLFMRNTVQEHSAFRFAVQLYNTNQNTTEKPFHLNYHVDHLDSSNSFSVTNAFCSQFSRGVYAIFGFYDQMSMNTLTSFCGALHTSFVTPSFPTDADVQFVIQMRPALKGAILSLLGHYKWEKFVYLYDTERGFSILQAIMEAAVQNNWQVTARSVGNIKDVQEFRRIIEEMDRRQEKRYLIDCEVERINTILEQVVILGKHSRGYHYMLANLGFTDILLERVMHGGANITGFQIVNNENPMVQQFIQRWVRLDEREFPEAKNAPLKYTSALTHDAILVIAEAFRYLRRQRVDVSRRGSAGDCLANPAVPWSQGIDIERALKMVQVQGMTGNIQFDTYGRRTNYTIDVYEMKVSGSRKAGYWNEYERFVPFSDQQISNDSASSENRTIVVTTILESPYVMYKKNHEQLEGNERYEGYCVDLAYEIAKHVRIKYKLSIVGDGKYGARDPETKIWNGMVGELVYGRADIAVAPLTITLVREEVIDFSKPFMSLGISIMIKKPQKSKPGVFSFLDPLAYEIWMCIVFAYIGVSVVLFLVSRFSPYEWHLEDNNEEPRDPQSPPDPPNEFGIFNSLWFSLGAFMQQGCDISPRSLSGRIVGGVWWFFTLIIISSYTANLAAFLTVERMVSPIESAEDLAKQTEIAYGTLDSGSTKEFFRRSKIAVYEKMWSYMKSAEPSVFTKTTADGVARVRKSKGKFAFLLESTMNEYIEQRKPCDTMKVGGNLDSKGYGVATPKGSALRNAVNLAVLKLNEQGLLDKLKNKWWYDKGECGSGGGDSKDKTSALSLSNVAGVFYILVGGLGLAMMVALIEFCYKSRAESKRMKLTKNTQNFKPAPATNTQNYATYREGYNVYGTESVKI

SEQ ID NO: 47703 - protein, 143 aa, Homo sapiens
MARQKKMGQSVLRAVFFLVLGLLGHSHGGFPNTISIGGLFMRNTVQEHSAFRFAVQLYNTNQNTTEKPFHLNYHVDHLDSSNSFSVTNACPAERDYLPWPGSIRENNWTALPCCKDHGLLHLKCSPGGRQNWAYCIWGVTGEL

SEQ ID NO: 47704 - protein, 894 aa, Homo sapiens; identical to SEQ ID NO: 47702

SEQ ID NO: 47705 - protein, 894 aa, Homo sapiens
MARQKKMGQSVLRAVFFLVLGLLGHSHGGFPNTISIGGLFMRNTVQEHSAFRFAVQLYNTNQNTTEKPFHLNYHVDHLDSSNSFSVTNAFCSQFSRGVYAIFGFYDQMSMNTLTSFCGALHTSFVTPSFPTDADVQFVIQMRPALKGAILSLLGHYKWEKFVYLYDTERGFSILQAIMEAAVQNNWQVTARSVGNIKDVQEFRRIIEEMDRRQEKRYLIDCEVERINTILEQVVILGKHSRGYHYMLANLGFTDILLERVMHGGANITGFQIVNNENPMVQQFIQRWVRLDEREFPEAKNAPLKYTSALTHDAILVIAEAFRYLRRQRVDVSRRGSAGDCLANPAVPWSQGIDIERALKMVQVQGMTGNIQFDTYGRRTNYTIDVYEMKVSGSRKAGYWNEYERFVPFSDQQISNDSASSENRTIVVTTILESPYVMYKKNHEQLEGNERYEGYCVDLAYEIAKHVRIKYKLSIVGDGKYGARDPETKIWNGMVGELVYGRADIAVAPLTITLVREEVIDFSKPFMSLGISIMIKKPQKSKPGVFSFLDPLAYEIWMCIVFAYIGVSVVLFLVSRFSPYEWHLEDNNEEPRDPQSPPDPPNEFGIFNSLWFSLGAFMQQGCDISPRSLSGRIVGGVWWFFTLIIISSYTANLAAFLTVERMVSPIESAEDLAKQTEIAYGTLDSGSTKEFFRRSKIAVYEKMWSYMKSAEPSVFTKTTADGVARVRKSKGKFAFLLESTMNEYIEQRKPCDTMKVGGNLDSKGYGVATPKGSALRTPVNLAVLKLSEQGILDKLKNKWWYDKGECGAKDSGSKDKTSALSLSNVAGVFYILVGGLGLAMMVALIEFCYKSRAESKRMKLTKNTQNFKPAPATNTQNYATYREGYNVYGTESVKI

SEQ ID NO: 47706 - protein, 164 aa, Homo sapiens
MARQKKMGQSVLRAVFFLVLGLLGHSHGGFPNTISIGGLFMRNTVQEHSAFRFAVQLYNTNQNTTEKPFHLNYHVDHLDSSNSFSVTNACPAERDYLPWPGSIRENNWTALPCCKDHGLLHLKCSPGGPAKTGPIVSGALQVNCKMRTRSQVSTTSSLLEFSTE

SEQ ID NO: 47707 - protein, 164 aa, Homo sapiens; identical to SEQ ID NO: 47706

SEQ ID NO: 47708 - protein, 662 aa, Homo sapiens
MLQGGEESRLFGSLLWTLPWRGLFMRNTVQEHSAFRFAVQLYNTNQNTTEKPFHLNYHVDHLDSSNSFSVTNAFCSQFSRGVYAIFGFYDQMSMNTLTSFCGALHTSFVTPSFPTDADVQFVIQMRPALKGAILSLLGHYKWEKFVYLYDTERGFSILQAIMEAAVQNNWQVTARSVGNIKDVQEFRRIIEEMDRRQEKRYLIDCEVERINTILEQVVILGKHSRGYHYMLANLGFTDILLERVMHGGANITGFQIVNNENPMVQQFIQRWVRLDEREFPEAKNAPLKYTSALTHDAILVIAEAFRYLRRQRVDVSRRGSAGDCLANPAVPWSQGIDIERALKMVQVQGMTGNIQFDTYGRRTNYTIDVYEMKVSGSRKAGYWNEYERFVPFSDQQISNDSASSENRTIVVTTILESPYVMYKKNHEQLEGNERYEGYCVDLAYEIAKHVRIKYKLSIVGDGKYGARDPETKIWNGMVGELVYGRADIAVAPLTITLVREEVIDFSKPFMSLGISIMIKKPQKSKPGVFSFLDPLAYEIWMCIVFAYIGVSVVLFLVSRFSPYEWHLEDNNEEPRDPQSPPDPPNEFGIFNSLWFSLGAFMQQGCDISPRFVFVAYSMPHCILWSYSIHVHMVFIHLNSRFFSFNIPSNDRLSSSHCVCLCP

SEQ ID NO: 47709 - protein, 824 aa, Homo sapiens
MARQKKMGQSVLRAVFFLVLGLLGHSHGGFPNTISIGGLFMRNTVQEHSAFRFAVQLYNTNQNTTEKPFHLNYHVDHLDSSNSFSVTNAFCSQFSRGVYAIFGFYDQMSMNTLTSFCGALHTSFVTPSFPTDADVQFVIQMRPALKGAILSLLGHYKWEKFVYLYDTERGFSILQAIMEAAVQNNWQVTARSVGNIKDVQEFRRIIEEMDRRQEKRYLIDCEVERINTILEQVVILGKHSRGYHYMLANLGFTDILLERVMHGGANITGFQIVNNENPMVQQFIQRWVRLDEREFPEAKNAPLKYTSALTHDAILVIAEAFRYLRRQRVDVSRRGSAGDCLANPAVPWSQGIDIERALKMVQVQGMTGNIQFDTYGRRTNYTIDVYEMKVSGSRKAGYWNEYERFVPFSDQQISNDSASSENRTIVVTTILESPYVMYKKNHEQLEGNERYEGYCVDLAYEIAKHVRIKYKLSIVGDGKYGARDPETKIWNGMVGELVYGRADIAVAPLTITLVREEVIDFSKPFMSLGISIMIKKPQKSKPGVFSFLDPLAYEIWMCIVFAYIGVSVVLFLVSRFSPYEWHLEDNNEEPRDPQSPPDPPNEFGIFNSLWFSLGAFMQQGCDISPRSLSGRIVGGVWWFFTLIIISSYTANLAAFLTVERMVSPIESAEDLAKQTEIAYGTLDSGSTKEFFRRSKIAVYEKMWSYMKSAEPSVFTKTTADGVARVRKSKGKFAFLLESTMNEYIEQRKPCDTMKVGGNLDSKGYGVATPKGSALRNAVNLAVLKLNEQGLLDKLKNKWWYDKGECGSGGGDSKNACKPCSIETQ

SEQ ID NO: 47710 - protein, 902 aa, Homo sapiens
MRIISRQIVLLFSGFWGLAMGAFPSSVQIGGLFIRNTDQEYTAFRLAIFLHNTSPNASEAPFNLVPHVDNIETANSFAVTNAFCSQYSRGVFAIFGLYDKRSVHTLTSFCSALHISLITPSFPTEGESQFVLQLRPSLRGALLSLLDHYEWNCFVFLYDTDRGYSILQAIMEKAGQNGWHVSAICVENFNDVSYRQLLEELDRRQEKKFVIDCEIERLQNILEQIVSVGKHVKGYHYIIANLGFKDISLERFIHGGANVTGFQLVDFNTPMVIKLMDRWKKLDQREYPGSETPPKYTSALTYDGVLVMAETFRSLRRQKIDISRRGNAGDCLANPAAPWGQGIDMERTLKQVRIQGLTGNVQFDHYGRRVNYTMDVFELKSTGPRKVGYWNDMDKLVLIQDVPTLGNDTAAIENRTVVVTTIMESPYVMYKKNHEMFEGNDKYEGYCVDLASEIAKHIGIKYKIAIVPDGKYGARDADTKIWNGMVGELVYGKAEIAIAPLTITLVREEVIDFSKPFMSLGISIMIKKPQKSKPGVFSFLDPLAYEIWMCIVFAYIGVSVVLFLVSRFSPYEWHTEEPEDGKEGPSDQPPNEFGIFNSLWFSLGAFMQQGCDISPRSLSGRIVGGVWWFFTLIIISSYTANLAAFLTVERMVSPIESAEDLAKQTEIAYGTLDSGSTKEFFRRSKIAVYEKMWTYMRSAEPSVFTRTTAEGVARVRKSKGKFAFLLESTMNEYIEQRKPCDTMKVGGNLDSKGYGVATPKGSSLRTPVNLAVLKLSEAGVLDKLKNKWWYDKGECGPKDSGSKDKTSALSLSNVAGVFYILVGGLGLAMLVALIEFCYKSRAEAKRMKLTFSEAIRNKARLSITGSVGENGRVLTPDCPKAVHTGTAIRQSSGLAVIASDLP

SEQ ID NO: 47711 - protein, 433 aa, Homo sapiens
MRIISRQIVLLFSGFWGLAMGAFPSSVQIGGLFIRNTDQEYTAFRLAIFLHNTSPNASEAPFNLVPHVDNIETANSFAVTNAFCSQYSRGVFAIFGLYDKRSVHTLTSFCSALHISLITPSFPTEGESQFVLQLRPSLRGALLSLLDHYEWNCFVFLYDTDRGYSILQAIMEKAGQNGWHVSAICVENFNDVSYRQLLEELDRRQEKKFVIDCEIERLQNILEQIVSVGKHVKGYHYIIANLGFKDISLERFIHGGANVTGFQLVDFNTPMVIKLMDRWKKLDQREYPGSETPPKYTSALTYDGVLVMAETFRSLRRQKIDISRRGNAGDCLANPAAPWGQGIDMERTLKQVRIQGLTGNVQFDHYGRRVNYTMDVFELKSTGPRKVGYWNDMDKLVLIQDVPTLGNDTAAIENRTVVVTTIMPLMKNPILRN

SEQ ID NO: 47712 - protein, 884 aa, Homo sapiens
MRIISRQIVLLFSGFWGLAMGAFPSSVQIGGLFIRNTDQEYTAFRLAIFLHNTSPNASEAPFNLVPHVDNIETANSFAVTNAFCSQYSRGVFAIFGLYDKRSVHTLTSFCSALHISLITPSFPTEGESQFVLQLRPSLRGALLSLLDHYEWNCFVFLYDTDRGYSILQAIMEKAGQNGWHVSAICVENFNDVSYRQLLEELDRRQEKKFVIDCEIERLQNILEQIVSVGKHVKGYHYIIANLGFKDISLERFIHGGANVTGFQLVDFNTPMVIKLMDRWKKLDQREYPGSETPPKYTSALTYDGVLVMAETFRSLRRQKIDISRRGNAGDCLANPAAPWGQGIDMERTLKQVRIQGLTGNVQFDHYGRRVNYTMDVFELKSTGPRKVGYWNDMDKLVLIQDVPTLGNDTAAIENRTVVVTTIMESPYVMYKKNHEMFEGNDKYEGYCVDLASEIAKHIGIKYKIAIVPDGKYGARDADTKIWNGMVGELVYGKAEIAIAPLTITLVREEVIDFSKPFMSLGISIMIKKPQKSKPGVFSFLDPLAYEIWMCIVFAYIGVSVVLFLVSRFSPYEWHTEEPEDGKEGPSDQPPNEFGIFNSLWFSLGAFMQQGCDISPRSLSGRIVGGVWWFFTLIIISSYTANLAAFLTVERMVSPIESAEDLAKQTEIAYGTLDSGSTKEFFRRSKIAVYEKMWTYMRSAEPSVFTRTTAEGVARVRKSKGKFAFLLESTMNEYIEQRKPCDTMKVGGNLDSKGYGVATPKGSSLRNAVNLAVLKLNEQGLLDKLKNKWWYDKGECGSGGGDSKDKTSALSLSNVAGVFYILVGGLGLAMLVALIEFCYKSRAEAKRMKVAKSAQTFNPTSSQNTQNLATYREGYNVYGTESIKI

SEQ ID NO: 47713 - protein, 433 aa, Homo sapiens; identical to SEQ ID NO: 47711

SEQ ID NO: 47714 - protein, 884 aa, Homo sapiens; identical to SEQ ID NO: 47712

SEQ ID NO: 47715 - protein, 82 aa, Homo sapiens
MRIISRQIVLLFSGFWGLAMGAFPSSVQIGGLFIRNTDQEYTAFRLAIFLHNTSPNASEAPFNLVPHVDNIETANSFAVTNA

SEQ ID NO: 47716 - protein, 82 aa, Homo sapiens; identical to SEQ ID NO: 47715

SEQ ID NO: 47717 - protein, 902 aa, Homo sapiens; identical to SEQ ID NO: 47710

SEQ ID NO: 47718 - protein, 119 aa, Homo sapiens
MRSAEPSVFTRTTAEGVARVRKSKGKFAFLLESTMNEYIEQRKPCDTMKVGGNLDSKGYGVATPKGSSLRNAVNLAVLKLNEQGLLDKLKNKWWYDKGECGSGGGDSKNSCKPCRFETQ

SEQ ID NO: 47719 - protein, 906 aa, Homo sapiens
MQHIFAFFCTGFLGAVVGANFPNNIQIGGLFPNQQSQEHAAFRFALSQLTEPPKLLPQIDIVNISDSFEMTYRFCSQFSKGVYAIFGFYERRTVNMLTSFCGALHVCFITPSFPVDTSNQFVLQLRPELQDALISIIDHYKWQKFVYIYDADRGLSVLQKVLDTAAEKNWQVTAVNILTTTEEGYRMLFQDLEKKKERLVVVDCESERLNAILGQIIKLEKNGIGYHYILANLGFMDIDLNKFKESGANVTGFQLVNYTDTIPAKIMQQWKNSDARDHTRVDWKRPKYTSALTYDGVKVMAEAFQSLRRQRIDISRRGNAGDCLANPAVPWGQGIDIQRALQQVRFEGLTGNVQFNEKGRRTNYTLHVIEMKHDGIRKIGYWNEDDKFVPAATDAQAGGDNSSVQNRTYIVTTILEDPYVMLKKNANQFEGNDRYEGYCVELAAEIAKHVGYSYRLEIVSDGKYGARDPDTKAWNGMVGELVYGRADVAVAPLTITLVREEVIDFSKPFMSLGISIMIKKPQKSKPGVFSFLDPLAYEIWMCIVFAYIGVSVVLFLVSRFSPYEWHSEEFEEGRDQTTSDQSNEFGIFNSLWFSLGAFMQQGCDISPRSLSGRIVGGVWWFFTLIIISSYTANLAAFLTVERMVSPIESAEDLAKQTEIAYGTLEAGSTKEFFRRSKIAVFEKMWTYMKSAEPSVFVRTTEEGMIRVRKSKGKYAYLLESTMNEYIEQRKPCDTMKVGGNLDSKGYGIATPKGSALRNPVNLAVLKLNEQGLLDKLKNKWWYDKGECGSGGGDSKDKTSALSLSNVAGVFYILIGGLGLAMLVALIEFCYKSRSESKRMKGFCLIPQQSINEAIRTSTLPRNSGAGASSGGSGENGRVVSHDFPKSMQSIPCMSHSSGMPLGATGL

SEQ ID NO: 47720 - protein, 906 aa, Homo sapiens
MQHIFAFFCTGFLGAVVGANFPNNIQIGGLFPNQQSQEHAAFRFALSQLTEPPKLLPQIDIVNISDSFEMTYRFCSQFSKGVYAIFGFYERRTVNMLTSFCGALHVCFITPSFPVDTSNQFVLQLRPELQDALISIIDHYKWQKFVYIYDADRGLSVLQKVLDTAAEKNWQVTAVNILTTTEEGYRMLFQDLEKKKERLVVVDCESERLNAILGQIIKLEKNGIGYHYILANLGFMDIDLNKFKESGANVTGFQLVNYTDTIPAKIMQQWKNSDARDHTRVDWKRPKYTSALTYDGVKVMAEAFQSLRRQRIDISRRGNAGDCLANPAVPWGQGIDIQRALQQVRFEGLTGNVQFNEKGRRTNYTLHVIEMKHDGIRKIGYWNEDDKFVPAATDAQAGGDNSSVQNRTYIVTTILEDPYVMLKKNANQFEGNDRYEGYCVELAAEIAKHVGYSYRLEIVSDGKYGARDPDTKAWNGMVGELVYGRADVAVAPLTITLVREEVIDFSKPFMSLGISIMIKKPQKSKPGVFSFLDPLAYEIWMCIVFAYIGVSVVLFLVSRFSPYEWHSEEFEEGRDQTTSDQSNEFGIFNSLWFSLGAFMQQGCDISPRSLSGRIVGGVWWFFTLIIISSYTANLAAFLTVERMVSPIESAEDLAKQTEIAYGTLEAGSTKEFFRRSKIAVFEKMWTYMKSAEPSVFVRTTEEGMIRVRKSKGKYAYLLESTMNEYIEQRKPCDTMKVGGNLDSKGYGIATPKGSALRGPVNLAVLKLSEQGVLDKLKSKWWYDKGECGSKDSGSKDKTSALSLSNVAGVFYILIGGLGLAMLVALIEFCYKSRSESKRMKGFCLIPQQSINEAIRTSTLPRNSGAGASSGGSGENGRVVSHDFPKSMQSIPCMSHSSGMPLGATGL

SEQ ID NO: 47721 - protein, 916 aa, Homo sapiens
MCCSTHLFQPLQLAGGLEWPWSNLLCFLTPVKLHPEVWGLFPNQQSQEHAAFRFALSQLTEPPKLLPQIDIVNISDSFEMTYRFCSQFSKGVYAIFGFYERRTVNMLTSFCGALHVCFITPSFPVDTSNQFVLQLRPELQDALISIIDHYKWQKFVYIYDADRGLSVLQKVLDTAAEKNWQVTAVNILTTTEEGYRMLFQDLEKKKERLVVVDCESERLNAILGQIIKLEKNGIGYHYILANLGFMDIDLNKFKESGANVTGFQLVNYTDTIPAKIMQQWKNSDARDHTRVDWKRPKYTSALTYDGVKVMAEAFQSLRRQRIDISRRGNAGDCLANPAVPWGQGIDIQRALQQVRFEGLTGNVQFNEKGRRTNYTLHVIEMKHDGIRKIGYWNEDDKFVPAATDAQAGGDNSSVQNRTYIVTTILEDPYVMLKKNANQFEGNDRYEGYCVELAAEIAKHVGYSYRLEIVSDGKYGARDPDTKAWNGMVGELVYGRADVAVAPLTITLVREEVIDFSKPFMSLGISIMIKKPQKSKPGVFSFLDPLAYEIWMCIVFAYIGVSVVLFLVSRFSPYEWHSEEFEEGRDQTTSDQSNEFGIFNSLWFSLGAFMQQGCDISPRSLSGRIVGGVWWFFTLIIISSYTANLAAFLTVERMVSPIESAEDLAKQTEIAYGTLEAGSTKEFFRRSKIAVFEKMWTYMKSAEPSVFVRTTEEGMIRVRKSKGKYAYLLESTMNEYIEQRKPCDTMKVGGNLDSKGYGIATPKGSALRGPVNLAVLKLSEQGVLDKLKSKWWYDKGECGSKDSGSKDKTSALSLSNVAGVFYILIGGLGLAMLVALIEFCYKSRSESKRMKGFCLIPQQSINEAIRTSTLPRNSGAGASSGGSGENGRVVSHDFPKSMQSIPCMSHSSGMPLGATGL

SEQ ID NO: 47722 - protein, 826 aa, Homo sapiens
MQHIFAFFCTGFLGAVVGANFPNNIQIGGLFPNQQSQEHAAFRFALSQLTEPPKLLPQIDIVNISDSFEMTYRCLSVLQKVLDTAAEKNWQVTAVNILTTTEEGYRMLFQDLEKKKERLVVVDCESERLNAILGQIIKLEKNGIGYHYILANLGFMDIDLNKFKESGANVTGFQLVNYTDTIPAKIMQQWKNSDARDHTRVDWKRPKYTSALTYDGVKVMAEAFQSLRRQRIDISRRGNAGDCLANPAVPWGQGIDIQRALQQVRFEGLTGNVQFNEKGRRTNYTLHVIEMKHDGIRKIGYWNEDDKFVPAATDAQAGGDNSSVQNRTYIVTTILEDPYVMLKKNANQFEGNDRYEGYCVELAAEIAKHVGYSYRLEIVSDGKYGARDPDTKAWNGMVGELVYGRADVAVAPLTITLVREEVIDFSKPFMSLGISIMIKKPQKSKPGVFSFLDPLAYEIWMCIVFAYIGVSVVLFLVSRFSPYEWHSEEFEEGRDQTTSDQSNEFGIFNSLWFSLGAFMQQGCDISPRSLSGRIVGGVWWFFTLIIISSYTANLAAFLTVERMVSPIESAEDLAKQTEIAYGTLEAGSTKEFFRRSKIAVFEKMWTYMKSAEPSVFVRTTEEGMIRVRKSKGKYAYLLESTMNEYIEQRKPCDTMKVGGNLDSKGYGIATPKGSALRNPVNLAVLKLNEQGLLDKLKNKWWYDKGECGSGGGDSKDKTSALSLSNVAGVFYILIGGLGLAMLVALIEFCYKSRSESKRMKGFCLIPQQSINEAIRTSTLPRNSGAGASSGGSGENGRVVSHDFPKSMQSIPCMSHSSGMPLGATGL

SEQ ID NO: 47723 - protein, 916 aa, Homo sapiens
MCCSTHLFQPLQLAGGLEWPWSNLLCFLTPVKLHPEVWGLFPNQQSQEHAAFRFALSQLTEPPKLLPQIDIVNISDSFEMTYRFCSQFSKGVYAIFGFYERRTVNMLTSFCGALHVCFITPSFPVDTSNQFVLQLRPELQDALISIIDHYKWQKFVYIYDADRGLSVLQKVLDTAAEKNWQVTAVNILTTTEEGYRMLFQDLEKKKERLVVVDCESERLNAILGQIIKLEKNGIGYHYILANLGFMDIDLNKFKESGANVTGFQLVNYTDTIPAKIMQQWKNSDARDHTRVDWKRPKYTSALTYDGVKVMAEAFQSLRRQRIDISRRGNAGDCLANPAVPWGQGIDIQRALQQVRFEGLTGNVQFNEKGRRTNYTLHVIEMKHDGIRKIGYWNEDDKFVPAATDAQAGGDNSSVQNRTYIVTTILEDPYVMLKKNANQFEGNDRYEGYCVELAAEIAKHVGYSYRLEIVSDGKYGARDPDTKAWNGMVGELVYGRADVAVAPLTITLVREEVIDFSKPFMSLGISIMIKKPQKSKPGVFSFLDPLAYEIWMCIVFAYIGVSVVLFLVSRFSPYEWHSEEFEEGRDQTTSDQSNEFGIFNSLWFSLGAFMQQGCDISPRSLSGRIVGGVWWFFTLIIISSYTANLAAFLTVERMVSPIESAEDLAKQTEIAYGTLEAGSTKEFFRRSKIAVFEKMWTYMKSAEPSVFVRTTEEGMIRVRKSKGKYAYLLESTMNEYIEQRKPCDTMKVGGNLDSKGYGIATPKGSALRNPVNLAVLKLNEQGLLDKLKNKWWYDKGECGSGGGDSKDKTSALSLSNVAGVFYILIGGLGLAMLVALIEFCYKSRSESKRMKGFCLIPQQSINEAIRTSTLPRNSGAGASSGGSGENGRVVSHDFPKSMQSIPCMSHSSGMPLGATGL

SEQ ID NO: 47724 - protein, 716 aa, Homo sapiens
MQHIFAFFCTGFLGAVVGANFPNNIQIVCSQFSKGVYAIFGFYERRTVNMLTSFCGALHVCFITPSFPVDTSNQFVLQLRPELQDALISIIDHYKWQKFVYIYDADRGLSVLQKVLDTAAEKNWQVTAVNILTTTEEGYRMLFQDLEKKKERLVVVDCESERLNAILGQIIKLEKNGIGYHYILANLGFMDIDLNKFKESGANVTGFQLVNYTDTIPAKIMQQWKNSDARDHTRVDWKRPKYTSALTYDGVKVMAEAFQSLRRQRIDISRRGNAGDCLANPAVPWGQGIDIQRALQQVRFEGLTGNVQFNEKGRRTNYTLHVIEMKHDGIRKIGYWNEDDKFVPAATDAQAGGDNSSVQNRTYIVTTILEDPYVMLKKNANQFEGNDRYEGYCVELAAEIAKHVGYSYRLEIVSDGKYGARDPDTKAWNGMVGELVYGRADVAVAPLTITLVREEVIDFSKPFMSLGISIMIKKPQKSKPGVFSFLDPLAYEIWMCIVFAYIGVSVVLFLVSRFSPYEWHSEEFEEGRDQTTSDQSNEFGIFNSLWFSLGAFMQQGCDISPRSLSGRIVGGVWWFFTLIIISSYTANLAAFLTVERMVSPIESAEDLAKQTEIAYGTLEAGSTKEFFRRSKIAVFEKMWTYMKSAEPSVFVRTTEEGMIRVRKSKGKYAYLLESTMNEYIEQRKPCDTMKVGGNLDSKGYGIATPKGSALRTRQAL

SEQ ID NO: 47725 - protein, 906 aa, Homo sapiens; identical to SEQ ID NO: 47720

SEQ ID NO: 47726 - protein, 837 aa, Homo sapiens
MTYRFCSQFSKGVYAIFGFYERRTVNMLTSFCGALHVCFITPSFPVDTSNQFVLQLRPELQDALISIIDHYKWQKFVYIYDADRGLSVLQKVLDTAAEKNWQVTAVNILTTTEEGYRMLFQDLEKKKERLVVVDCESERLNAILGQIIKLEKNGIGYHYILANLGFMDIDLNKFKESGANVTGFQLVNYTDTIPAKIMQQWKNSDARDHTRVDWKRPKYTSALTYDGVKVMAEAFQSLRRQRIDISRRGNAGDCLANPAVPWGQGIDIQRALQQVRFEGLTGNVQFNEKGRRTNYTLHVIEMKHDGIRKIGYWNEDDKFVPAATDAQAGGDNSSVQNRTYIVTTILEDPYVMLKKNANQFEGNDRYEGYCVELAAEIAKHVGYSYRLEIVSDGKYGARDPDTKAWNGMVGELVYGRADVAVAPLTITLVREEVIDFSKPFMSLGISIMIKKPQKSKPGVFSFLDPLAYEIWMCIVFAYIGVSVVLFLVSRFSPYEWHSEEFEEGRDQTTSDQSNEFGIFNSLWFSLGAFMQQGCDISPRSLSGRIVGGVWWFFTLIIISSYTANLAAFLTVERMVSPIESAEDLAKQTEIAYGTLEAGSTKEFFRRSKIAVFEKMWTYMKSAEPSVFVRTTEEGMIRVRKSKGKYAYLLESTMNEYIEQRKPCDTMKVGGNLDSKGYGIATPKGSALRNPVNLAVLKLNEQGLLDKLKNKWWYDKGECGSGGGDSKDKTSALSLSNVAGVFYILIGGLGLAMLVALIEFCYKSRSESKRMKGFCLIPQQSINEAIRTSTLPRNSGAGASSGGSGENGRVVSHDFPKSMQSIPCMSHSSGMPLGATGL

SEQ ID NO: 47727 - protein, 883 aa, Homo sapiens
MQKIMHISVLLSPVLWGLIFGVSSNSIQIGGLFPRGADQEYSAFRVGMVQFSTSEFRLTPHIDNLEVANSFAVTNAFCSQFSRGVYAIFGFYDKKSVNTITSFCGTLHVSFITPSFPTDGTHPFVIQMRPDLKGALLSLIEYYQWDKFAYLYDSDRGLSTLQAVLDSAAEKKWQVTAINVGNINNDKKDEMYRSLFQDLELKKERRVILDCERDKVNDIVDQVITIGKHVKGYHYIIANLGFTDGDLLKIQFGGANVSGFQIVDYDDSLVSKFIERWSTLEEKEYPGAHTTTIKYTSALTYDAVQVMTEAFRNLRKQRIEISRRGNAGDCLANPAVPWGQGVEIERALKQVQVEGLSGNIKFDQNGKRINYTINIMELKTNGPRKIGYWSEVDKMVVTLTELPSGNDTSGLENKTVVVTTILESPYVMMKKNHEMLEGNERYEGYCVDLAAEIAKHCGFKYKLTIVGDGKYGARDADTKIWNGMVGELVYGKADIAIAPLTITLVREEVIDFSKPFMSLGISIMIKKPQKSKPGVFSFLDPLAYEIWMCIVFAYIGVSVVLFLVSRFSPYEWHTEEFEDGRETQSSESTNEFGIFNSLWFSLGAFMQQGCDISPRSLSGRIVGGVWWFFTLIIISSYTANLAAFLTVERMVSPIESAEDLSKQTEIAYGTLDSGSTKEFFRRSKIAVFDKMWTYMRSAEPSVFVRTTAEGVARVRKSKGKYAYLLESTMNEYIEQRKPCDTMKVGGNLDSKGYGIATPKGSSLRNAVNLAVLKLNEQGLLDKLKNKWWYDKGECGSGGGDSKEKTSALSLSNVAGVFYILVGGLGLAMLVALIEFCYKSRAEAKRMKVAKNAQNINPSSSQNSQNFATYKEGYNVYGIESVKI

SEQ ID NO: 47728 - protein, 883 aa, Homo sapiens
MQKIMHISVLLSPVLWGLIFGVSSNSIQIGGLFPRGADQEYSAFRVGMVQFSTSEFRLTPHIDNLEVANSFAVTNAFCSQFSRGVYAIFGFYDKKSVNTITSFCGTLHVSFITPSFPTDGTHPFVIQMRPDLKGALLSLIEYYQWDKFAYLYDSDRGLSTLQAVLDSAAEKKWQVTAINVGNINNDKKDEMYRSLFQDLELKKERRVILDCERDKVNDIVDQVITIGKHVKGYHYIIANLGFTDGDLLKIQFGGANVSGFQIVDYDDSLVSKFIERWSTLEEKEYPGAHTTTIKYTSALTYDAVQVMTEAFRNLRKQRIEISRRGNAGDCLANPAVPWGQGVEIERALKQVQVEGLSGNIKFDQNGKRINYTINIMELKTNGPRKIGYWSEVDKMVVTLTELPSGNDTSGLENKTVVVTTILESPYVMMKKNHEMLEGNERYEGYCVDLAAEIAKHCGFKYKLTIVGDGKYGARDADTKIWNGMVGELVYGKADIAIAPLTITLVREEVIDFSKPFMSLGISIMIKKPQKSKPGVFSFLDPLAYEIWMCIVFAYIGVSVVLFLVSRFSPYEWHTEEFEDGRETQSSESTNEFGIFNSLWFSLGAFMQQGCDISPRSLSGRIVGGVWWFFTLIIISSYTANLAAFLTVERMVSPIESAEDLSKQTEIAYGTLDSGSTKEFFRRSKIAVFDKMWTYMRSAEPSVFVRTTAEGVARVRKSKGKYAYLLESTMNEYIEQRKPCDTMKVGGNLDSKGYGIATPKGSSLRTPVNLAVLKLSEQGVLDKLKNKWWYDKGECGAKDSGSKEKTSALSLSNVAGVFYILVGGLGLAMLVALIEFCYKSRAEAKRMKVAKNAQNINPSSSQNSQNFATYKEGYNVYGIESVKI

SEQ ID NO: 47729 - protein, 730 aa, Homo sapiens
MVQFSTSEFRLTPHIDNLEVANSFAVTNAFCSQFSRGVYAIFGFYDKKSVNTITSFCGTLHVSFITPSFPTDGTHPFVIQMRPDLKGALLSLIEYYQWDKFAYLYDSDRGLSTLQAVLDSAAEKKWQVTAINVGNINNDKKDEMYRSLFQDLELKKERRVILDCERDKVNDIVDQVITIGKHVKGYHYIIANLGFTDGDLLKIQFGGANVSGFQIVDYDDSLVSKFIERWSTLEEKEYPGAHTTTIKYTSALTYDAVQVMTEAFRNLRKQRIEISRRGNAGDCLANPAVPWGQGVEIERALKQVQVEGLSGNIKFDQNGKRINYTINIMELKTNGPRKIGYWSEVDKMVVTLTELPSGNDTSGLENKTVVVTTILESPYVMMKKNHEMLEGNERYEGYCVDLAAEIAKHCGFKYKLTIVGDGKYGARDADTKIWNGMVGELVYGKADIAIAPLTITLVREEVIDFSKPFMSLGISIMIKKPQKSKPGVFSFLDPLAYEIWMCIVFAYIGVSVVLFLVSRFSPYEWHTEEFEDGRETQSSESTNEFGIFNSLWFSLGAFMQQGCDISPRSLSGRIVGGVWWFFTLIIISSYTANLAAFLTVERMVSPIESAEDLSKQTEIAYGTLDSGSTKEFFRRSKIAVFDKMWTYMRSAEPSVFVRTTAEGVARVRKSKGKYAYLLESTMNEYIEQRKPCDTMKVGGNLDSKGYGIATPKGSSLSGVTFKTLLFVCCG

SEQ ID NO: 47730 - protein, 98 aa, Homo sapiens
MNEYIEQRKPCDTMKVGGNLDSKGYGIATPKGSSLSGVTFKTLICLLWINAVNLAVLKLNEQGLLDKLKNKWWYDKGECGSGGGDSKNPSKSCSIETQ

SEQ ID NO: 47731 - protein, 836 aa, Homo sapiens; identical to SEQ ID NO: 47698

SEQ ID NO: 47732 - protein, 145 aa, Homo sapiens
MVQFSTSEFRLTPHIDNLEVANSFAVTNAFCSQFSRGVYAIFGFYDKKSVNTITSFCGTLHVSFITPSFPTDGTHPFVIQMRPDLKGALLSLIEYYQWDKFAYLYDSDRGLSTLQAVLDSAAEKKWQVTAINVGNINNDKKDEMY

SEQ ID NO: 47733 - protein, 57 aa, Homo sapiens
MVQFSTSEFRLTPHIDNLEVANSFAVTNAFCSQFSRGVYAIFGFYDKKSVNTITSFC

SEQ ID NO: 47734 - protein, 836 aa, Homo sapiens; identical to SEQ ID NO: 47698

SEQ ID NO: 47735 - protein, 125 aa, Homo sapiens
MQKIMHISVLLSPVLWGLIFGVSSNSIQIGGLFPRGADQEYSAFRVGMVQFSTSEFRLTPHIDNLEVANSFAVTNAFCSQFSRGVYAIFGFYDKKSVNTITSFCGTLHVSFITPSFPTDGTHPFV

SEQ ID NO: 47736 - protein, 48 aa, Homo sapiens
MQKIMHISVLLSPVLWGLIFGVSSNSIQIGGLFPRGADQEYSAFRVGM

SEQ ID NO: 47737 - protein, 1009 aa, Homo sapiens
MEALTLWLLPWICQCVSVRADSIIHIGAIFEENAAKDDRVFQLAVSDLSLNDDILQSEKITYSIKVIEANNPFQAVQEACDLMTQGILALVTSTGCASANALQSLTDAMHIPHLFVQRNPGGSPRTACHLNPSPDGEAYTLASRPPVRLNDVMLRLVTELRWQKFVMFYDSEYDIRGLQSFLDQASRLGLDVSLQKVDKNISHVFTSLFTTMKTEELNRYRDTLRRAILLLSPQGAHSFINEAVETNLASKDSHWVFVNEEISDPEILDLVHSALGRMTVVRQIFPSAKDNQKCTRNNHRISSLLCDPQEGYLQMLQISNLYLYDSVLMLANAFHRKLEDRKWHSMASLNCIRKSTKPWNGGRSMLDTIKKGHITGLTGVMEFREDSSNPYVQFEILGTTYSETFGKDMRKLATWDSEKGLNGSLQERPMGSRLQGLTLKVVTVLEEPFVMVAENILGQPKRYKGFSIDVLDALAKALGFKYEIYQAPDGRYGHQLHNTSWNGMIGELISKRADLAISAITITPERESVVDFSKRYMDYSVGILIKKPEEKISIFSLFAPFDFAVWACIAAAIPVVGVLIFVLNRIQAVRAQSAAQPRPSASATLHSAIWIVYGAFVQQGGESSVNSMAMRIVMGSWWLFTLIVCSSYTANLAAFLTVSRMDNPIRTFQDLSKQVEMSYGTVRDSAVYEYFRAKGTNPLEQDSTFAELWRTISKNGGADNCVSSPSEGIRKAKKGNYAFLWDVAVVEYAALTDDDCSVTVIGNSISSKGYGIALQHGSPYRDLFSQRILELQDTGDLDVLKQKWWPHMGRCDLTSHASAQADGKSLKLHSFAGVFCILAIGLLLACLVAALELWWNSNRCHQETPKEDKEVNLEQVHRRMNSLMDEDIAHKQISPASIELSALEMGGLAPTQTLEPTREYQNTQLSVSTFLPEQSSHGTSRTLSSGPSSNLPLPLSSSATMPSMQCKHRSPNGGLFRQSPVKTPIPMSFQPVPGGVLPEALDTSHGTSI

SEQ ID NO: 47738 - protein, 580 aa, Homo sapiens
MGSRLQGLTLKVVTVLEEPFVMVAENILGQPKRYKGFSIDVLDALAKALGFKYEIYQAPDGRYGHQLHNTSWNGMIGELISKRADLAISAITITPERESVVDFSKRYMDYSVGILIKKPEEKISIFSLFAPFDFAVWACIAAAIPVVGVLIFVLNRIQAVRAQSAAQPRPSASATLHSAIWIVYGAFVQQGGESSVNSMAMRIVMGSWWLFTLIVCSSYTANLAAFLTVSRMDNPIRTFQDLSKQVEMSYGTVRDSAVYEYFRAKGTNPLEQDSTFAELWRTISKNGGADNCVSSPSEGIRKAKKGNYAFLWDVAVVEYAALTDDDCSVTVIGNSISSKGYGIALQHGSPYRDLFSQRILELQDTGDLDVLKQKWWPHMGRCDLTSHASAQADGKSLKLHSFAGVFCILAIGLLLACLVAALELWWNSNRCHQETPKEDKEVNLEQVHRRMNSLMDEDIAHKQISPASIELSALEMGGLAPTQTLEPTREYQNTQLSVSTFLPEQSSHGTSRTLSSGPSSNLPLPLSSSATMPSMQCKHRSPNGGLFRQSPVKTPIPMSFQPVPGGVLPEALDTSHGTSI

SEQ ID NO: 47739 - protein, 1007 aa, Homo sapiens
MEVFPFLLVLSVWWSRTWDSANADSIIHIGAIFDESAKKDDEVFRTAVGDLNQNEEILQTEKITFSVTFVDGNNPFQAVQEACELMNQGILALVSSIGCTSAGSLQSLADAMHIPHLFIQRSTAGTPRSGCGLTRSNRNDDYTLSVRPPVYLHDVILRVVTEYAWQKFIIFYDSEYDIRGIQEFLDKVSQQGMDVALQKVENNINKMITTLFDTMRIEELNRYRDTLRRAILVMNPATAKSFITEVVETNLVAFDCHWIIINEEINDVDVQELVRRSIGRLTIIRQTFPVPQNISQRCFRGNHRISSTLCDPKDPFAQNMEISNLYIYDTVLLLANAFHKKLEDRKWHSMASLSCIRKNSKPWQGGRSMLETIKKGGVSGLTGELEFGENGGNPNVHFEILGTNYGEELGRGVRKLGCWNPVTGLNGSLTDKKLENNMRGVVLRVVTVLEEPFVMVSENVLGKPKKYQGFSIDVLDALSNYLGFNYEIYVAPDHKYGSPQEDGTWNGLVGELVFKRADIGISALTITPDRENVVDFTTRYMDYSVGVLLRRAEKTVDMFACLAPFDLSLWACIAGTVLLVGLLVYLLNWLNPPRLQMGSMTSTTLYNSMWFVYGSFVQQGGEVPYTTLATRMMMGAWWLFALIVISSYTANLAAFLTITRIESSIQSLQDLSKQTEIPYGTVLDSAVYEHVRMKGLNPFERDSMYSQMWRMINRSNGSENNVLESQAGIQKVKYGNYAFVWDAAVLEYVAINDPDCSFYTIGNTVADRGYGIALQHGSPYRDVFSQRILELQQNGDMDILKHKWWPKNGQCDLYSSVDTKQKGGALDIKSFAGVFCILAAGIVLSCFIAMLETWWNKRKGSRVPSKEDDKEIDLEHLHRRVNSLCTDDDSPHKQFSTSSIDLTPLDIDTLPTRQALEQISDFRNTHITTTTFIPEQIQTLSRTLSAKAASGFTFGNVPEHRTGPFRHRAPNGGFFRSPIKTMSSIPYQPTPTLGLNLGNDPDRGTSI

SEQ ID NO: 47740 - protein, 912 aa, Homo sapiens
MEVFPFLLVLSVWWSRTWDSANADSIIHIGAIFDESAKKDDEVFRTAVGDLNQNEEILQTEKITFSVTFVDGNNPFQAVQEDIRGIQEFLDKVSQQGMDVALQKVENNINKMITTLFDTMRIEELNRYRDTLRRAILVMNPATAKSFITEVVETNLVAFDCHWIIINEEINDVDVQELVRRSIGRLTIIRQTFPVPQNISQRCFRGNHRISSTLCDPKDPFAQNMEISNLYIYDTVLLLANAFHKKLEDRKWHSMASLSCIRKNSKPWQGGRSMLETIKKGGVSGLTGELEFGENGGNPNVHFEILGTNYGEELGRGVRKLGCWNPVTGLNGSLTDKKLENNMRGVVLRVVTVLEEPFVMVSENVLGKPKKYQGFSIDVLDALSNYLGFNYEIYVAPDHKYGSPQEDGTWNGLVGELVFKRADIGISALTITPDRENVVDFTTRYMDYSVGVLLRRAEKTVDMFACLAPFDLSLWACIAGTVLLVGLLVYLLNWLNPPRLQMGSMTSTTLYNSMWFVYGSFVQQGGEVPYTTLATRMMMGAWWLFALIVISSYTANLAAFLTITRIESSIQSLQDLSKQTEIPYGTVLDSAVYEHVRMKGLNPFERDSMYSQMWRMINRSNGSENNVLESQAGIQKVKYGNYAFVWDAAVLEYVAINDPDCSFYTIGNTVADRGYGIALQHGSPYRDVFSQRILELQQNGDMDILKHKWWPKNGQCDLYSSVDTKQKGGALDIKSFAGVFCILAAGIVLSCFIAMLETWWNKRKGSRVPSKEDDKEIDLEHLHRRVNSLCTDDDSPHKQFSTSSIDLTPLDIDTLPTRQALEQISDFRNTHITTTTFIPEQIQTLSRTLSAKAASGFTFGNVPEHRTGPFRHRAPNGGFFRSPIKTMSSIPYQPTPTLGLNLGNDPDRGTSI

SEQ ID NO: 47741 - protein, 920 aa, Homo sapiens
MEHGTLLAQPGLWTRDTSWALLYFLCYILPQTAPQVLRIGGIFETVENEPVNVEELAFKFAVTSINRNRTLMPNTTLTYDIQRINLFDSFEASRRACDQLALGVAALFGPSHSSSVSAVQSICNALEVPHIQTRWKHPSVDNKDLFYINLYPDYAAISRAILDLVLYYNWKTVTVVYEDSTGLIRLQELIKAPSRYNIKIKIRQLPSGNKDAKPLLKEMKKGKEFYVIFDCSHETAAEILKQILFMGMMTEYYHYFFTTLDLFALDLELYRYSGVNMTGFRLLNIDNPHVSSIIEKWSMERLQAPPRPETGLLDGMMTTEAALMYDAVYMVAIASHRASQLTVSSLQCHRHKPWRLGPRFMNLIKEATARWDGLTGHITFNKTNGLRKDFDLDIISLKEEGTEKAAGEVSKHLYKVWKKIGIWNSNSGLNMTDSNKDKSSNITDSLANRTLIVTTILEEPYVMYRKSDKPLYGNDRFEGYCLDLLKELSNILGFIYDVKLVPDGKYGAQNDKGEWNGMVKELIDHRADLAVAPLTITYVREKVIDFSKPFMTLGISILYRKPNGTNPGVFSFLNPLSPDIWMYVLLACLGVSCVLFVIARFTPYEWYNPHPCNPDSDVVENNFTLLNSFWFGVGALMQQGSELMPKALSTRIVGGIWWFFTLIIISSYTANLAAFLTVERMESPIDSADDLAKQTKIEYGAVRDGSTMTFFKKSKISTYEKMWAFMSSRQQTALVRNSDEGIQRVLTTDYALLMESTSIEYVTQRNCNLTQIGGLIDSKGYGVGTPIGSPYRDKITIAILQLQEEGKLHMMKEKWWRGNGCPEEDNKEASALGVENIGGIFIVLAAGLVLSVFVAIGEFIYKSRKNNDIEQAFCFFYGLQCKQTHPTNSTSGTTLSTDLECGKLIREERGIRKQSSVHTV

SEQ ID NO: 47742 - protein, 949 aa, Homo sapiens
MEHGTLLAQPGLWTRDTSWALLYFLCYILPQTAPQVLRIGGIFETVENEPVNVEELAFKFAVTSINRNRTLMPNTTLTYDIQRINLFDSFEASRRACDQLALGVAALFGPSHSSSVSAVQSICNALEVPHIQTRWKHPSVDNKDLFYINLYPDYAAISRAILDLVLYYNWKTVTVVYEDSTGLIRLQELIKAPSRYNIKIKIRQLPSGNKDAKPLLKEMKKGKEFYVIFDCSHETAAEILKQILFMGMMTEYYHYFFTTLDLFALDLELYRYSGVNMTGFRLLNIDNPHVSSIIEKWSMERLQAPPRPETGLLDGMMTTEAALMYDAVYMVAIASHRASQLTVSSLQCHRHKPWRLGPRFMNLIKEARWDGLTGHITFNKTNGLRKDFDLDIISLKEEGTEKAAGEVSKHLYKVWKKIGIWNSNSGLNMTDSNKDKSSNITDSLANRTLIVTTILEEPYVMYRKSDKPLYGNDRFEGYCLDLLKELSNILGFIYDVKLVPDGKYGAQNDKGEWNGMVKELIDHRADLAVAPLTITYVREKVIDFSKPFMTLGISILYRKPNGTNPGVFSFLNPLSPDIWMYVLLACLGVSCVLFVIARFTPYEWYNPHPCNPDSDVVENNFTLLNSFWFGVGALMQQGSELMPKALSTRIVGGIWWFFTLIIISSYTANLAAFLTVERMESPIDSADDLAKQTKIEYGAVRDGSTMTFFKKSKISTYEKMWAFMSSRQQTALVRNSDEGIQRVLTTDYALLMESTSIEYVTQRNCNLTQIGGLIDSKGYGVGTPIGSPYRDKITIAILQLQEEGKLHMMKEKWWRGNGCPEEDNKEASALGVENIGGIFIVLAAGLVLSVFVAIGEFIYKSRKNNDIEQKGKSSRIRFYFRNKVRFHGRKKQSLGVEKCLSFNAIMEELGISLKNQKKIKKKSRTKGKSSFTSILTCHQRRTQRKETVA

SEQ ID NO: 47743 - protein, 871 aa, Homo sapiens
MEHGTLLAQPGLWTRDTSWALLYFLCYILPQTAPQVLRIGGIFETVENEPVNVEELAFKFAVTSINRNRTLMPNTTLTYDIQRINLFDSFEASRRACDQLALGVAALFGPSHSSSVSAVQSICNALEVPHIQTRWKHPSVDNKDLFYINLYPDYAAISRAILDLVLYYNWKTVTVVYEDSTGLIRLQELIKAPSRYNIKIKIRQLPSGNKDAKPLLKEMKKGKEFYVIFDCSHETAAEILKQILFMGMMTEYYHYFFTTLDLFALDLELYRYSGVNMTGFRLLNIDNPHVSSIIEKWSMERLQAPPRPETGLLDGMMTTEAALMYDAVYMVAIASHRASQLTVSSLQCHRHKPWRLGPRFMNLIKEARWDGLTGHITFNKTNGLRKDFDLDIISLKEEGTEKAAGEVSKHLYKVWKKIGIWNSNSGLNMTDSNKDKSSNITDSLANRTLIVTTILEEPYVMYRKSDKPLYGNDRFEGYCLDLLKELSNILGFIYDVKLVPDGKYGAQNDKGEWNGMVKELIDHRADLAVAPLTITYVREKVIDFSKPFMTLGISILYRKPNGTNPGVFSFLNPLSPDIWMYVLLACLGVSCVLFVIARFTPYEWYNPHPCNPDSDVVENNFTLLNSFWFGVGALMQQGSELMPKALSTRIVGGIWWFFTLIIISSYTANLAAFLTVERMESPIDSADDLAKQTKIEYGAVRDGSTMTFFKKSKISTYEKMWAFMSSRQQTALVRNSDEGIQRVLTTDYALLMESTSIEYVTQRNCNLTQIGGLIDSKGYGVGTPIGSPYRDKITIAILQLQEEGKLHMMKEKWWRGNGCPEEDNKEASALGVENIGGIFIVLAAGLVLSVFVAIGEFIYKSRKNNDIEQHY

SEQ ID NO: 47744 - protein, 905 aa, Homo sapiens
MEHGTLLAQPGLWTRDTSWALLYFLCYILPQTAPQVLRIGGIFETVENEPVNVEELAFKFAVTSINRNRTLMPNTTLTYDIQRINLFDSFEASRRACDQLALGVAALFGPSHSSSVSAVQSICNALEVPHIQTRWKHPSVDNKDLFYINLYPDYAAISRAILDLVLYYNWKTVTVVYEDSTGLIRLQELIKAPSRYNIKIKIRQLPSGNKDAKPLLKEMKKGKEFYVIFDCSHETAAEILKQILFMGMMTEYYHYFFTTLDLFALDLELYRYSGVNMTGFRLLNIDNPHVSSIIEKWSMERLQAPPRPETGLLDGMMTTEAALMYDAVYMVAIASHRASQLTVSSLQCHRHKPWRLGPRFMNLIKEARWDGLTGHITFNKTNGLRKDFDLDIISLKEEGTEKIGIWNSNSGLNMTDSNKDKSSNITDSLANRTLIVTTILEEPYVMYRKSDKPLYGNDRFEGYCLDLLKELSNILGFIYDVKLVPDGKYGAQNDKGEWNGMVKELIDHRADLAVAPLTITYVREKVIDFSKPFMTLGISILYRKPNGTNPGVFSFLNPLSPDIWMYVLLACLGVSCVLFVIARFTPYEWYNPHPCNPDSDVVENNFTLLNSFWFGVGALMQQGSELMPKALSTRIVGGIWWFFTLIIISSYTANLAAFLTVERMESPIDSADDLAKQTKIEYGAVRDGSTMTFFKKSKISTYEKMWAFMSSRQQTALVRNSDEGIQRVLTTDYALLMESTSIEYVTQRNCNLTQIGGLIDSKGYGVGTPIGSPYRDKITIAILQLQEEGKLHMMKEKWWRGNGCPEEDNKEASALGVENIGGIFIVLAAGLVLSVFVAIGEFIYKSRKNNDIEQCLSFNAIMEELGISLKNQKKIKKKSRTKGKSSFTSILTCHQRRTQRKETVA

SEQ ID NO: 47745 - protein, 918 aa, Homo sapiens
MEHGTLLAQPGLWTRDTSWALLYFLCYILPQTAPQVLRIGGIFETVENEPVNVEELAFKFAVTSINRNRTLMPNTTLTYDIQRINLFDSFEASRRACDQLALGVAALFGPSHSSSVSAVQSICNALEVPHIQTRWKHPSVDNKDLFYINLYPDYAAISRAILDLVLYYNWKTVTVVYEDSTGLIRLQELIKAPSRYNIKIKIRQLPSGNKDAKPLLKEMKKGKEFYVIFDCSHETAAEILKQILFMGMMTEYYHYFFTTLDLFALDLELYRYSGVNMTGFRLLNIDNPHVSSIIEKWSMERLQAPPRPETGLLDGMMTTEAALMYDAVYMVAIASHRASQLTVSSLQCHRHKPWRLGPRFMNLIKEARWDGLTGHITFNKTNGLRKDFDLDIISLKEEGTEKAAGEVSKHLYKVWKKIGIWNSNSGLNMTDSNKDKSSNITDSLANRTLIVTTILEEPYVMYRKSDKPLYGNDRFEGYCLDLLKELSNILGFIYDVKLVPDGKYGAQNDKGEWNGMVKELIDHRADLAVAPLTITYVREKVIDFSKPFMTLGISILYRKPNGTNPGVFSFLNPLSPDIWMYVLLACLGVSCVLFVIARFTPYEWYNPHPCNPDSDVVENNFTLLNSFWFGVGALMQQGSELMPKALSTRIVGGIWWFFTLIIISSYTANLAAFLTVERMESPIDSADDLAKQTKIEYGAVRDGSTMTFFKKSKISTYEKMWAFMSSRQQTALVRNSDEGIQRVLTTDYALLMESTSIEYVTQRNCNLTQIGGLIDSKGYGVGTPIGSPYRDKITIAILQLQEEGKLHMMKEKWWRGNGCPEEDNKEASALGVENIGGIFIVLAAGLVLSVFVAIGEFIYKSRKNNDIEQAFCFFYGLQCKQTHPTNSTSGTTLSTDLECGKLIREERGIRKQSSVHTV

SEQ ID NO: 47746 - protein, 903 aa, Homo sapiens
MEHGTLLAQPGLWTRDTSWALLYFLCYILPQTAPQVLRIGGIFETVENEPVNVEELAFKFAVTSINRNRTLMPNTTLTYDIQRINLFDSFEASRRACDQLALGVAALFGPSHSSSVSAVQSICNALEVPHIQTRWKHPSVDNKDLFYINLYPDYAAISRAILDLVLYYNWKTVTVVYEDSTGLIRLQELIKAPSRYNIKIKIRQLPSGNKDAKPLLKEMKKGKEFYVIFDCSHETAAEILKQILFMGMMTEYYHYFFTTLDLFALDLELYRYSGVNMTGFRLLNIDNPHVSSIIEKWSMERLQAPPRPETGLLDGMMTTEAALMYDAVYMVAIASHRASQLTVSSLQCHRHKPWRLGPRFMNLIKEARWDGLTGHITFNKTNGLRKDFDLDIISLKEEGTEKIGIWNSNSGLNMTDSNKDKSSNITDSLANRTLIVTTILEEPYVMYRKSDKPLYGNDRFEGYCLDLLKELSNILGFIYDVKLVPDGKYGAQNDKGEWNGMVKELIDHRADLAVAPLTITYVREKVIDFSKPFMTLGISILYRKPNGTNPGVFSFLNPLSPDIWMYVLLACLGVSCVLFVIARFTPYEWYNPHPCNPDSDVVENNFTLLNSFWFGVGALMQQGSELMPKALSTRIVGGIWWFFTLIIISSYTANLAAFLTVERMESPIDSADDLAKQTKIEYGAVRDGSTMTFFKKSKISTYEKMWAFMSSRQQTALVRNSDEGIQRVLTTDYALLMESTSIEYVTQRNCNLTQIGGLIDSKGYGVGTPIGSPYRDKITIAILQLQEEGKLHMMKEKWWRGNGCPEEDNKEASALGVENIGGIFIVLAAGLVLSVFVAIGEFIYKSRKNNDIEQAFCFFYGLQCKQTHPTNSTSGTTLSTDLECGKLIREERGIRKQSSVHTV

SEQ ID NO: 47747 - protein, 920 aa, Homo sapiens
MEHGTLLAQPGLWTRDTSWALLYFLCYILPQTAPQVLRIGGIFETVENEPVNVEELAFKFAVTSINRNRTLMPNTTLTYDIQRINLFDSFEASRRACDQLALGVAALFGPSHSSSVSAVQSICNALEVPHIQTRWKHPSVDNKDLFYINLYPDYAAISRAILDLVLYYNWKTVTVVYEDSTGLIRLQELIKAPSRYNIKIKIRQLPSGNKDAKPLLKEMKKGKEFYVIFDCSHETAAEILKQILFMGMMTEYYHYFFTTLDLFALDLELYRYSGVNMTGFRLLNIDNPHVSSIIEKWSMERLQAPPRPETGLLDGMMTTEAALMYDAVYMVAIASHRASQLTVSSLQCHRHKPWRLGPRFMNLIKEARWDGLTGHITFNKTNGLRKDFDLDIISLKEEGTEKAAGEVSKHLYKVWKKIGIWNSNSGLNMTDSNKDKSSNITDSLANRTLIVTTILEEPYVMYRKSDKPLYGNDRFEGYCLDLLKELSNILGFIYDVKLVPDGKYGAQNDKGEWNGMVKELIDHRADLAVAPLTITYVREKVIDFSKPFMTLGISILYRKPNGTNPGVFSFLNPLSPDIWMYVLLACLGVSCVLFVIARFTPYEWYNPHPCNPDSDVVENNFTLLNSFWFGVGALMQQGSELMPKALSTRIVGGIWWFFTLIIISSYTANLAAFLTVERMESPIDSADDLAKQTKIEYGAVRDGSTMTFFKKSKISTYEKMWAFMSSRQQTALVRNSDEGIQRVLTTDYALLMESTSIEYVTQRNCNLTQIGGLIDSKGYGVGTPIGSPYRDKITIAILQLQEEGKLHMMKEKWWRGNGCPEEDNKEASALGVENIGGIFIVLAAGLVLSVFVAIGEFIYKSRKNNDIEQCLSFNAIMEELGISLKNQKKIKKKSRTKGKSSFTSILTCHQRRTQRKETVA

SEQ ID NO: 47748 - protein, 934 aa, Homo sapiens
MEHGTLLAQPGLWTRDTSWALLYFLCYILPQTAPQVLRIGGIFETVENEPVNVEELAFKFAVTSINRNRTLMPNTTLTYDIQRINLFDSFEASRRACDQLALGVAALFGPSHSSSVSAVQSICNALEVPHIQTRWKHPSVDNKDLFYINLYPDYAAISRAILDLVLYYNWKTVTVVYEDSTGLIRLQELIKAPSRYNIKIKIRQLPSGNKDAKPLLKEMKKGKEFYVIFDCSHETAAEILKQILFMGMMTEYYHYFFTTLDLFALDLELYRYSGVNMTGFRLLNIDNPHVSSIIEKWSMERLQAPPRPETGLLDGMMTTEAALMYDAVYMVAIASHRASQLTVSSLQCHRHKPWRLGPRFMNLIKEARWDGLTGHITFNKTNGLRKDFDLDIISLKEEGTEKIGIWNSNSGLNMTDSNKDKSSNITDSLANRTLIVTTILEEPYVMYRKSDKPLYGNDRFEGYCLDLLKELSNILGFIYDVKLVPDGKYGAQNDKGEWNGMVKELIDHRADLAVAPLTITYVREKVIDFSKPFMTLGISILYRKPNGTNPGVFSFLNPLSPDIWMYVLLACLGVSCVLFVIARFTPYEWYNPHPCNPDSDVVENNFTLLNSFWFGVGALMQQGSELMPKALSTRIVGGIWWFFTLIIISSYTANLAAFLTVERMESPIDSADDLAKQTKIEYGAVRDGSTMTFFKKSKISTYEKMWAFMSSRQQTALVRNSDEGIQRVLTTDYALLMESTSIEYVTQRNCNLTQIGGLIDSKGYGVGTPIGSPYRDKITIAILQLQEEGKLHMMKEKWWRGNGCPEEDNKEASALGVENIGGIFIVLAAGLVLSVFVAIGEFIYKSRKNNDIEQKGKSSRIRFYFRNKVRFHGRKKQSLGVEKCLSFNAIMEELGISLKNQKKIKKKSRTKGKSSFTSILTCHQRRTQRKETVA

SEQ ID NO: 47749 - protein, 922 aa, Homo sapiens
MEHGTLLAQPGLWTRDTSWALLYFLCYILPQTAPQVLRIGGIFETVENEPVNVEELAFKFAVTSINRNRTLMPNTTLTYDIQRINLFDSFEASRRACDQLALGVAALFGPSHSSSVSAVQSICNALEVPHIQTRWKHPSVDNKDLFYINLYPDYAAISRAILDLVLYYNWKTVTVVYEDSTGLIRLQELIKAPSRYNIKIKIRQLPSGNKDAKPLLKEMKKGKEFYVIFDCSHETAAEILKQILFMGMMTEYYHYFFTTLDLFALDLELYRYSGVNMTGFRLLNIDNPHVSSIIEKWSMERLQAPPRPETGLLDGMMTTEAALMYDAVYMVAIASHRASQLTVSSLQCHRHKPWRLGPRFMNLIKEATARWDGLTGHITFNKTNGLRKDFDLDIISLKEEGTEKAAGEVSKHLYKVWKKIGIWNSNSGLNMTDSNKDKSSNITDSLANRTLIVTTILEEPYVMYRKSDKPLYGNDRFEGYCLDLLKELSNILGFIYDVKLVPDGKYGAQNDKGEWNGMVKELIDHRADLAVAPLTITYVREKVIDFSKPFMTLGISILYRKPNGTNPGVFSFLNPLSPDIWMYVLLACLGVSCVLFVIARFTPYEWYNPHPCNPDSDVVENNFTLLNSFWFGVGALMQQGSELMPKALSTRIVGGIWWFFTLIIISSYTANLAAFLTVERMESPIDSADDLAKQTKIEYGAVRDGSTMTFFKKSKISTYEKMWAFMSSRQQTALVRNSDEGIQRVLTTDYALLMESTSIEYVTQRNCNLTQIGGLIDSKGYGVGTPIGSPYRDKITIAILQLQEEGKLHMMKEKWWRGNGCPEEDNKEASALGVENIGGIFIVLAAGLVLSVFVAIGEFIYKSRKNNDIEQCLSFNAIMEELGISLKNQKKIKKKSRTKGKSSFTSILTCHQRRTQRKETVA

SEQ ID NO: 47750 - protein, 748 aa, Homo sapiens
MEHGTLLAQPGLWTRDTSWALLYFLCYILPQTAPQVLRIACDQLALGVAALFGPSHSSSVSAVQSICNALEVPHIQTRWKHPSVDNKDLFYINLYPDYAAISRAILDLVLYYNWKTVTVVYEDSTGLIRLQELIKAPSRYNIKIKIRQLPSGNKDAKPLLKEMKKGKEFYVIFDCSHETAAEILKQILFMGMMTEYYHYFFTTLDLFALDLELYRYSGVNMTGFRLLNIDNPHVSSIIEKWSMERLQAPPRPETGLLDGMMTTEAALMYDAVYMVAIASHRASQLTVSSLQCHRHKPWRLGPRFMNLIKEARWDGLTGHITFNKTNGLRKDFDLDIISLKEEGTEKIGIWNSNSGLNMTDSNKDKSSNITDSLANRTLIVTTILRADLAVAPLTITYVREKVIDFSKPFMTLGISILYRKPNGTNPGVFSFLNPLSPDIWMYVLLACLGVSCVLFVIARFTPYEWYNPHPCNPDSDVVENNFTLLNSFWFGVGALMQQGSELMPKALSTRIVGGIWWFFTLIIISSYTANLAAFLTVERMESPIDSADDLAKQTKIEYGAVRDGSTMTFFKKSKISTYEKMWAFMSSRQQTALVRNSDEGIQRVLTTDYALLMESTSIEYVTQRNCNLTQIGGLIDSKGYGVGTPIGSPYRDKITIAILQLQEEGKLHMMKEKWWRGNGCPEEDNKEASALGVENIGGIFIVLAAGLVLSVFVAIGEFIYKSRKNNDIEQCLSFNAIMEELGISLKNQ

SEQ ID NO: 47751 - protein, 869 aa, Homo sapiens
MKIIFPILSNPVFRRTVKLLLCLLWIGYSQGTTHVLRFGGIFEYVESGPMGAEELAFRFAVNTINRNRTLLPNTTLTYDTQKINLYDSFEASKKACDQLSLGVAAIFGPSHSSSANAVQSICNALGVPHIQTRWKHQVSDNKDSFYVSLYPDFSSLSRAILDLVQFFKWKTVTVVYDDSTGLIRLQELIKAPSRYNLRLKIRQLPADTKDAKPLLKEMKRGKEFHVIFDCSHEMAAGILKQALAMGMMTEYYHYIFTTLDLFALDVEPYRYSGVNMTGFRILNTENTQVSSIIEKWSMERLQAPPKPDSGLLDGFMTTDAALMYDAVHVVSVAVQQFPQMTVSSLQCNRHKPWRFGTRFMSLIKEAHWEGLTGRITFNKTNGLRTDFDLDVISLKEEGLEKIGTWDPASGLNMTESQKGKPANITDSLSNRSLIVTTILEEPYVLFKKSDKPLYGNDRFEGYCIDLLRELSTILGFTYEIRLVEDGKYGAQDDANGQWNGMVRELIDHKADLAVAPLAITYVREKVIDFSKPFMTLGISILYRKPNGTNPGVFSFLNPLSPDIWMYILLAYLGVSCVLFVIARFSPYEWYNPHPCNPDSDVVENNFTLLNSFWFGVGALMQQGSELMPKALSTRIVGGIWWFFTLIIISSYTANLAAFLTVERMESPIDSADDLAKQTKIEYGAVEDGATMTFFKKSKISTYDKMWAFMSSRRQSVLVKSNEEGIQRVLTSDYAFLMESTTIEFVTQRNCNLTQIGGLIDSKGYGVGTPMGSPYRDKITIAILQLQEEGKLHMMKEKWWRGNGCPEEESKEASALGVQNIGGIFIVLAAGLVLSVFVAVGEFLYKSKKNAQLEKESSIWLVPPYHPDTV

SEQ ID NO: 47752 - protein, 859 aa, Homo sapiens
MGAEELAFRFAVNTINRNRTLLPNTTLTYDTQKINLYDSFEASKKACDQLSLGVAAIFGPSHSSSANAVQSICNALGVPHIQTRWKHQVSDNKDSFYVSLYPDFSSLSRAILDLVQFFKWKTVTVVYDDSTGLIRLQELIKAPSRYNLRLKIRQLPADTKDAKPLLKEMKRGKEFHVIFDCSHEMAAGILKQALAMGMMTEYYHYIFTTLDLFALDVEPYRYSGVNMTGFRILNTENTQVSSIIEKWSMERLQAPPKPDSGLLDGFMTTDAALMYDAVHVVSVAVQQFPQMTVSSLQCNRHKPWRFGTRFMSLIKEAHWEGLTGRITFNKTNGLRTDFDLDVISLKEEGLEKIGTWDPASGLNMTESQKGKPANITDSLSNRSLIVTTILEEPYVLFKKSDKPLYGNDRFEGYCIDLLRELSTILGFTYEIRLVEDGKYGAQDDANGQWNGMVRELIDHKADLAVAPLAITYVREKVIDFSKPFMTLGISILYRKPNGTNPGVFSFLNPLSPDIWMYILLAYLGVSCVLFVIARFSPYEWYNPHPCNPDSDVVENNFTLLNSFWFGVGALMQQGSELMPKALSTRIVGGIWWFFTLIIISSYTANLAAFLTVERMESPIDSADDLAKQTKIEYGAVEDGATMTFFKKSKISTYDKMWAFMSSRRQSVLVKSNEEGIQRVLTSDYAFLMESTTIEFVTQRNCNLTQIGGLIDSKGYGVGTPMGSPYRDKITIAILQLQEEGKLHMMKEKWWRGNGCPEEESKEASALGVQNIGGIFIVLAAGLVLSVFVAVGEFLYKSKKNAQLEKRSFCSAMVEELRMSLKCQRRLKHKPQAPVIVKTEEVINMHTFNDRRLPGKETMA

SEQ ID NO: 47753 - protein, 832 aa, Homo sapiens
MKIIFPILSNPVFRRTVKLLLCLLWIGYSQGTTHVLRFGGIFEYVESGPMGAEELAFRFAVNTINRNRTLLPNTTLTYDTQKINLYDSFEASKKACDQLSLGVAAIFGPSHSSSANAVQSICNALGVPHIQTRWKHQVSDNKDSFYVSLYPDFSSLSRAILDLVQFFKWKTVTVVYDDSTGLIRLQELIKAPSRYNLRLKIRQLPADTKDAKPLLKEMKRGKEFHVIFDCSHEMAAGILKQALAMGMMTEYYHYIFTTLDLFALDVEPYRYSGVNMTGFRILNTENTQVSSIIEKWSMERLQAPPKPDSGLLDGFMTTDAALMYDAVHVVSVAVQQFPQMTVSSLQCNRHKPWRFGTRFMSLIKEAHWEGLTGRITFNKTNGLRTDFDLDVISLKEEGLEKIGTWDPASGLNMTESQKGKPANITDSLSNRSLIVTTILEEPYVLFKKSDKPLYGNDRFEGYCIDLLRELSTILGFTYEIRLVEDGKYGAQDDANGQWNGMVRELIDHKADLAVAPLAITYVREKVIDFSKPFMTLGISILYRKPNGSELMPKALSTRIVGGIWWFFTLIIISSYTANLAAFLTVERMESPIDSADDLAKQTKIEYGAVEDGATMTFFKKSKISTYDKMWAFMSSRRQSVLVKSNEEGIQRVLTSDYAFLMESTTIEFVTQRNCNLTQIGGLIDSKGYGVGTPMGSPYRDKITIAILQLQEEGKLHMMKEKWWRGNGCPEEESKEASALGVQNIGGIFIVLAAGLVLSVFVAVGEFLYKSKKNAQLEKRSFCSAMVEELRMSLKCQRRLKHKPQAPVIVKTEEVINMHTFNDRRLPGKETMA

SEQ ID NO: 47754 - protein, 892 aa, Homo sapiens
MKIIFPILSNPVFRRTVKLLLCLLWIGYSQGTTHVLRFGGIFEYVESGPMGAEELAFRFAVNTINRNRTLLPNTTLTYDTQKINLYDSFEASKKACDQLSLGVAAIFGPSHSSSANAVQSICNALGVPHIQTRWKHQVSDNKDSFYVSLYPDFSSLSRAILDLVQFFKWKTVTVVYDDSTGLIRLQELIKAPSRYNLRLKIRQLPADTKDAKPLLKEMKRGKEFHVIFDCSHEMAAGILKQALAMGMMTEYYHYIFTTLDLFALDVEPYRYSGVNMTGFRILNTENTQVSSIIEKWSMERLQAPPKPDSGLLDGFMTTDAALMYDAVHVVSVAVQQFPQMTVSSLQCNRHKPWRFGTRFMSLIKEAHWEGLTGRITFNKTNGLRTDFDLDVISLKEEGLEKIGTWDPASGLNMTESQKGKPANITDSLSNRSLIVTTILEEPYVLFKKSDKPLYGNDRFEGYCIDLLRELSTILGFTYEIRLVEDGKYGAQDDANGQWNGMVRELIDHKADLAVAPLAITYVREKVIDFSKPFMTLGISILYRKPNGTNPGVFSFLNPLSPDIWMYILLAYLGVSCVLFVIARFSPYEWYNPHPCNPDSDVVENNFTLLNSFWFGVGALMQQGSELMPKALSTRIVGGIWWFFTLIIISSYTANLAAFLTVERMESPIDSADDLAKQTKIEYGAVEDGATMTFFKKSKISTYDKMWAFMSSRRQSVLVKSNEEGIQRVLTSDYAFLMESTTIEFVTQRNCNLTQIGGLIDSKGYGVGTPMGSPYRDKITIAILQLQEEGKLHMMKEKWWRGNGCPEEESKEASALGVQNIGGIFIVLAAGLVLSVFVAVGEFLYKSKKNAQLEKRAKTKLPQDYVFLPILESVSISTVLSSSPSSSSLSSCS

SEQ ID NO: 47755 - protein, 584 aa, Homo sapiens
MKIIFPILSNPVFRRTVKLLLCLLWIGYSQGTTHVLRFGGIFEYVESGPMGAEELAFRFAVNTINRNRTLLPNTTLTYDTQKINLYDSFEASKKACDQLSLGVAAIFGPSHSSSANAVQSICNALGVPHIQTRWKHQVSDNKDSFYVSLYPDFSSLSRAILDLVQFFKWKTVTVVYDDSTGLIRLQELIKAPSRYNLRLKIRQLPADTKDAKPLLKEMKRGKEFHVIFDCSHEMAAGILKQALAMGMMTEYYHYIFTTLDLFALDVEPYRYSGVNMTGFRILNTENTQVSSIIEKWSMERLQAPPKPDSGLLDGFMTTDAALMYDAVHVVSVAVQQFPQMTVSSLQCNRHKPWRFGTRFMSLIKEAHWEGLTGRITFNKTNGLRTDFDLDVISLKEEGLEKIGTWDPASGLNMTESQKGKPANITDSLSNRSLIVTTILEEPYVLFKKSDKPLYGNDRFEGYCIDLLRELSTILGFTYEIRLVEDGKYGAQDDANGQWNGMVRELIDHKADLAVAPLAITYVREKVIDFSKPFMTLGISILYRKPNGTNPGVFSFLNPLSPDIWMYILLAYLGVSCVLFVIARF

SEQ ID NO: 47756 - protein, 869 aa, Homo sapiens; identical to SEQ ID NO: 47751

SEQ ID NO: 47757 - protein, 908 aa, Homo sapiens
MKIIFPILSNPVFRRTVKLLLCLLWIGYSQGTTHVLRFGGIFEYVESGPMGAEELAFRFAVNTINRNRTLLPNTTLTYDTQKINLYDSFEASKKACDQLSLGVAAIFGPSHSSSANAVQSICNALGVPHIQTRWKHQVSDNKDSFYVSLYPDFSSLSRAILDLVQFFKWKTVTVVYDDSTGLIRLQELIKAPSRYNLRLKIRQLPADTKDAKPLLKEMKRGKEFHVIFDCSHEMAAGILKQALAMGMMTEYYHYIFTTLDLFALDVEPYRYSGVNMTGFRILNTENTQVSSIIEKWSMERLQAPPKPDSGLLDGFMTTDAALMYDAVHVVSVAVQQFPQMTVSSLQCNRHKPWRFGTRFMSLIKEAHWEGLTGRITFNKTNGLRTDFDLDVISLKEEGLEKIGTWDPASGLNMTESQKGKPANITDSLSNRSLIVTTILEEPYVLFKKSDKPLYGNDRFEGYCIDLLRELSTILGFTYEIRLVEDGKYGAQDDANGQWNGMVRELIDHKADLAVAPLAITYVREKVIDFSKPFMTLGISILYRKPNGTNPGVFSFLNPLSPDIWMYILLAYLGVSCVLFVIARFSPYEWYNPHPCNPDSDVVENNFTLLNSFWFGVGALMQQGSELMPKALSTRIVGGIWWFFTLIIISSYTANLAAFLTVERMESPIDSADDLAKQTKIEYGAVEDGATMTFFKKSKISTYDKMWAFMSSRRQSVLVKSNEEGIQRVLTSDYAFLMESTTIEFVTQRNCNLTQIGGLIDSKGYGVGTPMGSPYRDKITIAILQLQEEGKLHMMKEKWWRGNGCPEEESKEASALGVQNIGGIFIVLAAGLVLSVFVAVGEFLYKSKKNAQLEKRSFCSAMVEELRMSLKCQRRLKHKPQAPVIVKTEEVINMHTFNDRRLPGKETMA

SEQ ID NO: 47758 - protein, 644 aa, Homo sapiens
GGIFEYVESGPMGAEELAFRFAVNTINRNRTLLPNTTLTYDTQKINLYDSFEASKKACDQLSLGVAAIFGPSHSSSANAVQSICNALGVPHIQTRWKHQVSDNKDSFYVSLYPDFSSLSRAILDLVQFFKWKTVTVVYDDSTGLIRLQELIKAPSRYNLRLKIRQLPADTKDAKPLLKEMKRGKEFHVIFDCSHEMAAGILKQALAMGMMTEYYHYIFTTLDLFALDVEPYRYSGVNMTGFRILNTENTQVSSIIEKWSMERLQAPPKPDSGLLDGFMTTDAALMYDAVHVVSVAVQQFPQMTVSSLQCNRHKPWRFGTRFMSLIKEAHWEGLTGRITFNKTNGLRTDFDLDVISLKEEGLEKIGTWDPASGLNMTESQKGKPANITDSLSNRSLIVTTILEEPYVLFKKSDKPLYGNDRFEGYCIDLLRELSTILGFTYEIRLVEDGKYGAQDDANGQWNGMVRELIDHKSKISTYDKMWAFMSSRRQSVLVKSNEEGIQRVLTSDYAFLMESTTIEFVTQRNCNLTQIGGLIDSKGYGVGTPMGSPYRDKITIAILQLQEEGKLHMMKEKWWRGNGCPEEESKEASALGVQNIGGIFIVLAAGLVLSVFVAVGEFLYKSKKNAQLEKESSIWLVPPYHPDTV

SEQ ID NO: 47759 - protein, 919 aa, Homo sapiens [sequence omitted]

SEQ ID NO: 47760 - protein, 872 aa, Homo sapiens
MTAPWRRLRSLVWEYWAGLLVCAFWIPDSRGMPHVIRIGGIFEYADGPNAQVMNAEEHAFRFSANIINRNRTLLPNTTLTYDIQRIHFHDSFEATKKACDQLALGVVAIFGPSQGSCTNAVQSICNALEVPHIQLRWKHHPLDNKDTFYVNLYPDYASLSHAILDLVQYLKWRSATVVYDDSTGLIRLQELIMAPSRYNIRLKIRQLPIDSDDSRPLLKEMKRGREFRIIFDCSHTMAAQILKQAMAMGMMTEYYHFIFTTLDLYALDLEPYRYSGVNLTGFRILNVDNPHVSAIVEKWSMERLQAAPRSESGLLDGVMMTDAALLYDAVHIVSVCYQRAPQMTVNSLQCHRHKAWRFGGRFMNFIKEAQWEGLTGRIVFNKTSGLRTDFDLDIISLKEDGLEKVGVWSPADGLNITEVAKGRGPNVTDSLTNRSLIVTTVLEEPFVMFRKSDRTLYGNDRFEGYCIDLLKELAHILGFSYEIRLVEDGKYGAQDDKGQWNGMVKELIDHKADLAVAPLTITHVREKAIDFSKPFMTLGVSILYRKPNGTNPSVFSFLNPLSPDIWMYVLLAYLGVSCVLFVIARFSPYEWYDAHPCNPGSEVVENNFTLLNSFWFGMGSLMQQGSELMPKALSTRIIGGIWWFFTLIIISSYTANLAAFLTVERMESPIDSADDLAKQTKIEYGAVKDGATMTFFKKSKISTFEKMWAFMSSKPSALVKNNEEGIQRALTADYALLMESTTIEYVTQRNCNLTQIGGLIDSKGYGIGTPMGSPYRDKITIAILQLQEEDKLHIMKEKWWRGSGCPEEENKEASALGIQKIGGIFIVLAAGLVLSVLVAVGEFVYKLRKTAEREQVSLRAWSLHRMGNGDSR

SEQ ID NO: 47761 - protein, 956 aa, Homo sapiens
MPRVSAPLVLLPAWLVMVACSPHSLRIAAILDDPMECSRGERLSITLAKNRINRAPERLGKAKVEVDIFELLRDSEYETAETMCQILPKGVVAVLGPSSSPASSSIISNICGEKEVPHFKVAPEEFVKFQFQRFTTLNLHPSNTDISVAVAGILNFFNCTTACLICAKAECLLNLEKLLRQFLISKDTLSVRMLDDTRDPTPLLKEIRDDKTATIIIHANASMSHTILLKAAELGMVSAYYTYIFTNLEFSLQRMDSLVDDRVNILGFSIFNQSHAFFQEFAQSLNQSWQENCDHVPFTGPALSSALLFDAVYAVVTAVQELNRSQEIGVKPLSCGSAQIWQHGTSLMNYLRMVELEGLTGHIEFNSKGQRSNYALKILQFTRNGFRQIGQWHVAEGLSMDSHLYASNISDTLFNTTLVVTTILENPYLMLKGNHQEMEGNDRYEGFCVDMLKELAEILRFNYKIRLVGDGVYGVPEANGTWTGMVGELIARKADLAVAGLTITAEREKVIDFSKPFMTLGISILYRVHMGRKPGYFSFLDPFSPGVWLFMLLAYLAVSCVLFLVARLTPYEWYSPHPCAQGRCNLLVNQYSLGNSLWFPVGGFMQQGSTIAPRALSTRCVSGVWWAFTLIIISSYTANLAAFLTVQRMDVPIESVDDLADQTAIEYGTIHGGSSMTFFQNSRYQTYQRMWNYMYSKQPSVFVKSTEEGIARVLNSNYAFLLESTMNEYYRQRNCNLTQIGGLLDTKGYGIGMPVGSVFRDEFDLAILQLQENNRLEILKRKWWEGGKCPKEEDHRAKGLGMENIGGIFVVLICGLIVAIFMAMLEFLWTLRHSEATEVSVCQEMVTELRSIILCQDSIHPRRRRAAVPPPRPPIPEERRPRGTATLSNGKLCGAGEPDQLAQRLAQEAALVARGCTHIRVCPECRRFQGLRARPSPARSEESLEWEKTTNSSEPE

SEQ ID NO: 47762 - protein, 956 aa, Homo sapiens; identical to SEQ ID NO: 47761

SEQ ID NO: 47763 - protein, 980 aa, Homo sapiens
MPAELLLLLIVAFASPSCQVLSSLRMAAILDDQTVCGRGERLALALAREQINGIIEVPAKARVEVDIFELQRDSQYETTDTMCQILPKGVVSVLGPSSSPASASTVSHICGEKEIPHIKVGPEETPRLQYLRFASVSLYPSNEDVSLAVSRILKSFNYPSASLICAKAECLLRLEELVRGFLISKETLSVRMLDDSRDPTPLLKEIRDDKVSTIIIDANASISHLILRKASELGMTSAFYKYILTTMDFPILHLDGIVEDSSNILGFSMFNTSHPFYPEFVRSLNMSWRENCEASTYLGPALSAALMFDAVHVVVSAVRELNRSQEIGVKPLACTSANIWPHGTSLMNYLRMVEYDGLTGRVEFNSKGQRTNYTLRILEKSRQGHREIGVWYSNRTLAMNATTLDINLSQTLANKTLVVTTILENPYVMRRPNFQALSGNERFEGFCVDMLRELAELLRFRYRLRLVEDGLYGAPEPNGSWTGMVGELINRKADLAVAAFTITAEREKVIDFSKPFMTLGISILYRVHMGRKPGYFSFLDPFSPAVWLFMLLAYLAVSCVLFLAARLSPYEWYNPHPCLRARPHILENQYTLGNSLWFPVGGFMQQGSEIMPRALSTRCVSGVWWAFTLIIISSYTANLAAFLTVQRMEVPVESADDLADQTNIEYGTIHAGSTMTFFQNSRYQTYQRMWNYMQSKQPSVFVKSTEEGIARVLNSRYAFLLESTMNEYHRRLNCNLTQIGGLLDTKGYGIGMPLGSPFRDEITLAILQLQENNRLEILKRKWWEGGRCPKEEDHRAKGLGMENIGGIFIVLICGLIIAVFVAVMEFIWSTRRSAESEEVSVCQEMLQELRHAVSCRKTSRSRRRRRPGGPSRALLSLRAVREMRLSNGKLYSAGAGGDAGSAHGGPQRLLDDPGPPSGARPAAPTPCTHVRVCQECRRIQALRASGAGAPPRGLGVPAEATSPPRPRPGPAGPRELAEHE

SEQ ID NO: 47764 - protein, 981 aa, Homo sapiens
MPAELLLLLIVAFASPSCQVLSSLRMAAILDDQTVCGRGERLALALAREQINGIIEVPAKARVEVDIFELQRDSQYETTDTMCQILPKGVVSVLGPSSSPASASTVSHICGEKEIPHIKVGPEETPRLQYLRFASVSLYPSNEDVSLAVSRILKSFNYPSASLICAKAECLLRLEELVRGFLISKETLSVRMLDDSRDPTPLLKEIRDDKVSTIIIDANASISHLILRKASELGMTSAFYKYILTTMDFPILHLDGIVEDSSNILGFSMFNTSHPFYPEFVRSLNMSWRENCEASTYLGPALSAALMFDAVHVVVSAVRELNRSQEIGVKPLACTSANIWPHGTSLMNYLRMVEYDGLTGRVEFNSKGQRTNYTLRILEKSRQGHREIGVWYSNRTLAMNATTLDINLSQTLANKTLVVTTILENPYVMRRPNFQALSGNERFEGFCVDMLRELAELLRFRYRLRLVEDGLYGAPEPNGSWTGMVGELINRKADLAVAAFTITAEREKVIDFSKPFMTLGISILYRVHMGRKPGYFSFLDPFSPAVWLFMLLAYLAVSCVLFLAARLSPYEWYNPHPCLRARPHILENQYTLGNSLWFPVGGFMQQGSEIMPRALSTRCVSGVWWAFTLIIISSYTANLAAFLTVQRMEVPVESADDLADQTNIEYGTIHAGSTMTFFQNSRYQTYQRMWNYMQSKQPSVFVKSTEEGIARVLNSRYAFLLESTMNEYHRRLNCNLTQIGGLLDTKGYGIGMPLGSPFRDEITLAILQLQENNRLEILKRKWWEGGRCPKEEDHRAKGLGMENIGGIFIVLICGLIIAVFVAVMEFIWSTRRSAESEETPALHPAACQCSALGPRTPLKEPSMLLVKVPSTRVQVAFSRTSLRQVCPFLLQHQLSSLYWIQATNVQICCHFSSLKPSPDLTFPPSHRPLSSLLFTALAAVGGLPDASSFFFPPISSCPPLQSGIGPCHSTEATLVTSNFHV

SEQ ID NO: 47765 - protein, 358 aa, Homo sapiens
  VARIANT 1: note = MOD_RES - Any amino acid
XWAFTLIIISSYTANLAAFLTVQRMEVPVESADDLADQTNIEYGTIHAGSTMTFFQNSRYQTYQRMWNYMQSKQPSVFVKSTEEGIARVLNSRYAFLLESTMNEYHRRLNCNLTQIGGLLDTKGYGIGMPLGSPFRDEITLAILQLQENNRLEILKRKWWEGGRCPKEEDHRAKGLGMENIGGIFIVLICGLIIAVFVAVMEFIWSTRRSAESEETPALHPAACQCSALGPRTPLKEPSMLLVKVPSTRVQVAFSRTSLRQVCPFLLQHQLSSLYWIQATNVQICCHFSSLKPSPDLTFPPSHRPLSSLLFTALAAVGGLPDASSFFFPPISSCPPLQSGIGPCHSTEATLVTSNFHV

SEQ ID NO: 47766 - protein, 922 aa, Homo sapiens
MSTMRLLTLALLFSCSVARAACDPKIVNIGAVLSTRKHEQMFREAVNQANKRHGSWKIQLNATSVTHKPNAIQMALSVCEDLISSQVYAILVSHPPTPNDHFTPTPVSYTAGFYRIPVLGLTTRMSIYSDKSIHLSFLRTVPPYSHQSSVWFEMMRVYSWNHIILLVSDDHEGRAAQKRLETLLEERESKAEKVLQFDPGTKNVTALLMEAKELEARVIILSASEDDAATVYRAAAMLNMTGSGYVWLVGEREISGNALRYAPDGILGLQLINGKNESAHISDAVGVVAQAVHELLEKENITDPPRGCVGNTNIWKTGPLFKRVLMSSKYADGVTGRVEFNEDGDRKFANYSIMNLQNRKLVQVGIYNGTHVIPNDRKIIWPGGETEKPRGYQMSTRLKIVTIHQEPFVYVKPTLSDGTCKEEFTVNGDPVKKVICTGPNDTSPGSPRHTVPQCCYGFCIDLLIKLARTMNFTYEVHLVADGKFGTQERVNNSNKKEWNGMMGELLSGQADMIVAPLTINNERAQYIEFSKPFKYQGLTILVKKEIPRSTLDSFMQPFQSTLWLLVGLSVHVVAVMLYLLDRFSPFGRFKVNSEEEEEDALTLSSAMWFSWGVLLNSGIGEGAPRSFSARILGMVWAGFAMIIVASYTANLAAFLVLDRPEERITGINDPRLRNPSDKFIYATVKQSSVDIYFRRQVELSTMYRHMEKHNYESAAEAIQAVRDNKLHAFIWDSAVLEFEASQKCDLVTTGELFFRSGFGIGMRKDSPWKQNVSLSILKSHENGFMEDLDKTWVRYQECDSRSNAPATLTFENMAGVFMLVAGGIVAGIFLIFIEIAYKRHKDARRKQMQLAFAAVNVWRKNLQDRKSGRAEPDPKKKATFRAITSTLASSFKRRRSSKDTQYHPTDITGPLNLSDPSVSTVV

SEQ ID NO: 47767 - protein, 909 aa, Homo sapiens
MSTMRLLTLALLFSCSVARAACDPKIVNIGAVLSTRKHEQMFREAVNQANKRHGSWKIQLNATSVTHKPNAIQMALSVCEDLISSQVYAILVSHPPTPNDHFTPTPVSYTAGFYRIPVLGLTTRMSIYSDKSIHLSFLRTVPPYSHQSSVWFEMMRVYSWNHIILLVSDDHEGRAAQKRLETLLEERESKAEKVLQFDPGTKNVTALLMEAKELEARVIILSASEDDAATVYRAAAMLNMTGSGYVWLVGEREISGNALRYAPDGILGLQLINGKNESAHISDAVGVVAQAVHELLEKENITDPPRGCVGNTNIWKTGPLFKRVLMSSKYADGVTGRVEFNEDGDRKFANYSIMNLQNRKLVQVGIYNGTHVIPNDRKIIWPGGETEKPRGYQMSTRLKIVTIHQEPFVYVKPTLSDGTCKEEFTVNGDPVKKVICTGPNDTSPGSPRHTVPQCCYGFCIDLLIKLARTMNFTYEVHLVADGKFGTQERVNNSNKKEWNGMMGELLSGQADMIVAPLTINNERAQYIEFSKPFKYQGLTILVKKEIPRSTLDSFMQPFQSTLWLLVGLSVHVVAVMLYLLDRFSPFGRFKVNSEEEEEDALTLSSAMWFSWGVLLNSGIGEGAPRSFSARILGMVWAGFAMIIVASYTANLAAFLVLDRPEERITGINDPRLRNPSDKFIYATVKQSSVDIYFRRQVELSTMYRHMEKHNYESAAEAIQAVRDNKLHAFIWDSAVLEFEASQKCDLVTTGELFFRSGFGIGMRKDSPWKQNVSLSILKSHENGFMEDLDKTWVRYQECDSRSNAPATLTFENMAGVFMLVAGGIVAGIFLIFIEIAYKRHKDARRKQMQLAFAAVNVWRKNLQVGQATLRGLVPRARPGHGPPPSPKAVALALALVGRTGARSHGQGQW

SEQ ID NO: 47768 - protein, 943 aa, Homo sapiens
MSTMRLLTLALLFSCSVARAACDPKIVNIGAVLSTRKHEQMFREAVNQANKRHGSWKIQLNATSVTHKPNAIQMALSVCEDLISSQVYAILVSHPPTPNDHFTPTPVSYTAGFYRIPVLGLTTRMSIYSDKSIHLSFLRTVPPYSHQSSVWFEMMRVYSWNHIILLVSDDHEGRAAQKRLETLLEERESKSKKRNYENLDQLSYDNKRGPKAEKVLQFDPGTKNVTALLMEAKELEARVIILSASEDDAATVYRAAAMLNMTGSGYVWLVGEREISGNALRYAPDGILGLQLINGKNESAHISDAVGVVAQAVHELLEKENITDPPRGCVGNTNIWKTGPLFKRVLMSSKYADGVTGRVEFNEDGDRKFANYSIMNLQNRKLVQVGIYNGTHVIPNDRKIIWPGGETEKPRGYQMSTRLKIVTIHQEPFVYVKPTLSDGTCKEEFTVNGDPVKKVICTGPNDTSPGSPRHTVPQCCYGFCIDLLIKLARTMNFTYEVHLVADGKFGTQERVNNSNKKEWNGMMGELLSGQADMIVAPLTINNERAQYIEFSKPFKYQGLTILVKKEIPRSTLDSFMQPFQSTLWLLVGLSVHVVAVMLYLLDRFSPFGRFKVNSEEEEEDALTLSSAMWFSWGVLLNSGIGEGAPRSFSARILGMVWAGFAMIIVASYTANLAAFLVLDRPEERITGINDPRLRNPSDKFIYATVKQSSVDIYFRRQVELSTMYRHMEKHNYESAAEAIQAVRDNKLHAFIWDSAVLEFEASQKCDLVTTGELFFRSGFGIGMRKDSPWKQNVSLSILKSHENGFMEDLDKTWVRYQECDSRSNAPATLTFENMAGVFMLVAGGIVAGIFLIFIEIAYKRHKDARRKQMQLAFAAVNVWRKNLQDRKSGRAEPDPKKKATFRAITSTLASSFKRRRSSKDTQYHPTDITGPLNLSDPSVSTVV

SEQ ID NO: 47769 - protein, 922 aa, Homo sapiens
MSTMRLLTLALLFSCSVARAACDPKIVNIGAVLSTRKHEQMFREAVNQANKRHGSWKIQLNATSVTHKPNAIQMALSVCEDLISSQVYAILVSHPPTPNDHFTPTPVSYTAGFYRIPVLGLTTRMSIYSDKSIHLSFLRTVPPYSHQSSVWFEMMRVYSWNHIILLVSDDHEGRAAQKRLETLLEERESKSKKRNYENLDQLSYDNKRGPKAEKVLQFDPGTKNVTALLMEAKELEARVIILSASEDDAATVYRAAAMLNMTGSGYVWLVGEREISGNALRYAPDGILGLQLINGKNESAHISDAVGVVAQAVHELLEKENITDPPRGCVGNTNIWKTGPLFKRVLMSSKYADGVTGRVEFNEDGDRKFANYSIMNLQNRKLVQVGIYNGTHVIPNDRKIIWPGGETEKPRGYQMSTRLKIVTIHQEPFVYVKPTLSDGTCKEEFTVNGDPVKKVICTGPNDTSPGSPRHTVPQCCYGFCIDLLIKLARTMNFTYEVHLVADGKFGTQERVNNSNKKEWNGMMGELLSGQADMIVAPLTINNERAQYIEFSKPFKYQGLTILVKKEIPRSTLDSFMQPFQSTLWLLVGLSVHVVAVMLYLLDRFSPFGRFKVNSEEEEEDALTLSSAMWFSWGVLLNSGIGEGAPRSFSARILGMVWAGFAMIIVASYTANLAAFLVLDRPEERITGINDPRLRNPSDKFIYATVKQSSVDIYFRRQVELSTMYRHMEKHNYESAAEAIQAVRDNKLHAFIWDSAVLEFEASQKCDLVTTGELFFRSGFGIGMRKDSPWKQNVSLSILKSHENGFMEDLDKTWVRYQECDSRSNAPATLTFENMAGVFMLVAGGIVAGIFLIFIEIAYKRHKDARRKQMQLAFAAVNVWRKNLQSTGGGRGALQNQKDTVLPRRAIEREEGQLQLCSRHRES

SEQ ID NO: 47770 - protein, 906 aa, Homo sapiens
MSTMRLLTLALLFSCSVARAACDPKIVNIGAVLSTRKHEQMFREAVNQANKRHGSWKIQLNATSVTHKPNAIQMALSVCEDLISSQVYAILVSHPPTPNDHFTPTPVSYTAGFYRIPVLGLTTRMSIYSDKSIHLSFLRTVPPYSHQSSVWFEMMRVYSWNHIILLVSDDHEGRAAQKRLETLLEERESKSKKRNYENLDQLSYDNKRGPKAEKVLQFDPGTKNVTALLMEAKELEARVIILSASEDDAATVYRAAAMLNMTGSGYVWLVGEREISGNALRYAPDGILGLQLINGKNESAHISDAVGVVAQAVHELLEKENITDPPRGCVGNTNIWKTGPLFKRVLMSSKYADGVTGRVEFNEDGDRKFANYSIMNLQNRKLVQVGIYNGTHVIPNDRKIIWPGGETEKPRGYQMSTRLKIVTIHQEPFVYVKPTLSDGTCKEEFTVNGDPVKKVICTGPNDTSPGSPRHTVPQCCYGFCIDLLIKLARTMNFTYEVHLVADGKFGTQERVNNSNKKEWNGMMGELLSGQADMIVAPLTINNERAQYIEFSKPFKYQGLTILVKKEIPRSTLDSFMQPFQSTLWLLVGLSVHVVAVMLYLLDRFSPFGRFKVNSEEEEEDALTLSSAMWFSWGVLLNSGIGEGAPRSFSARILGMVWAGFAMIIVASYTANLAAFLVLDRPEERITGINDPRLRNPSDKFIYATVKQSSVDIYFRRQVELSTMYRHMEKHNYESAAEAIQAVRDNKLHAFIWDSAVLEFEASQKCDLVTTGELFFRSGFGIGMRKDSPWKQNVSLSILKSHENGFMEDLDKTWVRYQECDSRSNAPATLTFENMAGVFMLVAGGIVAGIFLIFIEIAYKRHKDARRKQMQLAFAAVNVWRKNLQQYHPTDITGPLNLSDPSVSTVV

SEQ ID NO: 47771 - protein, 938 aa, Homo sapiens
MSTMRLLTLALLFSCSVARAACDPKIVNIGAVLSTRKHEQMFREAVNQANKRHGSWKIQLNATSVTHKPNAIQMALSVCEDLISSQVYAILVSHPPTPNDHFTPTPVSYTAGFYRIPVLGLTTRMSIYSDKSIHLSFLRTVPPYSHQSSVWFEMMRVYSWNHIILLVSDDHEGRAAQKRLETLLEERESKAEKVLQFDPGTKNVTALLMEAKELEARVIILSASEDDAATVYRAAAMLNMTGSGYVWLVGEREISGNALRYAPDGILGLQLINGKNESAHISDAVGVVAQAVHELLEKENITDPPRGCVGNTNIWKTGPLFKRVLMSSKYADGVTGRVEFNEDGDRKFANYSIMNLQNRKLVQVGIYNGTHVIPNDRKIIWPGGETEKPRGYQMSTRLKIVTIHQEPFVYVKPTLSDGTCKEEFTVNGDPVKKVICTGPNDTSPGSPRHTVPQCCYGFCIDLLIKLARTMNFTYEVHLVADGKFGTQERVNNSNKKEWNGMMGELLSGQADMIVAPLTINNERAQYIEFSKPFKYQGLTILVKKEIPRSTLDSFMQPFQSTLWLLVGLSVHVVAVMLYLLDRFSPFGRFKVNSEEEEEDALTLSSAMWFSWGVLLNSGIGEGAPRSFSARILGMVWAGFAMIIVASYTANLAAFLVLDRPEERITGINDPRLRNPSDKFIYATVKQSSVDIYFRRQVELSTMYRHMEKHNYESAAEAIQAVRDNKLHAFIWDSAVLEFEASQKCDLVTTGELFFRSGFGIGMRKDSPWKQNVSLSILKSHENGFMEDLDKTWVRYQECDSRSNAPATLTFENMAGVFMLVAGGIVAGIFLIFIEIAYKRHKDARRKQMQLAFAAVNVWRKNLQDRKSGRAEPDPKKKATFRAITSTLASSFKRRRSSKDTSTGGGRGALQNQKDTVLPRRAIEREEGQLQLCSRHRES

SEQ ID NO: 47772 - protein, 1464 aa, Homo sapiens [sequence omitted]

SEQ ID NO: 47773 - protein, 1464 aa, Homo sapiens [sequence omitted]

SEQ ID NO: 47774 - protein, 1464 aa, Homo sapiens [sequence omitted]

SEQ ID NO: 47775 - protein, 1281 aa, Homo sapiens
MGRVGYWTLLVLPALLVWRGPAPSAAAEKGPPALNIAVMLGHSHDVTERELRTLWGPEQAAGLPLDVNVVALLMNRTDPKSLITHVCDLMSGARIHGLVFGDDTDQEAVAQMLDFISSHTFVPILGIHGGASMIMADKDPTSTFFQFGASIQQQATVMLKIMQDYDWHVFSLVTTIFPGYREFISFVKTTVDNSFVGWDMQNVITLDTSFEDAKTQVQLKKIHSSVILLYCSKDEAVLILSEARSLGLTGYDFFWIVPSLVSGNTELIPKEFPSGLISVSYDDWDYSLEARVRDGIGILTTAASSMLEKFSYIPEAKASCYGQMERPEVPMHTLHPFMVNVTWDGKDLSFTEEGYQVHPRLVVIVLNKDREWEKVGKWENHTLSLRHAVWPRYKSFSDCEPDDNHLSIVTLEEAPFVIVEDIDPLTETCVRNTVPCRKFVKINNSTNEGMNVKKCCKGFCIDILKKLSRTVKFTYDLYLVTNGKHGKKVNNVWNGMIGEVVYQRAVMAVGSLTINEERSEVVDFSVPFVETGISVMVSRSNGTVSPSAFLEPFSASVWVMMFVMLLIVSAIAVFVFEYFSPVGYNRNLAKGKAPHGPSFTIGKAIWLLWGLVFNNSVPVQNPKGTTSKIMVSVWAFFAVIFLASYTANLAAFMIQEEFVDQVTGLSDKKFQRPHDYSPPFRFGTVPNGSTERNIRNNYPYMHQYMTKFNQKGVEDALVSLKTGKLDAFIYDAAVLNYKAGRDEGCKLVTIGSGYIFATTGYGIALQKGSPWKRQIDLALLQFVGDGEMEELETLWLTGICHNEKNEVMSSQLDIDNMAGVFYMLAAAMALSLITFIWEHLFYWKLRFCFTGVCSDRPGLLFSISRGIYSCIHGVHIEEKKKSPDFNLTGSQSNMLKLLRSAKNISSMSNMNSSRMDSPKRAADFIQRGSLIMDMVSDKGNLMYSDNRSFQGKESIFGDNMNELQTFVANRQKDNLNNYVFQGQHPLTLNESNPNTVEVAVSTESKANSRPRQLWKKSVDSIRQDSLSQNPVSQRDEATAENRTHSLKSPRYLPEEMAHSDISETSNRATCHREPDNSKNHKTKDNFKRSVASKYPKDCSEVERTYLKTKSSSPRDKIYTIDGEKEPGFHLDPPQFVENVTLPENVDFPDPYQDPSENFRKGDSTLPMNRNPLHNEEGLSNNDQYKLYSKHFTLKDKGSPHSETSERYRQNSTHCRSCLSNMPTYSGHFTMRSPFKCDACLRMGNLYDIDEDQMLQETGMTNAWLLGDAPRTLTNTRCHPRR

SEQ ID NO: 47776 - protein, 1124 aa, Homo sapiens
MLKIMQDYDWHVFSLVTTIFPGYREFISFVKTTVDNSFVGWDMQNVITLDTSFEDAKTQVQLKKIHSSVILLYCSKDEAVLILSEARSLGLTGYDFFWIVPSLVSGNTELIPKEFPSGLISVSYDDWDYSLEARVRDGIGILTTAASSMLEKFSYIPEAKASCYGQMERPEVPMHTLHPFMVNVTWDGKDLSFTEEGYQVHPRLVVIVLNKDREWEKVGKWENHTLSLRHAVWPRYKSFSDCEPDDNHLSIVTLEEAPFVIVEDIDPLTETCVRNTVPCRKFVKINNSTNEGMNVKKCCKGFCIDILKKLSRTVKFTYDLYLVTNGKHGKKVNNVWNGMIGEVVYQRAVMAVGSLTINEERSEVVDFSVPFVETGISVMVSRSNGTVSPSAFLEPFSASVWVMMFVMLLIVSAIAVFVFEYFSPVGYNRNLAKGKAPHGPSFTIGKAIWLLWGLVFNNSVPVQNPKGTTSKIMVSVWAFFAVIFLASYTANLAAFMIQEEFVDQVTGLSDKKFQRPHDYSPPFRFGTVPNGSTERNIRNNYPYMHQYMTKFNQKGVEDALVSLKTGKLDAFIYDAAVLNYKAGRDEGCKLVTIGSGYIFATTGYGIALQKGSPWKRQIDLALLQFVGDGEMEELETLWLTGICHNEKNEVMSSQLDIDNMAGVFYMLAAAMALSLITFIWEHLFYWKLRFCFTGVCSDRPGLLFSISRGIYSCIHGVHIEEKKKSPDFNLTGSQSNMLKLLRSAKNISSMSNMNSSRMDSPKRAADFIQRGSLIMDMVSDKGNLMYSDNRSFQGKESIFGDNMNELQTFVANRQKDNLNNYVFQGQHPLTLNESNPNTVEVAVSTESKANSRPRQLWKKSVDSIRQDSLSQNPVSQRDEATAENRTHSLKSPRYLPEEMAHSDISETSNRATCHREPDNSKNHKTKDNFKRSVASKYPKDCSEVERTYLKTKSSSPRDKIYTIDGEKEPGFHLDPPQFVENVTLPENVDFPDPYQDPSENFRKGDSTLPMNRNPLHNEEGLSNNDQYKLYSKHFTLKDKGSPHSETSERYRQNSTHCRSCLSNMPTYSGHFTMRSPFKCDACLRMGNLYDIDEDQMLQETGMTNAWLLGDAPRTLTNTRCHPRR

SEQ ID NO: 47777 - protein, 1484 aa, Homo sapiens [sequence omitted]

SEQ ID NO: 47778 - protein, 1233 aa, Homo sapiens
MGGALGPALLLTSLFGAWAGLGPGQGEQGMTVAVVFSSSGPPQAQFRARLTPQSFLDLPLEIQPLTVGVNTTNPSSLLTQICGLLGAAHVHGIVFEDNVDTEAVAQILDFISSQTHVPILSISGGSAVVLTPKEPGSAFLQLGVSLEQQLQVLFKVLEEYDWSAFAVITSLHPGHALFLEGVRAVADASHVSWRLLDVVTLELGPGGPRARTQRLLRQLDAPVFVAYCSREEAEVLFAEAAQAGLVGPGHVWLVPNLALGSTDAPPATFPVGLISVVTESWRLSLRQKVRDGVAILALGAHSYWRQHGTLPAPAGDCRVHPGPVSPAREAFYRHLLNVTWEGRDFSFSPGGYLVQPTMVVIALNRHRLWEMVGRWEHGVLYMKYPVWPRYSASLQPVVDSRHLTVATLEERPFVIVESPDPGTGGCVPNTVPCRRQSNHTFSSGDVAPYTKLCCKGFCIDILKKLARVVKFSYDLYLVTNGKHGKRVRGVWNGMIGEVYYKRADMAIGSLTINEERSEIVDFSVPFVETGISVMVARSNGTVSPSAFLEPYSPAVWVMMFVMCLTVVAITVFMFEYFSPVSYNQNLTRGKKSGGPAFTIGKSVWLLWALVFNNSVPIENPRGTTSKIMVLVWAFFAVIFLASYTANLAAFMIQEQYIDTVSGLSDKKFQRPQDQYPPFRFGTVPNGSTERNIRSNYRDMHTHMVKFNQRSVEDALTSLKMGKLDAFIYDAAVLNYMAGKDEGCKLVTIGSGKVFATTGYGIAMQKDSHWKRAIDLALLQFLGDGETQKLETVWLSGICQNEKNEVMSSKLDIDNMAGVFYMLLVAMGLALLVFAWEHLVYWKLRHSVPNSSQLDFLLAFSRGIYSCFSGVQSLASPPRQASPDLTASSAQASVLKMLQAARDMVTTAGVSSSLDRATRTIENWGGGRRAPPPSPCPTPRSGPSPCLPTPDPPPEPSPTGWGPPDGGRAALVRRAPQPPGRPPTPGPPLSDVSRVSRRPAWEARWPVRTGHCGRHLSASERPLSPARCHYSSFPRADRSGRPFLPLFPELEDLPLLGPEQLARREALLHAAWARGSRPRHASLPSSVAEAFARPSSLPAGCTGPACARPDGHSACRRLAQAQSMCLPIYREACQEGEQAGAPAWQHRQHVCLHAHAHLPFCWGAVCPHLPPCASHGSWLSGAWGPLGHRGRTLGLGTGYRDSGGLDEISRVARGTQGFPGPCTWRRISSLESEV

SEQ ID NO: 47779 - protein, 907 aa, Homo sapiens
RGQGGDTRSKGTRQPEPPGASRDPARSCWDPPVDMGGALGPALLLTSLFGAWAGLGPGQGEQGMTVAVVFSSSGPPQAQFRARLTPQSFLDLPLEIQPLTVGVNTTNPSSLLTQICGLLGAAHVHGIVFEDNVDTEAVAQILDFISSQTHVPILSISGGSAVVLTPKEPGSAFLQLGVSLEQQLQVLFKVLEEYDWSAFAVITSLHPGHALFLEGVRAVADASHVSWRLLDVVTLELGPGGPRARTQRLLRQLDAPVFVAYCSREEAEVLFAEAAQAGLVGPGHVWLVPNLALGSTDAPPATFPVGLISVVTESWRLSLRQKVRDGVAILALGAHSYWRQHGTLPAPAGDCRVHPGPVSPAREAFYRHLLNVTWEGRDFSFSPGGYLVQPTMVVIALNRHRLWEMVGRWEHGVLYMKYPVWPRYSASLQPVVDSRHLTVATLEERPFVIVESPDPGTGGCVPNTVPCRRQSNHTFSSGDVAPYTKLCCKGFCIDILKKLARVVKFSYDLYLVTNGKHGKRVRGVWNGMIGEVYYKRADMAIGSLTINEERSEIVDFSVPFVETGISVMVARSNGTVSPSAFLEPYSPAVWVMMFVMCLTVVAITVFMFEYFSPVSYNQNLTRGKKSGGPAFTIGKSVWLLWALVFNNSVPIENPRGTTSKIMVLVWAFFAVIFLASYTANLAAFMIQEQYIDTVSGLSDKKFQRPQDQYPPFRFGTVPNGSTERNIRSNYRDMHTHMVKFNQRSVEDALTSLKMGKLDAFIYDAAVLNYMAGKDEGCKLVTIGSGKVFATTGYGIAMQKDSHWKRAIDLALLQFLGDGETQKLETVWLSGICQNEKNEVMSSKLDIDNMAGVFYMLLVAMGLALLVFAWEHLVYWKLRHSVPNSSQLDFLLAFSRVGAHPSPHRPKF

SEQ ID NO: 47780 - protein, 1336 aa, Homo sapiens
MRGAGGPRGPRGPAKMLLLLALACASPFPEEAPGPGGAGGPGGGLGGARPLNVALVFSGPAYAAEAARLGPAVAAAVRSPGLDVRPVALVLNGSDPRSLVLQLCDLLSGLRVHGVVFEDDSRAPAVAPILDFLSAQTSLPIVAVHGGAALVLTPKEKGSTFLQLGSSTEQQLQVIFEVLEEYDWTSFVAVTTRAPGHRAFLSYIEVLTDGSLVGWEHRGALTLDPGAGEAVLSAQLRSVSAQIRLLFCAREEAEPVFRAAEEAGLTGSGYVWFMVGPQLAGGGGSGAPGEPPLLPGGAPLPAGLFAVRSAGWRDDLARRVAAGVAVVARGAQALLRDYGFLPELGHDCRAQNRTHRGESLHRYFMNITWDNRDYSFNEDGFLVNPSLVVISLTRDRTWEVVGSWEQQTLRLKYPLWSRYGRFLQPVDDTQHLTVATLEERPFVIVEPADPISGTCIRDSVPCRSQLNRTHSPPPDAPRPEKRCCKGFCIDILKRLAHTIGFSYDLYLVTNGKHGKKIDGVWNGMIGEVFYQRADMAIGSLTINEERSEIVDFSVPFVETGISVMVARSNGTVSPSAFLEPYSPAVWVMMFVMCLTVVAVTVFIFEYLSPVGYNRSLATGKRPGGSTFTIGKSIWLLWALVFNNSVPVENPRGTTSKIMVLVWAFFAVIFLASYTANLAAFMIQEEYVDTVSGLSDRKFQRPQEQYPPLKFGTVPNGSTEKNIRSNYPDMHSYMVRYNQPRVEEALTQLKAGKLDAFIYDAAVLNYMARKDEGCKLVTIGSGKVFATTGYGIALHKGSRWKRPIDLALLQFLGDDEIEMLERLWLSGICHNDKIEVMSSKLDIDNMAGVFYMLLVAMGLSLLVFAWEHLVYWRLRHCLGPTHRMDFLLAFSRGMYSCCSAEAAPPPAKPPPPPQPLPSPAYPAPRPAPGPAPFVPRERASVDRWRRTKGAGPPGGAGLADGFHRYYGPIEPQGLGLGLGEARAAPRGAAGRPLSPPAAQPPQKPPPSYFAIVRDKEPAEPPAGAFPGFPSPPAPPAAAATAVGPPLCRLAFEDESPPAPARWPRSDPESQPLLGPGAGGAGGTGGAGGGAPAAPPPCRAAPPPCPYLDLEPSPSDSEDSESLGGASLGGLEPWWFADFPYPYAERLGPPPGRYWSVDKLGGWRAGSWDYLPPRSGPAAWHCRHCASLELLPPPRHLSCSHDGLDGGWWAPPPPPWAAGPLPRRRARCGCPRSHPHRPRASHRTPAAAAPHHHRHRRAAGGWDLPPPAPTSRSLEDLSSCPRAAPARRLTGPSRHARRCPHAAHWGPPLPTASHRRHRGGDLGTRRGSAHFSSLESEV

SEQ ID NO: 47781 - protein, 371 aa, Homo sapiens
MSHEKSFLVSGDNYPPPNPGYPGGPQPPMPPYAQPPYPGAPYPQPPFQPSPYGQPGYPHGPSPYPQGGYPQGPYPQGGYPQGPYPQEGYPQGPYPQGGYPQGPYPQSPFPPNPYGQPQVFPGQDPDSPQHGNYQEEGPPSYYDNQDFPATNWDDKSIRQAFIRKVFLVLTLQLSVTLSTVSVFTFVAEVKGFVRENVWTYYVSYAVFFISLIVLSCCGDFRRKHPWNLVALSVLTASLSYMVGMIASFYNTEAVIMAVGITTAVCFTVVIFSMQTRYDFTSCMGVLLVSMVVLFIFAILCIFIRNRILEIVYASLGALLFTCFLAVDTQLLLGNKQLSLSPEEYVFAALNLYTDIINIFLYILTIIGRAKE

SEQ ID NO: 47782 - protein, 371 aa, Homo sapiens; identical to SEQ ID NO: 47781

SEQ ID NO: 47783 - protein, 274 aa, Homo sapiens
MSHEKSFLVSGDNYPPPNPGYPGGPQPPMPPYAQPPYPGAPYPQPPFQPSPYGQPGYPHGPSPYPQGGYPQGPYPQGGYPQGPYPQEGYPQGPYPQGGYPQGPYPQSPFPPNPYGQPQVFPGQDPDSPQHGNYQEEGPPSYYDNQDFPATNWDDKSIRQAFIRKVFLVLTLQLSVTLSTVSVFTFVAEVKGFVRENVWTYYVSYAVFFISLIVLSCCGDFRRKHPWNLVALSVLTASLSYMVGMIASFYNTEAVIMAVGITTAVCFTVVIFSMQ

SEQ ID NO: 47784 - protein, 101 aa, Homo sapiens
MSHEKSFLVSGDNYPPPNPGYPGGPQPPMPPYAQPPYPGAPYPQPPFQPSPYGQPGYPHGPSPYPQGGYPQGPYPQGGYPQGPYPQEGYPQGPYPQGGYPQ

SEQ ID NO: 47785 - protein, 352 aa, Homo sapiens
MSHEKSFLVSGDNYPPPYPGAPYPQPPFQPSPYGQPGYPHGPSPYPQGGYPQGPYPQGGYPQGPYPQEGYPQGPYPQGGYPQGPYPQSPFPPNPYGQPQVFPGQDPDSPQHGNYQEEGPPSYYDNQDFPATNWDDKSIRQAFIRKVFLVLTLQLSVTLSTVSVFTFVAEVKGFVRENVWTYYVSYAVFFISLIVLSCCGDFRRKHPWNLVALSVLTASLSYMVGMIASFYNTEAVIMAVGITTAVCFTVVIFSMQTRYDFTSCMGVLLVSMVVLFIFAILCIFIRNRILEIVYASLGALLFTCFLAVDTQLLLGNKQLSLSPEEYVFAALNLYTDIINIFLYILTIIGRAKE

SEQ ID NO: 47786 - protein, 1115 aa, Homo sapiens
MRRLSLWWLLSRVCLLLPPPCALVLAGVPSSSSHPQPCQILKRIGHAVRVGAVHLQPWTTAPRAASRAPDDSRAGAQRDEPEPGTRRSPAPSPGARWLGSTLHGRGPPGSRKPGEGARAEALWPRDALLFAVDNLNRVEGLLPYNLSLEVVMAIEAGLGDLPLLPFSSPSSPWSSDPFSFLQSVCHTVVVQGVSALLAFPQSQGEMMELDLVSLVLHIPVISIVRHEFPRESQNPLHLQLSLENSLSSDADVTVSILTMNNWYNFSLLLCQEDWNITDFLLLTQNNSKFHLGSIINITANLPSTQDLLSFLQIQLESIKNSTPTVVMFGCDMESIRRIFEITTQFGVMPPELRWVLGDSQNVEELRTEGLPLGLIAHGKTTQSVFEHYVQDAMELVARAVATATMIQPELALIPSTMNCMEVETTNLTSGQYLSRFLANTTFRGLSGSIRVKGSTIVSSENNFFIWNLQHDPMGKPMWTRLGSWQGGKIVMDYGIWPEQAQRHKTHFQHPSKLHLRVVTLIEHPFVFTREVDDEGLCPAGQLCLDPMTNDSSTLDSLFSSLHSSNDTVPIKFKKCCYGYCIDLLEKIAEDMNFDFDLYIVGDGKYGAWKNGHWTGLVGDLLRGTAHMAVTSFSINTARSQVIDFTSPFFSTSLGILVRTRDTAAPIGAFMWPLHWTMWLGIFVALHITAVFLTLYEWKSPFGLTPKGRNRSKVFSFSSALNICYALLFGRTVAIKPPKCWTGRFLMNLWAIFCMFCLSTYTANLAAVMVGEKIYEELSGIHDPKLHHPSQGFRFGTVRESSAEDYVRQSFPEMHEYMRRYNVPATPDGVEYLKNDPEKLDAFIMDKALLDYEVSIDADCKLLTVGKPFAIEGYGIGLPPNSPLTANISELISQYKSHGFMDMLHDKWYRVVPCGKRSFAVTETLQMGIKHFSGLFVLLCIGFGLSILTTIGEHIVYRLLLPRIKNKSKLQYWLHTSQRLHRAINTSFIEEKQQHFKTKRVEKRSNVGPRQLTVWNTSNLSHDNRRKYIFSDEEGQNQLGIRIHQDIPLPPRRRELPALRTTNGKADSLNVSRNSVMQELSELEKQIQVIRQELQLAVSRKTELEEYQRTSRTCES

SEQ ID NO: 47787 - protein, 1194 aa, Homo sapiens
MVGLLLFFFPAIFLEVSLLPRSPGRKVLLAGASSQRSVARMDGDVIIGALFSVHHQPPAEKVPERKCGEIREQYGIQRVEAMFHTLDKINADPVLLPNITLGSEIRDSCWHSSVALEQSIEFIRDSLISIRDEKDGINRCLPDGQSLPPGRTKKPIAGVIGPGSSSVAIQVQNLLQLFDIPQIAYSATSIDLSDKTLYKYFLRVVPSDTLQARAMLDIVKRYNWTYVSAVHTEGNYGESGMDAFKELAAQEGLCIAHSDKIYSNAGEKSFDRLLRKLRERLPKARVVVCFCEGMTVRGLLSAMRRLGVVGEFSLIGSDGWADRDEVIEGYEVEANGGITIKLQSPEVRSFDDYFLKLRLDTNTRNPWFPEFWQHRFQCRLPGHLLENPNFKRICTGNESLEENYVQDSKMGFVINAIYAMAHGLQNMHHALCPGHVGLCDAMKPIDGSKLLDFLIKSSFIGVSGEEVWFDEKGDAPGRYDIMNLQYTEANRYDYVHVGTWHEGVLNIDDYKIQMNKSGVVRSVCSEPCLKGQIKVIRKGEVSCCWICTACKENEYVQDEFTCKACDLGWWPNADLTGCEPIPVRYLEWSNIESIIAIAFSCLGILVTLFVTLIFVLYRDTPVVKSSSRELCYIILAGIFLGYVCPFTLIAKPTTTSCYLQRLLVGLSSAMCYSALVTKTNRIARILAGSKKKICTRKPRFMSAWAQVIIASILISVQLTLVVTLIIMEPPMPILSYPSIKEVYLICNTSNLGVVAPLGYNGLLIMSCTYYAFKTRNVPANFNEAKYIAFTMYTTCIIWLAFVPIYFGSNYKIITTCFAVSLSVTVALGCMFTPKMYIIIAKPERNVRSAFTTSDVVRMHVGDGKLPCRSNTFLNIFRRKKAGAGNANSNGKSVSWSEPGGGQVPKGQHMWHRLSVHVKTNETACNQTAVIKPLTKSYQGSGKSLTFSDTSTKTLYNVEEEEDAQPIRFSPPGSPSMVVHRRVPSAATTPPLPSHLTAEETPLFLAEPALPKGLPPPLQQQQQPPPQQKSLMDQLQGVVSNFSTAIPDFHAVLAGPGGPGNGLRSLYPPPPPPQHLQMLPLQLSTFGEELVSPPADDDDDSERFKLLQEYVYEHEREGNTEEDELEEEEEDLQAASKLTPDDSPALTPPSPFRDSVASGSSVPSSPVSESVLCTPPNVSYASVILRDYKQSSSTL

SEQ ID NO: 47788 - protein, 1194 aa, Homo sapiens; identical to SEQ ID NO: 47787

SEQ ID NO: 47789 - protein, 906 aa, Homo sapiens
MVGLLLFFFPAIFLEVSLLPRSPGRKVLLAGASSQRSVARMDGDVIIGALFSVHHQPPAEKVPERKCGEIREQYGIQRVEAMFHTLDKINADPVLLPNITLGSEIRDSCWHSSVALEQSIEFIRDSLISIRDEKDGINRCLPDGQSLPPGRTKKPIAGVIGPGSSSVAIQVQNLLQLFDIPQIAYSATSIDLSDKTLYKYFLRVVPSDTLQARAMLDIVKRYNWTYVSAVHTEGNYGESGMDAFKELAAQEGLCIAHSDKIYSNAGEKSFDRLLRKLRERLPKARVVVCFCEGMTVRGLLSAMRRLGVVGEFSLIGSDGWADRDEVIEGYEVEANGGITIKLQSPEVRSFDDYFLKLRLDTNTRNPWFPEFWQHRFQCRLPGHLLENPNFKRICTGNESLEENYVQDSKMGFVINAIYAMAHGLQNMHHALCPGHVGLCDAMKPIDGSKLLDFLIKSSFIGVSGEEVWFDEKGDAPGRYDIMNLQYTEANRYDYVHVGTWHEGVLNIDDYKIQMNKSGVVRSVCSEPCLKGQIKVIRKGEVSCCWICTACKENEYVQDEFTCKACDLGWWPNADLTGCEPIPVRYLEWSNIESIIAIAFSCLGILVTLFVTLIFVLYRDTPVVKSSSRELCYIILAGIFLGYVCPFTLIAKPTTTSCYLQRLLVGLSSAMCYSALVTKTNRIARILAGSKKKICTRKPRFMSAWAQVIIASILISVQLTLVVTLIIMEPPMPILSYPSIKEVYLICNTSNLGVVAPLGYNGLLIMSCTYYAFKTRNVPANFNEAKYIAFTMYTTCIIWLAFVPIYFGSNYKIITTCFAVSLSVTVALGCMFTPKMYIIIAKPERNVRSAFTTSDVVRMHVGDGKLPCRSNTFLNIFRRKKAGAGNAKKRQPEFSPTSQCPSAHVQL

SEQ ID NO: 47790 - protein, 906 aa, Homo sapiens; identical to SEQ ID NO: 47789

SEQ ID NO: 47791 - protein, 906 aa, Homo sapiens; identical to SEQ ID NO: 47789

SEQ ID NO: 47792 - protein, 872 aa, Homo sapiens [sequence omitted]

SEQ ID NO: 47793 - protein, 70 aa, Homo sapiens [sequence omitted]

SEQ ID NO: 47794 - protein, 879 aa, Homo sapiens
MKMLTRLQVLTLALFSKGFLLSLGDHNFLRREIKIEGDLVLGGLFPINEKGTGTEECGRINEDRGIQRLEAMLFAIDEINKDDYLLPGVKLGVHILDTCSRDTYALEQSLEFVRASLTKVDEAEYMCPDGSYAIQENIPLLIAGVIGGSYSSVSIQVANLLRLFQIPQISYASTSAKLSDKSRYDYFARTVPPDFYQAKAMAEILRFFNWTYVSTVASEGDYGETGIEAFEQEARLRNICIATAEKVGRSNIRKSYDSVIRELLQKPNARVVVLFMRSDDSRELIAAASRANASFTWVASDGWGAQESIIKGSEHVAYGAITLELASQPVRQFDRYFQSLNPYNNHRNPWFRDFWEQKFQCSLQNKRNHRRVCDKHLAIDSSNYEQESKIMFVVNAVYAMAHALHKMQRTLCPNTTKLCDAMKILDGKKLYKDYLLKINFTAPFNPNKDADSIVKFDTFGDGMGRYNVFNFQNVGGKYSYLKVGHWAETLSLDVNSIHWSRNSVPTSQCSDPCAPNEMKNMQPGDVCCWICIPCEPYEYLADEFTCMDCGSGQWPTADLTGCYDLPEDYIRWEDAWAIGPVTIACLGFMCTCMVVTVFIKHNNTPLVKASGRELCYILLFGVGLSYCMTFFFIAKPSPVICALRRLGLGSSFAICYSALLTKTNCIARIFDGVKNGAQRPKFISPSSQVFICLGLILVQIVMVSVWLILEAPGTRRYTLAEKRETVILKCNVKDSSMLISLTYDVILVILCTVYAFKTRKCPENFNEAKFIGFTMYTTCIIWLAFLPIFYVTSSDYRVQTTTMCISVSLSGFVVLGCLFAPKVHIILFQPQKNVVTHRLHLNRFSVSGTGTTYSQSSASTYVPTVCNGREVLDSTTSSL

SEQ ID NO: 47795 - protein, 535 aa, Homo sapiens
MLTRLQVLTLALFSKGFLLSLGDHNFLRREIKIEGDLVLGGLFPINEKGTGTEECGRINEDRGIQRLEAMLFAIDEINKDDYLLPGVKLGVHILDTCSRDTYALEQSLEFVRASLTKVDEAEYMCPDGSYAIQENIPLLIAGVIGGSYSSVSIQVANLLRLFQIPQISYASTSAKLSDKSRYDYFARTVPPDFYQAKAMAEILRFFNWTYVSTVASEGDYGETGIEAFEQEARLRNICIATAEKVGRSNIRKSYDSVIRELLQKPNARVVVLFMRSDDSRELIAAASRANASFTWVASDGWGAQESIIKGSEHVAYGAITLELASQPVRQFDRYFQSLNPYNNHRNPWFRDFWEQKFQCSLQNKRNHRRVCDKHLAIDSSNYEQESKIMFVVNAVYAMAHALHKMQRTLCPNTTKLCDAMKILDGKKLYKDYLLKINFTGADDNHVHLCQPEWLCGLGLFVCTQGSHHPVSTPEECCHTQTAPQQVQCQWNWDHILSVLCKHVCANGVQWAGSPRLHHLISVIVNCSSVLVFLDC

SEQ ID NO: 47796 - protein, 87 aa, Homo sapiens
MKMLTRLQVLTLALFSKGFLLSLGDHNFLRREIKIEGDLVLGGLFPINEKGTGTEECGRINEDRGIQRLEAMLFAIDEINKDDYLLP

SEQ ID NO: 47797 - protein, 537 aa, Homo sapiens
MKMLTRLQVLTLALFSKGFLLSLGDHNFLRREIKIEGDLVLGGLFPINEKGTGTEECGRINEDRGIQRLEAMLFAIDEINKDDYLLPGVKLGVHILDTCSRDTYALEQSLEFVRASLTKVDEAEYMCPDGSYAIQENIPLLIAGVIGGSYSSVSIQVANLLRLFQIPQISYASTSAKLSDKSRYDYFARTVPPDFYQAKAMAEILRFFNWTYVSTVASEGDYGETGIEAFEQEARLRNICIATAEKVGRSNIRKSYDSVIRELLQKPNARVVVLFMRSDDSRELIAAASRANASFTWVASDGWGAQESIIKGSEHVAYGAITLELASQPVRQFDRYFQSLNPYNNHRNPWFRDFWEQKFQCSLQNKRNHRRVCDKHLAIDSSNYEQESKIMFVVNAVYAMAHALHKMQRTLCPNTTKLCDAMKILDGKKLYKDYLLKINFTGADDNHVHLCQPEWLCGLGLFVCTQGSHHPVSTPEECCHTQTAPQQVQCQWNWDHILSVLCKHVCANGVQWAGSPRLHHLISVIVNCSSVLVFLDC

SEQ ID NO: 47798 - protein, 81 aa, Homo sapiens
MKMLTRLQVLTLALFSKGFLLSLGDHNFLRREIKIEGDLVLGGLFPINEKGTGTEECGRINEDRGIQRLEAMLFAIDEINK

SEQ ID NO: 47799 - protein, 751 aa, Homo sapiens
MSQSPGAGSPPPLPPRSAPVPARSCRCEVANLLRLFQIPQISYASTSAKLSDKSRYDYFARTVPPDFYQAKAMAEILRFFNWTYVSTVASEGDYGETGIEAFEQEARLRNICIATAEKVGRSNIRKSYDSVIRELLQKPNARVVVLFMRSDDSRELIAAASRANASFTWVASDGWGAQESIIKGSEHVAYGAITLELASQPVRQFDRYFQSLNPYNNHRNPWFRDFWEQKFQCSLQNKRNHRRVCDKHLAIDSSNYEQESKIMFVVNAVYAMAHALHKMQRTLCPNTTKLCDAMKILDGKKLYKDYLLKINFTAPFNPNKDADSIVKFDTFGDGMGRYNVFNFQNVGGKYSYLKVGHWAETLSLDVNSIHWSRNSVPTSQCSDPCAPNEMKNMQPGDVCCWICIPCEPYEYLADEFTCMDCGSGQWPTADLTGCYDLPEDYIRWEDAWAIGPVTIACLGFMCTCMVVTVFIKHNNTPLVKASGRELCYILLFGVGLSYCMTFFFIAKPSPVICALRRLGLGSSFAICYSALLTKTNCIARIFDGVKNGAQRPKFISPSSQVFICLGLILVQIVMVSVWLILEAPGTRRYTLAEKRETVILKCNVKDSSMLISLTYDVILVILCTVYAFKTRKCPENFNEAKFIGFTMYTTCIIWLAFLPIFYVTSSDYRVQTTTMCISVSLSGFVVLGCLFAPKVHIILFQPQKNVVTHRLHLNRFSVSGTGTTYSQSSASTYVPTVCNGREVLDSTTSSL

SEQ ID NO: 47800 - protein, 471 aa, Homo sapiens
MRRTNHEPEPGCRLTAAAATAVSSSSCQELSVRAPFNPNKDADSIVKFDTFGDGMGRYNVFNFQNVGGKYSYLKVGHWAETLSLDVNSIHWSRNSVPTSQCSDPCAPNEMKNMQPGDVCCWICIPCEPYEYLADEFTCMDCGSGQWPTADLTGCYDLPEDYIRWEDAWAIGPVTIACLGFMCTCMVVTVFIKHNNTPLVKASGRELCYILLFGVGLSYCMTFFFIAKPSPVICALRRLGLGSSFAICYSALLTKTNCIARIFDGVKNGAQRPKFISPSSQVFICLGLILVQIVMVSVWLILEAPGTRRYTLAEKRETVILKCNVKDSSMLISLTYDVILVILCTVYAFKTRKCPENFNEAKFIGFTMYTTCIIWLAFLPIFYVTSSDYRVQTTTMCISVSLSGFVVLGCLFAPKVHIILFQPQKNVVTHRLHLNRFSVSGTGTTYSQSSASTYVPTVCNGREVLDSTTSSL

SEQ ID NO: 47801 - protein, 796 aa, Homo sapiens
MPAWEPGVAASCGWRAPPCSPLRLCIAPHPCTPPSSHQGNLTCRLPPRSFGFCRCVWVRTRGPSLPGEQVSLAAHESEGAAAQLGSSPEIDPRRPRCLLPESAQIPQISYASTAPDLSDNSRYDFFSRVVPSDTYQAQAMVDIVRALKWNYVSTVASEGSYGESGVEAFIQKSREDGGVCIAQSVKIPREPKAGEFDKIIRRLLETSNARAVIIFANEDDIRRVLEAARRANQTGHFFWMGSDSWGSKIAPVLHLEEVAEGAVTILPKRMSVRDRERIGQDSAYEQEGKVQFVIDAVYAMGHALHAMHRDLCPGRVGLCPRMDPVDGTQLLKYIRNVNFSGIAGNPVTFNENGDAPGRYDIYQYQLRNDSAEYKVIGSWTDHLHLRIERMHWPGSGQQLPRSICSLPCQPGERKKTVKGMPCCWHCEPCTGYQYQVDRYTCKTCPYDMRPTENRTGCRPIPIIKLEWGSPWAVLPLFLAVVGIAATLFVVITFVRYNDTPIVKASGRELSYVLLAGIFLCYATTFLMIAEPDLGTCSLRRIFLGLGMSISYAALLTKTNRIYRIFEQGKRSVSAPRFISPASQLAITFSLISLQLLGICVWFVVDPSHSVVDFQDQRTLDPRFARGVLKCDISDLSLICLLGYSMLLMVTCTVYAIKTRGVPETFNEAKPIGFTMYTTCIVWLAFIPIFFGTSQSADKLYIQTTTLTVSVSLSASVSLGMLYMPKVYIILFHPEQNVPKRKRSLKAVVTAATMSNKFTQKGNFRPNGEAKSELCENLEAPALATKQTYVTYTNHAI

SEQ ID NO: 47802 - protein, 912 aa, Homo sapiens
MPGKRGLGWWWARLPLCLLLSLYGPWMPSSLGKPKGHPHMNSIRIDGDITLGGLFPVHGRGSEGKPCGELKKEKGIHRLEAMLFALDRINNDPDLLPNITLGARILDTCSRDTHALEQSLTFVQALIEKDGTEVRCGSGGPPIITKPERVVGVIGASGSSVSIMVANILRLFKIPQISYASTAPDLSDNSRYDFFSRVVPSDTYQAQAMVDIVRALKWNYVSTVASEGSYGESGVEAFIQKSREDGGVCIAQSVKIPREPKAGEFDKIIRRLLETSNARAVIIFANEDDIRRVLEAARRANQTGHFFWMGSDSWGSKIAPVLHLEEVAEGAVTILPKRMSVRGFDRYFSSRTLDNNRRNIWFAEFWEDNFHCKLSRHALKKGSHVKKCTNRERIGQDSAYEQEGKVQFVIDAVYAMGHALHAMHRDLCPGRVGLCPRMDPVDGTQLLKYIRNVNFSGIAGNPVTFNENGDAPGRYDIYQYQLRNDSAEYKVIGSWTDHLHLRIERMHWPGSGQQLPRSICSLPCQPGERKKTVKGMPCCWHCEPCTGYQYQVDRYTCKTCPYDMRPTENRTGCRPIPIIKLEWGSPWAVLPLFLAVVGIAATLFVVITFVRYNDTPIVKASGRELSYVLLAGIFLCYATTFLMIAEPDLGTCSLRRIFLGLGMSISYAALLTKTNRIYRIFEQGKRSVSAPRFISPASQLAITFSLISLQLLGICVWFVVDPSHSVVDFQDQRTLDPRFARGVLKCDISDLSLICLLGYSMLLMVTCTVYAIKTRGVPETFNEAKPIGFTMYTTCIVWLAFIPIFFGTSQSADKLYIQTTTLTVSVSLSASVSLGMLYMPKVYIILFHPEQNVPKRKRSLKAVVTAATMSNKFTQKGNFRPNGEAKSELCENLEAPALATKQTYVTYTNHAI

SEQ ID NO: 47803 - protein, 772 aa, Homo sapiens
MVQTLPKLFPHDGAKRKKRTLRTSGPCFGGGGQIPQISYASTAPDLSDNSRYDFFSRVVPSDTYQAQAMVDIVRALKWNYVSTVASEGSYGESGVEAFIQKSREDGGVCIAQSVKIPREPKAGEFDKIIRRLLETSNARAVIIFANEDDIRRVLEAARRANQTGHFFWMGSDSWGSKIAPVLHLEEVAEGAVTILPKRMSVRGFDRYFSSRTLDNNRRNIWFAEFWEDNFHCKLSRHALKKGSHVKKCTNRERIGQDSAYEQEGKVQFVIDAVYAMGHALHAMHRDLCPGRVGLCPRMDPVDGTQLLKYIRNVNFSGIAGNPVTFNENGDAPGRYDIYQYQLRNDSAEYKVIGSWTDHLHLRIERMHWPGSGQQLPRSICSLPCQPGERKKTVKGMPCCWHCEPCTGYQYQVDRYTCKTCPYDMRPTENRTGCRPIPIIKLEWGSPWAVLPLFLAVVGIAATLFVVITFVRYNDTPIVKASGRELSYVLLAGIFLCYATTFLMIAEPDLGTCSLRRIFLGLGMSISYAALLTKTNRIYRIFEQGKRSVSAPRFISPASQLAITFSLISLQLLGICVWFVVDPSHSVVDFQDQRTLDPRFARGVLKCDISDLSLICLLGYSMLLMVTCTVYAIKTRGVPETFNEAKPIGFTMYTTCIVWLAFIPIFFGTSQSADKLYIQTTTLTVSVSLSASVSLGMLYMPKVYIILFHPEQNVPKRKRSLKAVVTAATMSNKFTQKGNFRPNGEAKSELCENLEAPALATKQTYVTYTNHAI

SEQ ID NO: 47804 - protein, 779 aa, Homo sapiens
MAVPLGAPCWASALPAWAPPGLPHRSLLTRLLSQHVKPAKIPQISYASTAPDLSDNSRYDFFSRVVPSDTYQAQAMVDIVRALKWNYVSTVASEGSYGESGVEAFIQKSREDGGVCIAQSVKIPREPKAGEFDKIIRRLLETSNARAVIIFANEDDIRRVLEAARRANQTGHFFWMGSDSWGSKIAPVLHLEEVAEGAVTILPKRMSVRGFDRYFSSRTLDNNRRNIWFAEFWEDNFHCKLSRHALKKGSHVKKCTNRERIGQDSAYEQEGKVQFVIDAVYAMGHALHAMHRDLCPGRVGLCPRMDPVDGTQLLKYIRNVNFSGIAGNPVTFNENGDAPGRYDIYQYQLRNDSAEYKVIGSWTDHLHLRIERMHWPGSGQQLPRSICSLPCQPGERKKTVKGMPCCWHCEPCTGYQYQVDRYTCKTCPYDMRPTENRTGCRPIPIIKLEWGSPWAVLPLFLAVVGIAATLFVVITFVRYNDTPIVKASGRELSYVLLAGIFLCYATTFLMIAEPDLGTCSLRRIFLGLGMSISYAALLTKTNRIYRIFEQGKRSVSAPRFISPASQLAITFSLISLQLLGICVWFVVDPSHSVVDFQDQRTLDPRFARGVLKCDISDLSLICLLGYSMLLMVTCTVYAIKTRGVPETFNEAKPIGFTMYTTCIVWLAFIPIFFGTSQSADKLYIQTTTLTVSVSLSASVSLGMLYMPKVYIILFHPEQNVPKRKRSLKAVVTAATMSNKFTQKGNFRPNGEAKSELCENLEAPALATKQTYVTYTNHAI

SEQ ID NO: 47805 - protein, 912 aa, Homo sapiens; identical to SEQ ID NO: 47802

SEQ ID NO: 47806 - protein, 743 aa, Homo sapiens
MSCKIPQISYASTAPDLSDNSRYDFFSRVVPSDTYQAQAMVDIVRALKWNYVSTVASEGSYGESGVEAFIQKSREDGGVCIAQSVKIPREPKAGEFDKIIRRLLETSNARAVIIFANEDDIRRVLEAARRANQTGHFFWMGSDSWGSKIAPVLHLEEVAEGAVTILPKRMSVRGFDRYFSSRTLDNNRRNIWFAEFWEDNFHCKLSRHALKKGSHVKKCTNRERIGQDSAYEQEGKVQFVIDAVYAMGHALHAMHRDLCPGRVGLCPRMDPVDGTQLLKYIRNVNFSGIAGNPVTFNENGDAPGRYDIYQYQLRNDSAEYKVIGSWTDHLHLRIERMHWPGSGQQLPRSICSLPCQPGERKKTVKGMPCCWHCEPCTGYQYQVDRYTCKTCPYDMRPTENRTGCRPIPIIKLEWGSPWAVLPLFLAVVGIAATLFVVITFVRYNDTPIVKASGRELSYVLLAGIFLCYATTFLMIAEPDLGTCSLRRIFLGLGMSISYAALLTKTNRIYRIFEQGKRSVSAPRFISPASQLAITFSLISLQLLGICVWFVVDPSHSVVDFQDQRTLDPRFARGVLKCDISDLSLICLLGYSMLLMVTCTVYAIKTRGVPETFNEAKPIGFTMYTTCIVWLAFIPIFFGTSQSADKLYIQTTTLTVSVSLSASVSLGMLYMPKVYIILFHPEQNVPKRKRSLKAVVTAATMSNKFTQKGNFRPNGEAKSELCENLEAPALATKQTYVTYTNHAI

SEQ ID NO: 47807 - protein, 591 aa, Homo sapiens
MGSDSWGSKIAPVLHLEEVAEGAVTILPKRMSVRGFDRYFSSRTLDNNRRNIWFAEFWEDNFHCKLSRHALKKGSHVKKCTNRERIGQDSAYEQEGKVQFVIDAVYAMGHALHAMHRDLCPGRVGLCPRMDPVDGTQLLKYIRNVNFSGIAGNPVTFNENGDAPGRYDIYQYQLRNDSAEYKVIGSWTDHLHLRIERMHWPGSGQQLPRSICSLPCQPGERKKTVKGMPCCWHCEPCTGYQYQVDRYTCKTCPYDMRPTENRTGCRPIPIIKLEWGSPWAVLPLFLAVVGIAATLFVVITFVRYNDTPIVKASGRELSYVLLAGIFLCYATTFLMIAEPDLGTCSLRRIFLGLGMSISYAALLTKTNRIYRIFEQGKRSVSAPRFISPASQLAITFSLISLQLLGICVWFVVDPSHSVVDFQDQRTLDPRFARGVLKCDISDLSLICLLGYSMLLMVTCTVYAIKTRGVPETFNEAKPIGFTMYTTCIVWLAFIPIFFGTSQSADKLYIQTTTLTVSVSLSASVSLGMLYMPKVYIILFHPEQNVPKRKRSLKAVVTAATMSNKFTQKGNFRPNGEAKSELCENLEAPGSS

SEQ ID NO: 47808 - protein, 877 aa, Homo sapiens
MARPRRAREPLLVALLPLAWLAQAGLARAAGSVRLAGGLTLGGLFPVHARGAAGRACGQLKKEQGVHRLEAMLYALDRVNADPELLPGVRLGARLLDTCSRDTYALEQALSFVQALIRGRGDGDEVGVRCPGGVPPLRPAPPERVVAVVGASASSVSIMVANVLRLFAIPQISYASTAPELSDSTRYDFFSRVVPPDSYQAQAMVDIVRALGWNYVSTLASEGNYGESGVEAFVQISREAGGVCIAQSIKIPREPKPGEFSKVIRRLMETPNARGIIIFANEDDIRRVLEAARQANLTGHFLWVGSDSWGAKTSPILSLEDVAVGAITILPKRASIDGFDQYFMTRSLENNRRNIWFAEFWEENFNCKLTSSGTQSDDSTRKCTGEERIGRDSTYEQEGKVQFVIDAVYAIAHALHSMHQALCPGHTGLCPAMEPTDGRMLLQYIRAVRFNGSAGTPVMFNENGDAPGRYDIFQYQATNGSASSGGYQAVGQWAETLRLDVEALQWSGDPHEVPSSLCSLPCGPGERKKMVKGVPCCWHCEACDGYRFQVDEFTCEACPGDMRPTPNHTGCRPTPVVRLSWSSPWAAPPLLLAVLGIVATTTVVATFVRYNNTPIVRASGRELSYVLLTGIFLIYAITFLMVAEPGAAVCAARRLFLGLGTTLSYSALLTKTNRIYRIFEQGKRSVTPPPFISPTSQLVITFSLTSLQVVGMIAWLGARPPHSVIDYEEQRTVDPEQARGVLKCDMSDLSLIGCLGYSLLLMVTCTVYAIKARGVPETFNEAKPIGFTMYTTCIIWLAFVPIFFGTAQSAEKIYIQTTTLTVSLSLSASVSLGMLYVPKTYVILFHPEQNVQKRKRSLKATSTVAAPPKGEDAEAHK

SEQ ID NO: 47809 - protein, 1091 aa, Homo sapiens
MQLDGLQALCWGSLFRTQLVPVYVAVLPSPQPCIPPTCTAFTEFSGPLAKHHSFQPFQVAAPAGPRSPPQPFHLPSVSQVHATHLLCPVRVLGPPYPPSLELLTSIHSPAVLPAPQIPQISYASTAPELSDSTRYDFFSRVVPPDSYQAQAMVDIVRALGWNYVSTLASEGNYGESGVEAFVQISREAGELGAPRHQGVYIVWARGPQLGQKQKDGGPRSMLGRGCLAGAPCGRDLFVLDDSALPQAWRRVQARLHPCRPFSQPTQSSAAVARWSIKIPREPKPGEFSKVIRRLMETPNARGIIIFANEDDISPAPTRRVLEAARQANLTGHFLWVGSDSWGAKTSPILSLEDVAVGAITILPKRASIDGFDQYFMTRSLENNRRNIWFAEFWEENFNCKLTSSGTQSDDSTRKCTGESCPGWTGEERIGRDSTYEQEGKVQFVIDAVYAIAHALHSMHQALCPGHTGLCPAMEPTDGRMLLQYIRCPLQWLNRIPLCEWPRRVRPFFCQWTLGLLSSCGYVNNAAVNVAVQAFLATLLSSLSSIYPGVELLGHVFNLLRRLHTVFCSGCSLFPPTVHKGSAGTPVMFNENGDAPGRYDIFQYQATNGSASSGGYQAVGQWAETLRLDVSVQTEPQVGMGPGSRRQTPQPVFCASQVEALQWSGDPHEVPSSLCSLPCGPGERKKMVKGVPCCWHCEACDGYRFQVDEFTCEACPGDMRPTPNHTGCRPTPVVRLSWSSPWAAPPLLLAVLGIVATTTVVATFVRYNNTPIVRASGRELSYVLLTGIFLIYAITFLMVAEPGAAVCAARRLFLGLGTTLSYSALLTKTNRIYRIFEQGKRSVTPPPFISPTSQLVITFSLTSLQINAVFRVTLFYFGSLQWHYLSSLQALPSGDLSVQHLSASVSLGMLYSKSKTPVDLEVGSEPWGYLGDGVLQAEHWGEGRGDWPHVKVMVVVYQSSLVYYMKQAQAGRVKTELLKVAHHQVAKSVPEESQIVVLHLVTAGYVDMAIRTTRASLHLMPLTLVPGAAAEVNETQVAARLGPGSTVGTYQVVVVLMRSLQIDKTTNQLSLETCFSGIQGFLASVNSLVMDK

SEQ ID NO: 47810 - protein, 877 aa, Homo sapiens; identical to SEQ ID NO: 47808

SEQ ID NO: 47811 - protein, 915 aa, Homo sapiens
MVQLRKLLRVLTLMKFPCCVLEVLLCALAAAARGQEMYAPHSIRIEGDVTLGGLFPVHAKGPSGVPCGDIKRENGIHRLEAMLYALDQINSDPNLLPNVTLGARILDTCSRDTYALEQSLTFVQALIQKDTSDVRCTNGEPPVFVKPEKVVGVIGASGSSVSIMVANILRLFQIPQISYASTAPELSDDRRYDFFSRVVPPDSFQAQAMVDIVKALGWNYVSTLASEGSYGEKGVESFTQISKEAGGLCIAQSVRIPQERKDRTIDFDRIIKQLLDTPNSRAVVIFANDEDIKQILAAAKRADQVGHFLWVGSDSWGSKINPLHQHEDIAEGAITIQPKRATVEGFDAYFTSRTLENNRRNVWFAEYWEENFNCKLTISGSKKEDTDRKCTGQERIGKDSNYEQEGKVQFVIDAVYAMAHALHHMNKDLCADYRGVCPEMEQAGGKKLLKYIRNVNFNGSAGTPVMFNKNGDAPGRYDIFQYQTTNTSNPGYRLIGQWTDELQLNIEDMQWGKGVREIPASVCTLPCKPGQRKKTQKGTPCCWTCEPCDGYQYQFDEMTCQHCPYDQRPNENRTGCQDIPIIKLEWHSPWAVIPVFLAMLGIIATIFVMATFIRYNDTPIVRASGRELSYVLLTGIFLCYIITFLMIAKPDVAVCSFRRVFLGLGMCISYAALLTKTNRIYRIFEQGKKSVTAPRLISPTSQLAITSSLISVQLLGVFIWFGVDPPNIIIDYDEHKTMNPEQARGVLKCDITDLQIICSLGYSILLMVTCTVYAIKTRGVPENFNEAKPIGFTMYTTCIVWLAFIPIFFGTAQSAEKLYIQTTTLTISMNLSASVALGMLYMPKVYIIIFHPELNVQKRKRSFKAVVTAATMSSRLSHKPSDRPNGEAKTELCENVDPNSPAAKKKYVSYNNLVI

SEQ ID NO: 47812 - protein, 906 aa, Homo sapiens
MVQLRKLLRVLTLMKFPCCVLEVLLCALAAAARGQEMYAPHSIRIEGDVTLGGLFPVHAKGPSGVPCGDIKRENGIHRLEAMLYALDQINSDPNLLPNVTLGARILDTCSRDTYALEQSLTFVQALIQKDTSDVRCTNGEPPVFVKPEKVVGVIGASGSSVSIMVANILRLFQIPQISYASTAPELSDDRRYDFFSRVVPPDSFQAQAMVDIVKALGWNYVSTLASEGSYGEKGVESFTQISKEAGGLCIAQSVRIPQERKDRTIDFDRIIKQLLDTPNSRAVVIFANDEDIKQILAAAKRADQVGHFLWVGSDSWGSKINPLHQHEDIAEGAITIQPKRATVEGFDAYFTSRTLENNRRNVWFAEYWEENFNCKLTISGSKKEDTDRKCTGQERIGKDSNYEQEGKVQFVIDAVYAMAHALHHMNKDLCADYRGVCPEMEQAGGKKLLKYIRNVNFNGSAGTPVMFNKNGDAPGRYDIFQYQTTNTSNPGYRLIGQWTDELQLNIEDMQWGKGVREIPASVCTLPCKPGQRKKTQKGTPCCWTCEPCDGYQYQFDEMTCQHCPYDQRPNENRTGCQDIPIIKLEWHSPWAVIPVFLAMLGIIATIFVMATFIRYNDTPIVRASGRELSYVLLTGIFLCYIITFLMIAKPDVAVCSFRRVFLGLGMCISYAALLTKTNRIYRIFEQGKKSVTAPRLISPTSQLAITSSLISVQLLGVFIWFGVDPPNIIIDYDEHKTMNPEQARGVLKCDITDLQIICSLGYSILLMVTCTVYAIKTRGVPENFNEAKPIGFTMYTTCIVWLAFIPIFFGTAQSAEKLYIQTTTLTISMNLSASVALGMLYMPKVYIIIFHPELNVQKRKRSFKAVVTAATMSSRLSHKPSDRPNGEAKTELCENVDPNSEKCNCY

SEQ ID NO: 47813 - protein, 922 aa, Homo sapiens; identical to SEQ ID NO: 47701

SEQ ID NO: 47814 - protein, 911 aa, Homo sapiens
MVQLRKLLRVLTLMKFPCCVLEVLLCALAAAARGQEMYAPHSIRIEGDVTLGGLFPVHAKGPSGVPCGDIKRENGIHRLEAMLYALDQINSDPNLLPNVTLGARILDTCSRDTYALEQSLTFVQALIQKDTSDVRCTNGEPPVFVKPEKVVGVIGASGSSVSIMVANILRLFQIPQISYASTAPELSDDRRYDFFSRVVPPDSFQAQAMVDIVKALGWNYVSTLASEGSYGEKGVESFTQISKEAGGLCIAQSVRIPQERKDRTIDFDRIIKQLLDTPNSRAVVIFANDEDIKQILAAAKRADQVGHFLWVGSDSWGSKINPLHQHEDIAEGAITIQPKRATVEGFDAYFTSRTLENNRRNVWFAEYWEENFNCKLTISGSKKEDTDRKCTGQERIGKDSNYEQEGKVQFVIDAVYAMAHALHHMNKDLCADYRGVCPEMEQAGGKKLLKYIRNVNFNGSAGTPVMFNKNGDAPGRYDIFQYQTTNTSNPGYRLIGQWTDELQLNIEDMQWGKGVREIPASVCTLPCKPGQRKKTQKGTPCCWTCEPCDGYQYQFDEMTCQHCPYDQRPNENRTGCQDIPIIKLEWHSPWAVIPVFLAMLGIIATIFVMATFIRYNDTPIVRASGRELSYVLLTGIFLCYIITFLMIAKPDVAVCSFRRVFLGLGMCISYAALLTKTNRIYRIFEQGKKSVTAPRLISPTSQLAITSSLISVQLLGVFIWFGVDPPNIIIDYDEHKTMNPEQARGVLKCDITDLQIICSLGYSILLMVTCTVYAIKTRGVPENFNEAKPIGFTMYTTCIVWLAFIPIFFGTAQSAEKLYIQTTTLTISMNLSASVALGMLYMPKVYIIIFHPELNVQKRKRSFKAVVTAATMSSRLSHKPSDRPNGEAKTELCENVDPNITSEDLSLHKED

SEQ ID NO: 47815 - protein, 824 aa, Homo sapiens
MVQLRKLLRVLTLMKFPCCVLEVLLCALAAAARGQEMYAPHSIRIEGDVTLGGLFPVHAKGPSGVPCGDIKRENGIHRLEAMLYALDQINSDPNLLPNVTLGARILDTCSRDTYALEQSLTFVQALIQKDTSDVRCTNGEPPVFVKPEKVVGVIGASGSSVSIMVANILRLFQIPQISYASTAPELSDDRRYDFFSRVVPPDSFQAQAMVDIVKALGWNYVSTLASEGSYGEKGVESFTQISKEAGGLCIAQSVRIPQERKDRTIDFDRIIKQLLDTPNSRAVVIFANDEDIKQILAAAKRADQVGHFLWVGSDSWGSKINPLHQHEDIAEGAITIQPKRATVEGFDAYFTSRTLENNRRNVWFAEYWEENFNCKLTISGSKKEDTDRKCTGQERIGKDSNYEQEGKVQFVIDAVYAMAHALHHMNKDLCADYRGVCPEMEQAGGKKLLKYIRNVNFNGDAGTPVMFNKNGDAPGRYDIFQYQTTNTSNPGYRLIGQWTDELQLNIEDMQWGKGVREIPASVCTLPCKPGQRKKTQKGTPCCWTCEPCDGYQYQFDEMTCQHCPYDQRPNENRTGCQDIPIIKLEWHSPWAVIPVFLAMLGIIATIFVMATFIRYNDTPIVRASGRELSYVLLTGIFLCYIITFLMIAKPDVAVCSFRRVFLGLGMCISYAALLTKTNRIYRIFEQGKKSVTAPRLISPTSQLAITSSLISVQLLGVFIWFGVDPPNIIIDYDEHKTMNPEQARGVLKCDITDLQIICSLGYSILLMVTCTVYAIKTRGVPENFNEAKPIGFTMYTTCIVWLAFIPIFFGTAQSAEKVILCCIS

SEQ ID NO: 47816 - protein, 924 aa, Homo sapiens
MVQLRKLLRVLTLMKFPCCVLEVLLCALAAAARGQEMYAPHSIRIEGDVTLGGLFPVHAKGPSGVPCGDIKRENGIHRLEAMLYALDQINSDPNLLPNVTLGARILDTCSRDTYALEQSLTFVQALIQKDTSDVRCTNGEPPVFVKPEKVVGVIGASGSSVSIMVANILRLFQIPQISYASTAPELSDDRRYDFFSRVVPPDSFQAQAMVDIVKALGWNYVSTLASEGSYGEKGVESFTQISKEAGGLCIAQSVRIPQERKDRTIDFDRIIKQLLDTPNSRAVVIFANDEDIKQILAAAKRADQVGHFLWVGSDSWGSKINPLHQHEDIAEGAITIQPKRATVEGFDAYFTSRTLENNRRNVWFAEYWEENFNCKLTISGSKKEDTDRKCTGQERIGKDSNYEQEGKVQFVIDAVYAMAHALHHMNKDLCADYRGVCPEMEQAGGKKLLKYIRNVNFNGSAGTPVMFNKNGDAPGRYDIFQYQTTNTSNPGYRLIGQWTDELQLNIEDMQWGKGVREIPASVCTLPCKPGQRKKTQKGTPCCWTCEPCDGYQYQFDEMTCQHCPYDQRPNENRTGCQDIPIIKLEWHSPWAVIPVFLAMLGIIATIFVMATFIRYNDTPIVRASGRELSYVLLTGIFLCYIITFLMIAKPDVAVCSFRRVFLGLGMCISYAALLTKTNRIYRIFEQGKKSVTAPRLISPTSQLAITSSLISVQLLGVFIWFGVDPPNIIIDYDEHKTMNPEQARGVLKCDITDLQIICSLGYSILLMVTCTVYAIKTRGVPENFNEAKPIGFTMYTTCIVWLAFIPIFFGTAQSAEKLYIQTTTLTISMNLSASVALGMLYMPKVYIIIFHPELNVQKRKRSFKAVVTAATMSSRLSHKPSDRPNGEAKTELCENVDPNIFFFGCTVELGLHFKLTFSRNQSNL

SEQ ID NO: 47817 - protein, 908 aa, Homo sapiens
MVCEGKRSASCPCFFLLTAKFYWILTMMQRTHSQEYAHSIRVDGDIILGGLFPVHAKGERGVPCGELKKEKGIHRLEAMLYAIDQINKDPDLLSNITLGVRILDTCSRDTYALEQSLTFVQALIEKDASDVKCANGDPPIFTKPDKISGVIGAAASSVSIMVANILRLFKIPQISYASTAPELSDNTRYDFFSRVVPPDSYQAQAMVDIVTALGWNYVSTLASEGNYGESGVEAFTQISREIGGVCIAQSQKIPREPRPGEFEKIIKRLLETPNARAVIMFANEDDIRRILEAAKKLNQSGHFLWIGSDSWGSKIAPVYQQEEIAEGAVTILPKRASIDGFDRYFRSRTLANNRRNVWFAEFWEENFGCKLGSHGKRNSHIKKCTGLERIARDSSYEQEGKVQFVIDAVYSMAYALHNMHKDLCPGYIGLCPRMSTIDGKELLGYIRAVNFNGSAGTPVTFNENGDAPGRYDIFQYQITNKSTEYKVIGHWTNQLHLKVEDMQWAHREHTHPASVCSLPCKPGERKKTVKGVPCCWHCERCEGYNYQVDELSCELCPLDQRPNMNRTGCQLIPIIKLEWHSPWAVVPVFVAILGIIATTFVIVTFVRYNDTPIVRASGRELSYVLLTGIFLCYSITFLMIAAPDTIICSFRRVFLGLGMCFSYAALLTKTNRIHRIFEQGKKSVTAPKFISPASQLVITFSLISVQLLGVFVWFVVDPPHIIIDYGEQRTLDPEKARGVLKCDISDLSLICSLGYSILLMVTCTVYAIKTRGVPETFNEAKPIGFTMYTTCIIWLAFIPIFFGTAQSAEKMYIQTTTLTVSMSLSASVSLGMLYMPKVYIIIFHPEQNVQKRKRSFKAVVTAATMQSKLIQKGNDRPNGEVKSELCESLETNTSSTKTTYISYSNHSI

SEQ ID NO: 47818 - protein, 908 aa, Homo sapiens
MVCEGKRSASCPCFFLLTAKFYWILTMMQRTHSQEYAHSIRVDGDIILGGLFPVHAKGERGVPCGELKKEKGIHRLEAMLYAIDQINKDPDLLSNITLGVRILDTCSRDTYALEQSLTFVQALIEKDASDVKCANGDPPIFTKPDKISGVIGAAASSVSIMVANILRLFKIPQISYASTAPELSDNTRYDFFSRVVPPDSYQAQAMVDIVTALGWNYVSTLASEGNYGESGVEAFTQISREIGGVCIAQSQKIPREPRPGEFEKIIKRLLETPNARAVIMFANEDDIRRILEAAKKLNQSGHFLWIGSDSWGSKIAPVYQQEEIAEGAVTILPKRASIDGFDRYFRSRTLANNRRNVWFAEFWEENFGCKLGSHGKRNSHIKKCTGLERIARDSSYEQEGKVQFVIDAVYSMAYALHNMHKDLCPGYIGLCPRMSTIDGKELLGYIRAVNFNGSAGTPVTFNENGDAPGRYDIFQYQITNKSTEYKVIGHWTNQLHLKVEDMQWAHREHTHPASVCSLPCKPGERKKTVKGVPCCWHCERCEGYNYQVDELSCELCPLDQRPNMNRTGCQLIPIIKLEWHSPWAVVPVFVAILGIIATTFVIVTFVRYNDTPIVRASGRELSYVLLTGIFLCYSITFLMIAAPDTIICSFRRVFLGLGMCFSYAALLTKTNRIHRIFEQGKKSVTAPKFISPASQLVITFSLISVQLLGVFVWFVVDPPHIIIDYGEQRTLDPEKARGVLKCDISDLSLICSLGYSILLMVTCTVYAIKTRGVPETFNEAKPIGFTMYTTCIIWLAFIPIFFGTAQSAEKMYIQTTTLTVSMSLSASVSLGMLYMPKVYIIIFHPEQNVQKRKRSFKAVVTAATMQSKLIQKGNDRPNGEVKSELCESLETNSKSSVEFPMVKSGSTS

SEQ ID NO: 47819 - protein, 501 aa, Homo sapiens
MVCEGKRSASCPCFFLLTAKFYWILTMMQRTHSQEYAHSIRVDGDIILGGLFPVHAKGERGVPCGELKKEKGIHRLEAMLYAIDQINKDPDLLSNITLGVRILDTCSRDTYALEQSLTFVQALIEKDASDVKCANGDPPIFTKPDKISGVIGAAASSVSIMVANILRLFKIPQISYASTAPELSDNTRYDFFSRVVPPDSYQAQAMVDIVTALGWNYVSTLASEGNYGESGVEAFTQISREIGGVCIAQSQKIPREPRPGEFEKIIKRLLETPNARAVIMFANEDDIRRILEAAKKLNQSGHFLWIGSDSWGSKIAPVYQQEEIAEGAVTILPKRASIDGFDRYFRSRTLANNRRNVWFAEFWEENFGCKLGSHGKRNSHIKKCTGLERIARDSSYEQEGKVQFVIDAVYSMAYALHNMHKDLCPGYIGLCPRMSTIDGKELLGYIRAVNFNGCRRGIQMSLPWPTLFTPSFSSSWAVLALLSLLMKTEMLLDVMISSSIK

SEQ ID NO: 47820 - protein, 20 aa, Homo sapiens
MVCEGKRSASCPCFFLLTAK

SEQ ID NO: 47821 - protein, 908 aa, Homo sapiens; identical to SEQ ID NO: 47817

SEQ ID NO: 47822 - protein, 294 aa, Homo sapiens
MVCEGKRSASCPCFFLLTAKFYWILTMMQRTHSQEYAHSIRVDGDIILGGLFPVHAKGERGVPCGELKKEKGIHRLEAMLYAIDQINKDPDLLSNITLGVRILDTCSRDTYALEQSLTFVQALIEKDASDVKCANGDPPIFTKPDKISGVIGAAASSVSIMVANILRLFKIPQISYASTAPELSDNTRYDFFSRVVPPDSYQAQAMVDIVTALGWNYVSTLASEGNYGESGVEAFTQISREIGGVCIAQSQKIPREPRPGEFEKIIKRLLETPNARAVIMFANEDDIRRILEAA

SEQ ID NO: 47823 - protein, 373 aa, Homo sapiens
MTTSASSHLNKGIKQVYMSLPQGEKVQAMYIWIDGTGEGLRCKTRTLDSEPKCVEELPEWNFDGSSTLQSEGSNSDMYLVPAAMFRDPFRKDPNKLVLCEVFKYNRRPAETNLRHTCKRIMDMVSNQHPWFGMEQEYTLMGTDGHPFGWPSNGFPGPQGPYYCGVGADRAYGRDIVEAHYRACLYAGVKIAGTNAEVMPAQWEFQIGPCEGISMGDHLWVARFILHRVCEDFGVIATFDPKPIPGNWNGAGCHTNFSTKAMREENGLKYIEEAIEKLSKRHQYHIRAYDPKGGLDNARRLTGFHETSNINDFSAGVANRSASIRIPRTVGQEKKGYFEDRRPSANCDPFSVTEALIRTCLLNETGDEPFQYKN

SEQ ID NO: 47824 - protein, 373 aa, Homo sapiens; identical to SEQ ID NO: 47823

SEQ ID NO: 47825 - protein, 373 aa, Homo sapiens; identical to SEQ ID NO: 47823

SEQ ID NO: 47826 - protein, 373 aa, Homo sapiens; identical to SEQ ID NO: 47823

SEQ ID NO: 47827 - protein, 233 aa, Homo sapiens
MTTSASSHLNKGIKQVYMSLPQGEKVQAMYIWIDGTGEGLRCKTRTLDSEPKCVEELPEWNFDGSSTLQSEGSNSDMYLVPAAMFRDPFRKDPNKLVLCEVFKYNRRPAETNLRHTCKRIMDMVSNQHPWFGMEQEYTLMGTDGHPFGWPSNGFQGPRVHITVVWEQTEPMAGTSWRPITGPACMLESRLRGLMPRSCLPSGNFRLDLVKESAWEIISGWPVSSCIVCVKTLE

SEQ ID NO: 47828 - protein, 637 aa, Homo sapiens
MGLLSQGSPLSWEETKRHADHVRRHGILQFLHIYHAVKDRHKDVLKWGDEVEYMLVSFDHENKKVRLVLSGEKVLETLQEKGERTNPNHPTLWRPEYGSYMIEGTPGQPYGGTMSEFNTVEANMRKRRKEATSILEENQALCTITSFPRLGCPGFTLPEVKPNPVEGGASKSLFFPDEAINKHPRFSTLTRNIRHRRGEKVVINVPIFKDKNTPSPFIETFTEDDEASRASKPDHIYMDAMGFGMGNCCLQVTFQACSISEARYLYDQLATICPIVMALSAASPFYRGYVSDIDCRWGVISASVDDRTREERGLEPLKNNNYRISKSRYDSIDSYLSKCGEKYNDIDLTIDKEIYEQLLQEGIDHLLAQHVAHLFIRDPLTLFEEKIHLDDANESDHFENIQSTNWQTMRFKPPPPNSDIGWRVEFRPMEVQLTDFENSAYVVFVVLLTRVILSYKLDFLIPLSKVDENMKVAQKRDAVLQGMFYFRKDICKGGNAVVDGCGKAQNSTELAAEEYTLMSIDTIINGKEGVFPGLIPILNSYLENMEVDVDTRCSILNYLKLIKKRASGELMTVARWMREFIANHPDYKQDSVITDEMNYSLILKCNQIANELCECPELLGSAFRKVKYSGSKTDSSN

SEQ ID NO: 47829 - protein, 274 aa, Homo sapiens
MGTDSRAAKALLARARTLHLQTGNLLNWGRLRKKCPSTHSEELHDCIQKTLNEWSSQINPDLVREFPDVLECTVSHAVEKINPDEREEMKVSAKLFIVESNSSSSTRSAVDMACSVLGVAQLDSVIIASPPIEDGVNLSLEHLQPYWEELENLVQSKKIVAIGTSDLDKTQLEQLYQWAQVKPNSNQVNLASCCVMPPDLTAFAKQFDIQLLTHNDPKELLSEASFQEALQESIPDIQAHEWVPLWLLRYSVIVKSRGIIKSKGYILQAKRRGS

SEQ ID NO: 47830 - protein, 446 aa, Homo sapiens
MAARKGRRRTCETGEPMEAESGDTSSEGPAQVYLPGRGPPLREGEELVMDEEAYVLYHRAQTGAPCLSFDIVRDHLGDNRTELPLTLYLCAGTQAESAQSNRLMMLRMHNLHGTKPPPSEGSDEEEEEEDEEDEEERKPQLELAMVPHYGGINRVRVSWLGEEPVAGVWSEKGQVEVFALRRLLQVVEEPQALAAFLRDEQAQMKPIFSFAGHMGEGFALDWSPRVTGRLLTGDCQKNIHLWTPTDGGSWHVDQRPFVGHTRSVEDLQWSPTENTVFASCSADASIRIWDIRAAPSKACMLTTATAHDGDVNVISWSRREPFLLSGGDDGALKIWDLRQFKSGSPVATFKQHVAPVTSVEWHPQDSGVFAASGADHQITQWDLAVERDPEAGDVEADPGLADLPQQLLFVHQGETELKELHWHPQCPGLLVSTALSGFTIFRTISV

SEQ ID NO: 47831 - protein, 523 aa, Homo sapiens
MQRAAALVRRGCGPRTPSSWGRSQSSAAAEASAVLKVRPERSRRERILTLESMNPQVKAVEYAVRGPIVLKAGEIELELQRGIKKPFTEVIRANIGDAQAMGQQPITFLRQVMALCTYPNLLDSPSFPEDAKKRARRILQACGGNSLGSYSASQGVNCIREDVAAYITRRDGGVPADPDNIYLTTGASDGISTILKILVSGGGKSRTGVMIPIPQYPLYSAVISELDAIQVNYYLDEENCWALNVNELRRAVQEAKDHCDPKVLCIINPGNPTGQVQSRKCIEDVIHFAWEEKLFLLADEVYQDNVYSPDCRFHSFKKVLYEMGPEYSSNVELASFHSTSKGYMGECGYRGGYMEVINLHPEIKGQLVKLLSVRLCPPVSGQAAMDIVVNPPVAGEESFEQFSREKESVLGNLAKKAKLTEDLFNQVPGIHCNPLQGAMYAFPRIFIPAKAVEAAQAHQMAPDMFYCMKLLEETGICVVPGSGFGQREGTYHFRMTILPPVEKLKTVLQKVKDFHINFLEKYA

SEQ ID NO: 47832 - protein, 423 aa, Homo sapiens
MGQQPITFLRQVMALCTYPNLLDSPSFPEDAKKRARRILQACGGNSLGSYSASQGVNCIREDVAAYITRRDGGVPADPDNIYLTTGASDGISTILKILVSGGGKSRTGVMIPIPQYPLYSAVISELDAIQVNYYLDEENCWALNVNELRRAVQEAKDHCDPKVLCIINPGNPTGQVQSRKCIEDVIHFAWEEKLFLLADEVYQDNVYSPDCRFHSFKKVLYEMGPEYSSNVELASFHSTSKGYMGECGYRGGYMEVINLHPEIKGQLVKLLSVRLCPPVSGQAAMDIVVNPPVAGEESFEQFSREKESVLGNLAKKAKLTEDLFNQVPGIHCNPLQGAMYAFPRIFIPAKAVEAAQAHQMAPDMFYCMKLLEETGICVVPGSGFGQREGTYHFRMTILPPVEKLKTVLQKVKDFHINFLEKYA

SEQ ID NO: 47833 - protein, 413 aa, Homo sapiens
MAPPSVFAEVPQAQPVLVFKLTADFREDPDPRKVNLGVGAYRTDDCHPWVLPVVKKVEQKIANDNSLNHEYLPILGLAEFRSCASRLALGDDSPALKEKRVGGVQSLGGTGALRIGADFLARWYNGTNNKNTPVYVSSPTWENHNAVFSAAGFKDIRSYRYWDAEKRGLDLQGFLNDLENAPEFSIVVLHACAHNPTGIDPTPEQWKQIASVMKHRFLFPFFDSAYQGFASGNLERDAWAIRYFVSEGFEFFCAQSFSKNFGLYNERVGNLTVVGKEPESILQVLSQMEKIVRITWSNPPAQGARIVASTLSNPELFEEWTGNVKTMADRILTMRSELRARLEALKTPGTWNHITDQIGMFSFTGLNPKQVEYLVNEKHIYLLPSGRINVSGLTTKNLDYVATSIHEAVTKIQ

SEQ ID NO: 47834 - protein, 366 aa, Homo sapiens
MAPPSVFAEVPQAQPVLVFKLTADFREDPDPRKVNLGVGAYRTDDSPALKEKRVGGVQSLGGTGALRIGADFLARWYNGTNNKNTPVYVSSPTWENHNAVFSAAGFKDIRSYRYWDAEKRGLDLQGFLNDLENAPEFSIVVLHACAHNPTGIDPTPEQWKQIASVMKHRFLFPFFDSAYQGFASGNLERDAWAIRYFVSEGFEFFCAQSFSKNFGLYNERVGNLTVVGKEPESILQVLSQMEKIVRITWSNPPAQGARIVASTLSNPELFEEWTGNVKTMADRILTMRSELRARLEALKTPGTWNHITDQIGMFSFTGLNPKQVEYLVNEKHIYLLPSGRINVSGLTTKNLDYVATSIHEAVTKIQ

SEQ ID NO: 47835 - protein, 392 aa, Homo sapiens
MQVWSPWKGAMCPRPHKPAYRTDDCHPWVLPVVKKVEQKIANDNSLNHEYLPILGLAEFRSCASRLALGDDSPALKEKRVGGVQSLGGTGALRIGADFLARWYNGTNNKNTPVYVSSPTWENHNAVFSAAGFKDIRSYRYWDAEKRGLDLQGFLNDLENAPEFSIVVLHACAHNPTGIDPTPEQWKQIASVMKHRFLFPFFDSAYQGFASGNLERDAWAIRYFVSEGFEFFCAQSFSKNFGLYNERVGNLTVVGKEPESILQVLSQMEKIVRITWSNPPAQGARIVASTLSNPELFEEWTGNVKTMADRILTMRSELRARLEALKTPGTWNHITDQIGMFSFTGLNPKQVEYLVNEKHIYLLPSGRINVSGLTTKNLDYVATSIHEAVTKIQ

SEQ ID NO: 47836 - protein, 430 aa, Homo sapiens
MALLHSGRVLPGIAAAFHPGLAAAASARASSWWTHVEMGPPDPILGVTEAFKRDTNSKKMNLGVGAYRDDNGKPYVLPSVRKAEAQIAAKNLDKEYLPIGGLAEFCKASAELALGENSEVLKSGRFVTVQTISGTGALRIGASFLQRFFKFSRDVFLPKPTWGNHTPIFRDAGMQLQGYRYYDPKTCGFDFTGAVEDISKIPEQSVLLLHACAHNPTGVDPRPEQWKEIATVVKKRNLFAFFDMAYQGFASGDGDKDAWAVRHFIEQGINVCLCQSYAKNMGLYGERVGAFTMVCKDADEAKRVESQLKILIRPMYSNPPLNGARIAAAILNTPDLRKQWLQEVKVMADRIIGMRTQLVSNLKKEGSTHNWQHITDQIGMFCFTGLKPEQVERLIKEFSIYMTKDGRISVAGVTSSNVGYLAHAIHQVTK

SEQ ID NO: 47837 - protein, 189 aa, Homo sapiens
MALLHSGRVLPGIAAAFHPGLAAAASARASSWWTHVEMGPPDPILGVTEAFKRDTNSKKMNLGVGAYRDDNGKPYVLPSVRKAEAQIAAKNLDKEYLPIGGLAEFCKDFLSSAEMSFCPNQPGETTHPSSGMLACSYKVIGIMTPRLAVLTSQALWRIFQKYQSRVFFFCMPAPTIPREWTRVRNSGRK

SEQ ID NO: 47838 - protein, 387 aa, Homo sapiens
MALLHSGRVLPGIAAAFHPGLAAAASARASSWWTHVEMGPPDPILGVTEAFKRDTNSKKMNLGVGAYRDDNGKPYVLPSVRKFVTVQTISGTGALRIGASFLQRFFKFSRDVFLPKPTWGNHTPIFRDAGMQLQGYRYYDPKTCGFDFTGAVEDISKIPEQSVLLLHACAHNPTGVDPRPEQWKEIATVVKKRNLFAFFDMAYQGFASGDGDKDAWAVRHFIEQGINVCLCQSYAKNMGLYGERVGAFTMVCKDADEAKRVESQLKILIRPMYSNPPLNGARIAAAILNTPDLRKQWLQEVKVMADRIIGMRTQLVSNLKKEGSTHNWQHITDQIGMFCFTGLKPEQVERLIKEFSIYMTKDGRISVAGVTSSNVGYLAHAIHQVTK

SEQ ID NO: 47839 - protein, 496 aa, Homo sapiens
MASSTGDRSQAVRHGLRAKVLTLDGMNPRVRRVEYAVRGPIVQRALELEQELRQGVKKPFTEVIRANIGDAQAMGQRPITFLRQVLALCVNPDLLSSPNFPDDAKKRAERILQACGGHSLGAYSVSSGIQLIREDVARYIERRDGGIPADPNNVFLSTGASDAIVTVLKLLVAGEGHTRTGVLIPIPQYPLYSATLAELGAVQVDYYLDEERAWALDVAELHRALGQARDHCRPRALCVINPGNPTGQVQTRECIEAVIRFAFEERLFLLADEVYQDNVYAAGSQFHSFKKVLMEMGPPYAGQQELASFHSTSKGYMGECGFRGGYVEVVNMDAAVQQQMLKLMSVRLCPPVPGQALLDLVVSPPAPTDPSFAQFQAEKQAVLAELAAKAKLTEQVFNEAPGISCNPVQGAMYSFPRVQLPPRAVERAQELGLAPDMFFCLRLLEETGICVVPGSGFGQREGTYHFRMTILPPLEKLRLLLEKLSRFHAKFTLEYS

SEQ ID NO: 47840 - protein, 496 aa, Homo sapiens; identical to SEQ ID NO: 47839

SEQ ID NO: 47841 - protein, 669 aa, Homo sapiens
MMRLRGSGMLRDLLLRSPAGVSATLRRAQPLVTLCRRPRGGGRPAAGPAAAARLHPWWGGGGWPAEPLARGLSSSPSEILQELGKGSTHPQPGVSPPAAPAAPGPKDGPGETDAFGNSEGKELVASGENKIKQGLLPSLEDLLFYTIAEGQEKIPVHKFITALKSTGLRTSDPRLKECMDMLRLTLQTTSDGVMLDKDLFKKCVQSNIVLLTQAFRRKFVIPDFMSFTSHIDELYESAKKQSGGKVADYIPQLAKFSPDLWGVSVCTVDGQRHSTGDTKVPFCLQSCVKPLKYAIAVNDLGTEYVHRYVGKEPSGLRFNKLFLNEDDKPHNPMVNAGAIVVTSLIKQGVNNAEKFDYVMQFLNKMAGNEYVGFSNATFQSERESGDRNFAIGYYLKEKKCFPEGTDMVGILDFYFQLCSIEVTCESASVMAATLANGGFCPITGERVLSPEAVRNTLSLMHSCGMYDFSGQFAFHVGLPAKSGVAGGILLVVPNVMGMMCWSPPLDKMGNSVKGIHFCHDLVSLCNFHNYDNLRHFAKKLDPRREGGDQRVKSVINLLFAAYTGDVSALRRFALSAMDMEQRDYDSRTALHVAAAEGHVEVVKFLLEACKVNPFPKDRWNNTPMDEALHFGHHDVFKILQEYQVQYTPQGDSDNGKENQTVHKNLDGLL

SEQ ID NO: 47842 - protein, 598 aa, Homo sapiens
MMRLRGSGMLRDLLLRSPAGVSATLRRAQPLVTLCRRPRGGGRPAAGPAAAARLHPWWGGGGWPAEPLARGLSSSPSEILQELGKGSTHPQPGVSPPAAPAAPGPKDGPGETDAFGNSEGKELVASGENKIKQGLLPSLEDLLFYTIAEGQEKIPVHKFITALKSTGLRTSDPRLKECMDMLRLTLQTTSDGVMLDKDLFKKCVQSNIVLLTQAFRRKFVIPDFMSFTSHIDELYESAKKQSGGKVADYIPQLAKFSPDLWGVSVCTVDGQRHSTGDTKVPFCLQSCVKPLKYAIAVNDLGTEYVHRYVGKEPSGLRFNKLFLNEDDKPHNPMVNAGAIVVTSLIKQGVNNAEKFDYVMQFLNKMAGNEYVGFSNATFQSERESGDRNFAIGYYLKEKKCFPEGTDMVGILDFYFQLCSIEVTCESASVMAATLANGGFCPITGERVLSPEAVRNTLSLMHSCGMYDFSGQFAFHVGLPAKSGVAGGILLVVPNVMGMMCWSPPLDKMGNSVKGIHFCHDLVSLCNFHNYDNLRHFAKKLDPRREGGDQRHSFGPLDYESLQQELALKETVWKKVSPESNEDISTTVVYRMESLGEKS

SEQ ID NO: 47843 - protein, 174 aa, Homo sapiens
MGMMCWSPPLDKMGNSVKGIHFCHDLVSLCNFHNYDNLRHFAKKLDPRREGGDQRVKSVINLLFAAYTGDVSALRRFALSAMDMEQRDYDSRTALHVAAAEGHVEVVKFLLEACKVNPFPKDRWNNTPMDEALHFGHHDVFKILQEYQVQYTPQGDSDNGKENQTVHKNLDGLL

SEQ ID NO: 47844 - protein, 602 aa, Homo sapiens
MRSMKALQKALSRAGSHCGRGGWGHPSRSPLLGGGVRHHLSEAAAQGRETPHSHQPQHQDHDSSESGMLSRLGDLLFYTIAEGQERIPIHKFTTALKATGLQTSDPRLRDCMSEMHRVVQESSSGGLLDRDLFRKCVSSNIVLLTQAFRKKFVIPDFEEFTGHVDRIFEDVKELTGGKVAAYIPQLAKSNPDLWGVSLCTVDGQRHSVGHTKIPFCLQSCVKPLTYAISISTLGTDYVHKFVGKEPSGLRYNKLSLNEEGIPHNPMVNAGAIVVSSLIKMDCNKAEKFDFVLQYLNKMAGNEYMGFSNATFQSEKETGDRNYAIGYYLKEKKCFPKGVDMMAALDLYFQLCSVEVTCESGSVMAATLANGGICPITGESVLSAEAVRNTLSLMHSCGMYDFSGQFAFHVGLPAKSAVSGAILLVVPNVMGMMCLSPPLDKLGNSHRGTSFCQKLVSLFNFHNYDNLRHCARKLDPRREGAEIRNKTVVNLLFAAYSGDVSALRRFALSAMDMEQKDYDSRTALHVAAAEGHIEVVKFLIEACKVNPFAKDRWGNIPLDDAVQFNHLEVVKLLQDYQDSYTLSETQAEAAAEALSKENLESMV

SEQ ID NO: 47845 - protein, 177 aa, Homo sapiens
MRSMKALQKALSRAGSHCGRGGWGHPSRSPLLGGGVRHHLSEAAAQGRETPHSHQPQHQDHDSSESGMLSRLGDLLFYTIAEGQERIPIHKFTTALKATGLQTSDPRLRDCMSEMHRVVQESSSGGLLDRDLFRKWQPTSLSWPSQTQTCGVSPCALWMVNGTLWATQRSPSACSPV

SEQ ID NO: 47846 - protein, 682 aa, Homo sapiens
MCGIFAYMNYRVPRTRKEIFETLIKGLQRLEYRGYDSAGVAIDGNNHEVKERHIQLVKKRGKVKALDEELYKQDSMDLKVEFETHFGIAHTRWATHGVPSAVNSHPQRSDKGNEFVVIHNGIITNYKDLRKFLESKGYEFESETDTETIAKLIKYVFDNRETEDITFSTLVERVIQQLEGAFALVFKSVHYPGEAVATRRGSPLLIGVRSKYKLSTEQIPILYRTCTLENVKNICKTRMKRLDSSACLHAVGDKAVEFFFASDASAIIEHTNRVIFLEDDDIAAVADGKLSIHRVKRSASDDPSRAIQTLQMELQQIMKGNFSAFMQKEIFEQPESVFNTMRGRVNFETNTVLLGGLKDHLKEIRRCRRLIVIGCGTSYHAAVATRQVLEELTELPVMVELASDFLDRNTPVFRDDVCFFISQSGETADTLLALRYCKDRGALTVGVTNTVGSSISRETDCGVHINAGPEIGVASTKAYTSQFISLVMFGLMMSEDRISLQNRRQEIIRGLRSLPELIKEVLSLEEKIHDLALELYTQRSLLVMGRGYNYATCLEGALKIKEITYMHSEGILAGELKHGPLALIDKQMPVIMVIMKDPCFAKCQNALQQVTARQGRPIILCSKDDTESSKFAYKTIELPHTVDCLQGILSVIPLQLLSFHLAVLRGYDVDFPRNLAKSVTVE

SEQ ID NO: 47847 - protein, 361 aa, Homo sapiens
MAGGRHRRVVGTLHLLLLVAALPWASRGVSPSASAWPEEKNYHQPAILNSSALRQIAEGTSISEMWQNDLQPLLIERYPGSPGSYAARQHIMQRIQRLQADWVLEIDTFLSQTPYGYRSFSNIISTLNPTAKRHLVLACHYDSKYFSHWNNRVFVGATDSAVPCAMMLELARALDKKLLSLKTVSDSKPDLSLQLIFFDGEEAFLHWSPQDSLYGSRHLAAKMASTPHPPGARGTSQLHGMDLLVLLDLIGAPNPTFPNFFPNSARWFERLQAIEHELHELGLLKDHSLEGRYFQNYSYGGVIQDDHIPFLRRGVPVLHLIPSPFPEVWHTMDDNEENLDESTIDNLNKILQVFVLEYLHL

SEQ ID NO: 47848 - protein, 312 aa, Homo sapiens
MAGGRHRRVVGTLHLLLLVAALPWASRGVSPSASAWPEEKHIMQRIQRLQADWVLEIDTFLSQTPYGYRSFSNIISTLNPTAKRHLVLACHYDSKYFSHWNNRVFVGATDSAVPCAMMLELARALDKKLLSLKTVSDSKPDLSLQLIFFDGEEAFLHWSPQDSLYGSRHLAAKMASTPHPPGARGTSQLHGMDLLVLLDLIGAPNPTFPNFFPNSARWFERLQAIEHELHELGLLKDHSLEGRYFQNYSYGGVIQDDHIPFLRRGVPVLHLIPSPFPEVWHTMDDNEENLDESTIDNLNKILQVFVLEYLHL

SEQ ID NO: 47849 - protein, 775 aa, Homo sapiens
MAALDSLSLFTSLGLSEQKARETLKNSALSAQLREAATQAQQTLGSTIDKATGILLYGLASRLRDTRRLSFLVSYIASKKIHTEPQLSAALEYVRSHPLDPIDTVDFERECGVGVIVTPEQIEEAVEAAINRHRPQLLVERYHFNMGLLMGEARAVLKWADGKMIKNEVDMQVLHLLGPKLEADLEKKFKVAKARLEETDRRTAKDVVENGETADQTLSLMEQLRGEALKFHKPGENYKTPGYVVTPHTMNLLKQHLEITGGQVRTRFPPEPNGILHIGHAKAINFNFGYAKANNGICFLRFDDTNPEKEEAKFFTAICDMVAWLGYTPYKVTYASDYFDQLYAWAVELIRRGLAYVCHQRGEELKGHNTLPSPWRDRPMEESLLLFEAMRKGKFSEGEATLRMKLVMEDGKMDPVAYRVKYTPHHRTGDKWCIYPTYDYTHCLCDSIEHITHSLCTKEFQARRSSYFWLCNALDVYCPVQWEYGRLNLHYAVVSKRKILQLVATGAVRDWDDPRLFTLTALRRRGFPPEAINNFCARVGVTVAQTTMEPHLLEACVRDVLNDTAPRAMAVLESLRVIITNFPAAKSLDIQVPNFPADETKGFHQVPFAPIVFIERTDFKEEPEPGFKRLAWGQPVGLRHTGYVIELQHVVKGPSGCVESLEVTCRRADAGEKPKAFIHWVSQPLMCEVRLYERLFQHKNPEDPTEVPGGFLSDLNLASLHVVDAALVDCSVALAKPFDKFQFERLGYFSVDPDSHQGKLVFNRTVTLKEDPGKV

SEQ ID NO: 47850 - protein, 764 aa, Homo sapiens
MAALDSLSLFTSLGLSEQKARETLKNSALSAQLREAATQAQQTLGSTIDKATGILLYGLASRLRDTRRLSFLVSYIATALEYVRSHPLDPIDTVDFERECGVGVIVTPEQIEEAVEAAINRHRPQLLVERYHFNMGLLMGEARAVLKWADGKMIKNEVDMQVLHLLGPKLEADLEKKFKVAKARLEETDRRTAKDVVENGETADQTLSLMEQLRGEALKFHKPGENYKTPGYVVTPHTMNLLKQHLEITGGQVRTRFPPEPNGILHIGHAKAINFNFGYAKANNGICFLRFDDTNPEKEEAKFFTAICDMVAWLGYTPYKVTYASDYFDQLYAWAVELIRRGLAYVCHQRGEELKGHNTLPSPWRDRPMEESLLLFEAMRKGKFSEGEATLRMKLVMEDGKMDPVAYRVKYTPHHRTGDKWCIYPTYDYTHCLCDSIEHITHSLCTKEFQARRSSYFWLCNALDVYCPVQWEYGRLNLHYAVVSKRKILQLVATGAVRDWDDPRLFTLTALRRRGFPPEAINNFCARVGVTVAQTTMEPHLLEACVRDVLNDTAPRAMAVLESLRVIITNFPAAKSLDIQVPNFPADETKGFHQVPFAPIVFIERTDFKEEPEPGFKRLAWGQPVGLRHTGYVIELQHVVKGPSGCVESLEVTCRRADAGEKPKAFIHWVSQPLMCEVRLYERLFQHKNPEDPTEVPGGFLSDLNLASLHVVDAALVDCSVALAKPFDKFQFERLGYFSVDPDSHQGKLVFNRTVTLKEDPGKV

SEQ ID NO: 47851 - protein, 282 aa, Homo sapiens
MPTCRLGPKFLLVSGVSAMAALDSLSLFTSLGLSEQKARETLKNSALSAQLREAATQAQQTLGSTIDKATGILLYGLASRLRDTRRLSFLVSYIASKKIHTEPQLSAALEYVRSHPLDPIDTVDFERECGVGVIVTPEQIEEAVEAAINRHRPQLLVERYHFNMGLLMGEARAVLKWADGKMIKNEVDMQVLHLLGPKLEADLEKKFKVAKARLEETDRRTAKDVVENGETADQTLSLMEQLRGEALKFHKPGTYPVPARTQWNPAYWTCQSHQFQLWLCQV

SEQ ID NO: 47852 - protein, 957 aa, Homo sapiens
MNFAEREGSKRYCIQTKHVAILCAVVVGVGLIVGLAVGLTRSCDSSGDGGPGTAPAPSHLPSSTASPSGPPAQDQDICPASEDESGQWKNFRLPDFVNPVHYDLHVKPLLEEDTYTGTVSISINLSAPTRYLWLHLRETRITRLPELKRPSGDQVQVRRCFEYKKQEYVVVEAEEELTPSSGDGLYLLTMEFAGWLNGSLVGFYRTTYTENGQVKSIVATDHEPTDARKSFPCFDEPNKKATYTISITHPKEYGALSNMPVAKEESVDDKWTRTTFEKSVPMSTYLVCFAVHQFDSVKRISNSGKPLTIYVQPEQKHTAEYAANITKSVFDYFEEYFAMNYSLPKLDKIAIPDFGTGAMENWGLITYRETNLLYDPKESASSNQQRVATVVAHELVHQWFGNIVTMDWWEDLWLNEGFASFFEFLGVNHAETDWQMRDQMLLEDVLPVQEDDSLMSSHPIIVTVTTPDEITSVFDGISYSKGSSILRMLEDWIKPENFQKGCQMYLEKYQFKNAKTSDFWAALEEASRLPVKEVMDTWTRQMGYPVLNVNGVKNITQKRFLLDPRANPSQPPSDLGYTWNIPVKWTEDNITSSVLFNRSEKEGITLNSSNPSGNAFLKINPDHIGFYRVNYEVATWDSIATALSLNHKTFSSADRASLIDDAFALARAQLLDYKVALNLTKYLKREENFLPWQRVISAVTYIISMFEDDKELYPMIEEYFQGQVKPIADSLGWNDAGDHVTKLLRSSVLGFACKMGDREALNNASSLFEQWLNGTVSLPVNLRLLVYRYGMQNSGNEISWNYTLEQYQKTSLAQEKEKLLYGLASVKNVTLLSRYLDLLKDTNLIKTQDVFTVIRYISYNSYGKNMAWNWIQLNWDYLVNRYTLNNRNLGRIVTIAEPFNTELQLWQMESFFAKYPQAGAGEKPREQVLETVKNNIEWLKQHRNTIREWFFNLLESG

SEQ ID NO: 47853 - protein, 1512 aa, Homo sapiens
MATLSLTVNSGDPPLGALLAVEHVKDDVSISVEEGKENILHVSENVIFTDVNSILRYLARVATTAGLYGSNLMEHTEIDHWLEFSATKLSSCDSFTSTINELNHCLSLRTYLVGNSLSLADLCVWATLKGNAAWQEQLKQKKAPVHVKRWFGFLEAQQAFQSVGTKWDVSTTKARVAPEKKQDVGKFVELPGAEMGKVTVRFPPEASGYLHIGHAKAALLNQHYQVNFKGKLIMRFDDTNPEKEKEDFEKVILEDVAMLHIKPDQFTYTSDHFETIMKYAEKLIQEGKAYVDDTPAEQMKAEREQRIDSKHRKNPIEKNLQMWEEMKKGSQFGQSCCLRAKIDMSSNNGCMRDPTLYRCKIQPHPRTGNKYNVYPTYDFACPIVDSIEGVTHALRTTEYHDRDEQFYWIIEALGIRKPYIWEYSRLNLNNTVLSKRKLTWFVNEGLVDGWDDPRFPTVRGVLRRGMTVEGLKQFIAAQGSSRSVVNMEWDKIWAFNKKVIDPVAPRYVALLKKEVIPVNVPEAQEEMKEVAKHPKNPEVGLKPVWYSPKVFIEGADAETFSEGEMVTFINWGNLNITKIHKNADGKIISLDAKLNLENKDYKKTTKVTWLAETTHALPIPVICVTYEHLITKPVLGKDEDFKQYVNKNSKHEELMLGDPCLKDLKKGDIIQLQRRGFFICDQPYEPVSPYSCKEAPCVLIYIPDGHTKEMPTSGSKEKTKVEATKNETSAPFKERPTPSLNNNCTTSEDSLVLYNRVAVQGDVVRELKAKKAPKEDVDAAVKQLLSLKAEYKEKTGQEYKPGNPPAEIGQNISSNSSASILESKSLYDEVAAQGEVVRKLKAEKSPKAKINEAVECLLSLKAQYKEKTGKEYIPGQPPLSQSSDSSPTRNSEPAGLETPEAKVLFDKVASQGEVVRKLKTEKAPKDQVDIAVQELLQLKAQYKSLIGVEYKPVSATGAEDKDKKKKEKENKSEKQNKPQKQNDGQRKDPSKNQGGGLSSSGAGEGQGPKKQTRLGLEAKKEENLADWYSQVITKSEMIEYHDISGCYILRPWAYAIWEAIKDFFDAEIKKLGVENCYFPMFVSQSALEKEKTHVADFAPEVAWVTRSGKTELAEPIAIRPTSETVMYPAYAKWVQSHRDLPIKLNQWCNVVRWEFKHPQPFLRTREFLWQEGHSAFATMEEAAEEVLQILDLYAQVYEELLAIPVVKGRKTEKEKFAGGDYTTTIEAFISASGRAIQGGTSHHLGQNFSKMFEIVFEDPKIPGEKQFAYQNSWGLTTRTIGVMTMVHGDNMGLVLPPRVACVQVVIIPCGITNALSEEDKEALIAKCNDYRRRLLSVNIRVRADLRDNYSPGWKFNHWELKGVPIRLEVGPRDMKSCQFVAVRRDTGEKLTVAENEAETKLQAILEDIQVTLFTRASEDLKTHMVVANTMEDFQKILDSGKIVQIPFCGEIDCEDWIKKTTARDQDLEPGAPSMGAKSLCIPFKPLCELQPGAKCVCGKNPAKYYTLFGRSY

SEQ ID NO: 47854 - protein, 987 aa, Homo sapiens
MATLSLTVNSGDPPLGALLAVEHVKDDVSISVEEGKENILHVSENVIFTDVNSILRYLARVATTAGLYGSNLMEHTEIDHWLEFSATKLSSCDSFTSTINELNHCLSLRTYLVGNSLSLADLCVWATLKGNAAWQEQLKQKKAPVHVKRWFGFLEAQQAFQSVGTKWDVSTTKARVAPEKKQDVGKFVELPGAEMGKVTVRFPPEASGYLHIGHAKAALLNQHYQVNFKGKLIMRFDDTNPEKEKEDFEKVIKSVVMTLCQKSIKVTGLPNTFMVILEDVAMLHIKPDQFTYTSDHFETIMKYAEKLIQEGKAYVDDTPAEQMKAEREQRIDSKHRKNPIEKNLQMWEEMKKGSQFGQSCCLRAKIDMSSNNGCMRDPTLYRCKIQPHPRTGNKYNVYPTYDFACPIVDSIEGVTHALRTTEYHDRDEQFYWIIEALGIRKPYIWEYSRLNLNNTVLSKRKLTWFVNEGLVDGWDDPRFPTVRGVLRRGMTVEGLKQFIAAQGSSRSVVNMEWDKIWAFNKKVIDPVAPRYVALLKKEVIPVNVPEAQEEMKEVAKHPKNPEVGLKPVWYSPKVFIEGADAETFSEGEMVTFINWGNLNITKIHKNADGKIISLDAKLNLENKDYKKTTKVTWLAETTHALPIPVICVTYEHLITKPVLGKDEDFKQYVNKNSKHEELMLGDPCLKDLKKGDIIQLQRRGFFICDQPYEPVSPYSCKEAPCVLIYIPDGHTKEMPTSGSKEKTKVEATKNETSAPFKERPTPSLNNNCTTSEDSLVLYNRVAVQGDVVRELKAKKAPKEDVDAAVKQLLSLKAEYKEKTGQEYKPGNPPAEIGQNISSNSSASILESKSLYDEVAAQGEVVRKLKAEKSPKAKINEAVECLLSLKAQYKEKTGKEYIPGQPPLSQSSDSSPTRNSEPAGLETPEAKVLFDKVASQGEVVRKLKTEKAPKDQVDIAVQELLQLKAQYKSLIGVEYKPVSATGAEDKDK

SEQ ID NO: 47855 - protein, 975 aa, Homo sapiens
MATLSLTVNSGDPPLGALLAVEHVKDDVSISVEEGKENILHVSENVIFTDVNSILRYLARVATTAGLYGSNLMEHTEIDHWLEFSATKLSSCDSFTSTINELNHCLSLRTYLVGNSLSLADLCVWATLKGNAAWQEQLKQKKAPVHVKRWFGFLEAQQAFQSVGTKWDVSTTKARVAPEKKQDVGKFVELPGAEMGKVTVRFPPEASGYLHIGHAKAALLNQHYQVNFKGKLIMRFDDTNPEKEKEDFEKVILEDVAMLHIKPDQFTYTSDHFETIMKYAEKLIQEGKAYVDDTPAEQMKAEREQRIDSKHRKNPIEKNLQMWEEMKKGSQFGQSCCLRAKIDMSSNNGCMRDPTLYRCKIQPHPRTGNKYNVYPTYDFACPIVDSIEGVTHALRTTEYHDRDEQFYWIIEALGIRKPYIWEYSRLNLNNTVLSKRKLTWFVNEGLVDGWDDPRFPTVRGVLRRGMTVEGLKQFIAAQGSSRSVVNMEWDKIWAFNKKLRALCKKVIDPVAPRYVALLKKEVIPVNVPEAQEEMKEVAKHPKNPEVGLKPVWYSPKVFIEGADAETFSEGEMVTFINWGNLNITKIHKNADGKIISLDAKLNLENKDYKKTTKVTWLAETTHALPIPVICVTYEHLITKPVLGKDEDFKQYVNKNSKHEELMLGDPCLKDLKKGDIIQLQRRGFFICDQPYEPVSPYSCKEAPCVLIYIPDGHTKEMPTSGSKEKTKVEATKNETSAPFKERPTPSLNNNCTTSEDSLVLYNRVAVQGDVVRELKAKKAPKEDVDAAVKQLLSLKAEYKEKTGQEYKPGNPPAEIGQNISSNSSASILESKSLYDEVAAQGEVVRKLKAEKSPKAKINEAVECLLSLKAQYKEKTGKEYIPGQPPLSQSSDSSPTRNSEPAGLETPEAKVLFDKVASQGEVVRKLKTEKAPKDQVDIAVQELLQLKAQYKSLIGVEYKPVSATGAEDKDKKKKEK

SEQ ID NO: 47856 - protein, 523 aa, Homo sapiens
MAALLRRLLQRERPSAASGRPVGRREANLGTDAGVAVRVRFAPSPTGFLHLGGLRTALYNYIFAKKYQGSFILRLEDTDQTRVVPGAAENIEDMLEWAGIPPDESPRRGGPAGPYQQSQRLELYAQATEALLKTGAAYPCFCSPQRLELLKKEALRNHQTPRYDNRCRNMSQEQVAQKLAKDPKPAIRFRLEQVVPAFQDLVYGWNRHEVASVEGDPVIMKSDGFPTYHLACVVDDHHMGISHVLRGSEWLVSTAKHLLLYQALGWQPPHFAHLPLLLNRDGSKLSKRQGDVFLEHFAADGFLPDSLLDIITNCGSGFAENQMGRTLPELITQFNLTQVTCHSALLDLEKLPEFNRLHLQRLVSNESQRRQLVGKLQVLVEEAFGCQLQNRDVLNPVYVERILLLRQGHICRLQDLVSPVYSYLWTRPAVGRAQLDAISEKVDVIAKRVLGLLERSSMSLTQDMLNGELKKLSEGLEGTKYSNVMKLLRMALSGQQQGPPVAEMMLALGPKEVRERIQKVVSS

SEQ ID NO: 47857 - protein, 523 aa, Homo sapiens; identical to SEQ ID NO: 47856

SEQ ID NO: 47858 - protein, 106 aa, Homo sapiens
MAQEFVNCKIQPGKVVVFIKPTCPYCRRAQEILSQLPIKQGLLEFVDITATNHTNEIQDYLQQLTGARTVPRVFIGKDCIGGCSDLVSLQQSGELLTRLKQIGALQ

SEQ ID NO: 47859 - protein, 106 aa, Homo sapiens; identical to SEQ ID NO: 47858

SEQ ID NO: 47860 - protein, 106 aa, Homo sapiens; identical to SEQ ID NO: 47858

SEQ ID NO: 47861 - protein, 106 aa, Homo sapiens; identical to SEQ ID NO: 47858

SEQ ID NO: 47862 - protein, 106 aa, Homo sapiens; identical to SEQ ID NO: 47858

SEQ ID NO: 47863 - protein, 164 aa, Homo sapiens
MIWRRAALAGTRLVWSRSGSAGWLDRAAGAAGAAAAAASGMESNTSSSLENLATAPVNQIQETISDNCVVIFSKTSCSYCTMAKKLFHDMNVNYKVVELDLLEYGNQFQDALYKMTGERTVPRIFVNGTFIGGATDTHRLHKEGKLLPLVHQCYLKKSKRKEFQ

SEQ ID NO: 47864 - protein, 165 aa, Homo sapiens
MNPRDKQVSRFSPLKDVYTWVALAGIQRSGSPGRTRSAARRMESNTSSSLENLATAPVNQIQETISDNCVVIFSKTSCSYCTMAKKLFHDMNVNYKVVELDLLEYGNQFQDALYKMTGERTVPRIFVNGTFIGGATDTHRLHKEGKLLPLVHQCYLKKSKRKEFQ

SEQ ID NO: 47865 - protein, 335 aa, Homo sapiens
MAAGAAEAAVAAVEEVGSAGQFEELLRLKAKSLLVVHFWAPWAPQCAQMNEVMAELAKELPQVSFVKLEAEGVPEVSEKYEISSVPTFLFFKNSQKIDRLDGAHAPELTKKVQRHASSGSFLPSANEHLKEDLNLRLKKLTHAAPCMLFMKGTPQEPRCGFSKQMVEILHKHNIQFSSFDIFSDEEVRQGLKAYSSWPTYPQLYVSGELIGGLDIIKELEASEELDTICPKAPKLEERLKVLTNKASVMLFMKGNKQEAKCGFSKQILEILNSTGVEYETFDILEDEEVRQGLKAYSNWPTYPQLYVKGELVGGLDIVKELKENGELLPILRGEN

SEQ ID NO: 47866 - protein, 335 aa, Homo sapiens; identical to SEQ ID NO: 47865

SEQ ID NO: 47867 - protein, 335 aa, Homo sapiens; identical to SEQ ID NO: 47865

SEQ ID NO: 47868 - protein, 157 aa, Homo sapiens
MSGSLGRAAAALLRWGRGAGGGGLWGPGVRAAGSGAGGGGSAEQLDALVKKDKVVVFLKGTPEQPQCGFSNAVVQILRLHGVRDYAAYNVLDDPELRQGIKDYSNWPTIPQVYLNGEFVGGCDILLQMHQNGDLVEELKKLGIHSALLDEKKDQDSK

SEQ ID NO: 47869 - protein, 290 aa, Homo sapiens
MLKREMKPESDRPRKVRFRIASSHSGRVLKEVYEDGQPSGSLDSECASICGIDGLGDSDGQQNGHIESEGDENENDQDSLLVLARAASEKGFGTRRVNILSKNGTVRGVKYKVSAGQALFNNLTKVLQQPSTDLEFDRVVIYTTCLRVVRTTFERCELVRKIFQNHRVKFEEKNIALNGEYGKELDERCRRVSEAPSLPVVFIDGHYLGGAEKILSMNESGELQDILTKIERVQHPHECPSCGGFGFLPCSVCHGSKMSMFRNCFTDSFKALKCTACNENGLQRCKNCAG

SEQ ID NO: 47870 - protein, 438 aa, Homo sapiens
MALRGVSVRLLSRGPGLHVLRTWVSSAAQTEKGGRTQSQLAKSSRPEFDWQDPLVLEEQLTTDEILIRDTFRTYCQERLMPRILLANRNEVFHREIISEMGELGVLGPTIKGYGCAGVSSVAYGLLARELERVDSGYRSAMSVQSSLVMHPIYAYGSEEQRQKYLPQLAKGELLGCFGLTEPNSGSDPSSMETRAHYNSSNKSYTLNGTKTWITNSPMADLFVVWARCEDGCIRGFLLEKGMRGLSAPRIQGKFSLRASATGMIIMDGVEVPEENVLPGASSLGGPFGCLNNARYGIAWGVLGASEFCLHTARQYALDRMQFGVPLARNQLIQKKLADMLTEITLGLHACLQLGRLKDQDKAAPEMVSLLKRNNCGKALDIARQARDMLGGNGISDEYHVIRHAMNLEAVNTYEGTHDIHALILGRAITGIQAFTASK

SEQ ID NO: 47871 - protein, 328 aa, Homo sapiens
MALRGVSVRLLSRGPGLHVLRTWVSSAAQTASRPEFDWQDPLVLEEQLTTDEILIRDTFRTYCQERLMPRILLANRNEGYGCAGVSSVAYGLLARELERVDSGYRSAMSVQSSLVMHPIYAYGSEEQRQKYLPQLAKGELLGCFGLTEPNSGSDPSSMETRAHYNSSNKSYTLNGTKTWITNSPMADLFVVWARCEDGCIRGFLLEKGMRGLSAPRIQGKFSLRASATGMIIMDGVEVPEENVLPGASSLGGPFGCLNNARYGIAWGVLGASEFCLHTARQYALDRMQFGVPLARNQLIQKKLADMLTEITLGLHACLQLGRLKDQDK

SEQ ID NO: 47872 - protein, 394 aa, Homo sapiens
MRSSSGTPSAPTARRDSCLASCWPIATKSLALLPRLECSGTILAHCKFCLPGSSDSPASTPLVAGITGYGCAGVSSVAYGLLARELERVDSGYRSAMSVQSSLVMHPIYAYGSEEQRQKYLPQLAKGELLGCFGLTEPNSGSDPSSMETRAHYNSSNKSYTLNGTKTWITNSPMADLFVVWARCEDGCIRGFLLEKGMRGLSAPRIQGKFSLRASATGMIIMDGVEVPEENVLPGASSLGGPFGCLNNARYGIAWGVLGASEFCLHTARQYALDRMQFGVPLARNQLIQKKLADMLTEITLGLHACLQLGRLKDQDKAAPEMVSLLKRNNCGKALDIARQARDMLGGNGISDEYHVIRHAMNLEAVNTYEGTHDIHALILGRAITGIQAFTASK

SEQ ID NO: 47873 - protein, 428 aa, Homo sapiens
MALRGVSVRLLSRGPGLHVLRTWVSSAAQTEKGGRTQSQLAKSSRPEFDWQDPLVLEEQLTTDEILIRDTFRTYCQERLMPRILLANRNEVFHREIISEMGELGVLGPTIKGYGCAGVSSVAYGLLARELERVDSGYRSAMSVQSSLVMHPIYAYGSEEQRQKYLPQLAKGELLGCFGLTEPNSGSDPSSMETRAHYNSSNKSYTLNGTKTWITNSPMADLFVVWARCEDGCIRGFLLEKGMRGLSAPRIQGKFSLRASATGMIIMDGVEVPEENVLPGASSLGGPFGCLNNARYGIAWGVLGASEFCLHTARQYALDRMQFGVPLARNQLIQKKLADMLTEITLGLHACLQLGRLKDQDKAAPEMVSLLKRNNCGKALDIARQARDMLGGNGISDEYHVIRHAMNLEAVNTYEVVQMCSLKRRWNSL

SEQ ID NO: 47874 - protein, 98 aa, Homo sapiens
MCAARLAAAAAAAQSVYAFSARPLAGGEPVSLGSLRGKVLLIENVASLUGTTVRDYTQMNELQRRLGPRGLVVLGFPCNQFGHQVRRAERGGAGADVQ

SEQ ID NO: 47875 - protein, 203 aa, Homo sapiens
MCAARLAAAAAAAQSVYAFSARPLAGGEPVSLGSLRGKVLLIENVASLUGTTVRDYTQMNELQRRLGPRGLVVLGFPCNQFGHQENAKNEEILNSLKYVRPGGGFEPNFMLFEKCEVNGAGAHPLFAFLREALPAPSDDATALMTDPKLITWSPVCRNDVAWNFEKFLVGPDGVPLRRYSRRFQTIDIEPDIEALLSQGPSCA

SEQ ID NO: 47876 - protein, 190 aa, Homo sapiens
MAFIAKSFYDLSAISLDGEKVDFNTFRGRAVLIENVASLUGTTTRDFTQLNELQCRFPRRLVVLGFPCNQFGHQENCQNEEILNSLKYVRPGGGYQPTFTLVQKCEVNGQNEHPVFAYLKDKLPYPYDDPFSLMTDPKLIIWSPVRRSDVAWNFEKFLIGPEGEPFRRYSRTFPTINIEPDIKRLLKVAI

SEQ ID NO: 47877 - protein, 197 aa, Homo sapiens
MSLGRLCRLLKPALLCGALAAPGLAGTMCASRDDWRCARSMHEFSAKDIDGHMVNLDKYRGFVCIVTNVASQUGKTEVNYTQLVDLHARYAECGLRILAFPCNQFGKQEPGSNEEIKEFAAGYNVKFDMFSKICVNGDDAHPLWKWMKIQPKGKGILGNAIKWNFTKFLIDKNGCVVKRYGPMEEPLVIEKDLPHYF

SEQ ID NO: 47878 - protein, 221 aa, Homo sapiens
MTTQLRVVHLLPLLLACFVQTSPKQEKMKMDCHKDEKGTIYDYEAIALNKNEYVSFKQYVGKHILFVNVATYCGLTAQYPELNALQEELKPYGLVVLGFPCNQFGKQEPGDNKEILPGLKYVRPGGGFVPSFQLFEKGDVNGEKEQKVFSFLKHSCPHPSEILGTFKSISWDPVKVHDIRWNFEKFLVGPDGIPVMRWSHRATVSSVKTDILAYLKQFKTK

SEQ ID NO: 47879 - protein, 100 aa, Homo sapiens
MTTQLRVVHLLPLLLACFVQTSPKQEKMKMDCHKDEKGTIYDYEAIALNKNEYVSFKQYVGKHILFVNVATYCGLTAQYPGMSVQGEDLYLVSSFLRKGM

SEQ ID NO: 47880 - protein, 522 aa, Homo sapiens
MALLPRALSAGAGPSWRRAARAFRGFLLLLPEPAALTRALSRAMACRQEPQPQGPPPAAGAVASYDYLVIGGGSGGLASARRAAELGARAAVVESHKLGGTCVNVGCVPKKVMWNTAVHSEFMHDHADYGFPSCEGKFNWRVIKEKRDAYVSRLNAIYQNNLTKSHIEIIRGHAAFTSDPKPTIEVSGKKYTAPHILIATGGMPSTPHESQIPGASLGITSDGFFQLEELPGRSVIVGAGYIAVEMAGILSALGSKTSLMIRHDKVLRSFDSMISTNCTEELENAGVEVLKFSQVKEVKKTLSGLEVSMVTAVPGRLPVMTMIPDVDCLLWAIGRVPNTKDLSLNKLGIQTDDKGHIIVDEFQNTNVKGIYAVGDVCGKALLTPVAIAAGRKLAHRLFEYKEDSKLDYNNIPTVVFSHPPIGTVGLTEDEAIHKYGIENVKTYSTSFTPMYHAVTKRKTKCVMKMVCANKEEKVVGIHMQGLGCDEMLQGFAVAVKMGATKADFDNTVAIHPTSSEELVTLR

SEQ ID NO: 47881 - protein, 479 aa, Homo sapiens
MACRQEPQPQGPPPAAGAVASYDYLVIGGGSGGLASARRAAELGARAAVVESHKLGGTCVNVGCVPKKVMWNTAVHSEFMHDHADYGFPSCEGKFNWRVIKEKRDAYVSRLNAIYQNNLTKSHIEIIRGHAAFTSDPKPTIEVSGKKYTAPHILIATGGMPSTPHESQIPGASLGITSDGFFQLEELPGRSVIVGAGYIAVEMAGILSALGSKTSLMIRHDKVLRSFDSMISTNCTEELENAGVEVLKFSQVKEVKKTLSGLEVSMVTAVPGRLPVMTMIPDVDCLLWAIGRVPNTKDLSLNKLGIQTDDKGHIIVDEFQNTNVKGIYAVGDVCGKALLTPVAIAAGRKLAHRLFEYKEDSKLDYNNIPTVVFSHPPIGTVGLTEDEAIHKYGIENVKTYSTSFTPMYHAVTKRKTKCVMKMVCANKEEKVVGIHMQGLGCDEMLQGFAVAVKMGATKADFDNTVAIHPTSSEELVTLR

SEQ ID NO: 47882 - protein, 440 aa, Homo sapiens
MALLPRALSAGAGPSWRRAARAFRGFLLLLPEPAALTRALSRAMACRQEPQPQGPPPAAGAVASYDYLVIGGGSGGLASARRAAELGARAAVVESHKLGGTCVNVGCVPKKVMWNTAVHSEFMHDHADYGFPSCEGKFNWRVIKEKRDAYVSRLNAIYQNNLTKSHIEIIRGHAAFTSDPKPTIEVSGKKYTAPHILIATGGMPSTPHESQIPGASLGITSDGFFQLEELPGRSVIVGAGYIAVEMAGILSALGSKTSLMIRHDKGIQTDDKGHIIVDEFQNTNVKGIYAVGDVCGKALLTPVAIAAGRKLAHRLFEYKEDSKLDYNNIPTVVFSHPPIGTVGLTEDEAIHKYGIENVKTYSTSFTPMYHAVTKRKTKCVMKMVCANKEEKVVGIHMQGLGCDEMLQGFAVAVKMGATKADFDNTVAIHPTSSEELVTLR

SEQ ID NO: 47883 - protein, 469 aa, Homo sapiens
MALLPRALSAGAGPSWRRAARAFRGFLLLLPEPAALTRALSRAMACRQEPQPQGPPPAAGAVASYDYLVIGGGSGGLASARRAAELGARAAVVESHKLGGTCVNVGCVPKKVMWNTAVHSEFMHDHADYGFPSCEGKFNWRVIKEKRDAYVSRLNAIYQNNLTKSHIEIIRGHAAFTSDPKPTIEVSGKKYTAPHILIATGGMPSTPHESQIPGASLGITSDGFFQLEELPGRSVIVGAGYIAVEMAGILSALGSKTSLMIRHDKVLRSFDSMISTNCTEELENAGVEVLKFSQGIQTDDKGHIIVDEFQNTNVKGIYAVGDVCGKALLTPVAIAAGRKLAHRLFEYKEDSKLDYNNIPTVVFSHPPIGTVGLTEDEAIHKYGIENVKTYSTSFTPMYHAVTKRKTKCVMKMVCANKEEKVVGIHMQGLGCDEMLQGFAVAVKMGATKADFDNTVAIHPTSSEELVTLR

SEQ ID NO: 47884 - protein, 493 aa, Homo sapiens
MALLPRALSAGAGPSWRRAARAFRGFLLLLPEPAALTRALSRAMACRQEPQPQGPPPAAGAVASYDYLVIGGGSGGLASARRAAELGARAAVVESHKLGGTCVNVGCVPKKVMWNTAVHSEFMHDHADYGFPSCEGKFNWRVIKEKRDAYVSRLNAIYQNNLTKSHIEIIRGHAAFTSDPKPTIEVSGKKYTAPHILIATGGMPSTPHESQIPGASLGITSDGFFQLEELPGRSVIVGAGYIAVEMAGILSALGSKTSLMIRHDKVKEVKKTLSGLEVSMVTAVPGRLPVMTMIPDVDCLLWAIGRVPNTKDLSLNKLGIQTDDKGHIIVDEFQNTNVKGIYAVGDVCGKALLTPVAIAAGRKLAHRLFEYKEDSKLDYNNIPTVVFSHPPIGTVGLTEDEAIHKYGIENVKTYSTSFTPMYHAVTKRKTKCVMKMVCANKEEKVVGIHMQGLGCDEMLQGFAVAVKMGATKADFDNTVAIHPTSSEELVTLR

SEQ ID NO: 47885 - protein, 222 aa, Homo sapiens
MAEKPKLHYFNARGRMESTRWLLAAAGVEFEEKFIKSAEDLDKLRNDGYLMFQQVPMVEIDGMKLVQTRAILNYIASKYNLYGKDIKERALIDMYIEGIADLGEMILLLPVCPPEEKDAKLALIKEKIKNRYFPAFEKVLKSHGQDYLVGNKLSRADIHLVELLYYVEELDSSLISSFPLLKALKTRISNLPTVKKFLQPGSPRKPPMDEKSLEEARKIFRF

SEQ ID NO: 47886 - protein, 222 aa, Homo sapiens
MAEKPKLHYSNIRGRMESIRWLLAAAGVEFEEKFIKSAEDLDKLRNDGYLMFQQVPMVEIDGMKLVQTRAILNYIASKYNLYGKDIKEKALIDMYIEGIADLGEMILLLPFSQPEEQDAKLALIQEKTKNRYFPAFEKVLKSHGQDYLVGNKLSRADIHLVELLYYVEELDSSLISSFPLLKALKTRISNLPTVKKFLQPGSPRKPPMDEKSLEESRKIFRF

SEQ ID NO: 47887 - protein, 222 aa, Homo sapiens
MAGKPKLHYFNGRGRMEPIRWLLAAAGVEFEEKFIGSAEDLGKLRNDGSLMFQQVPMVEIDGMKLVQTRAILNYIASKYNLYGKDIKERALIDMYTEGMADLNEMILLLPLCRPEEKDAKIALIKEKTKSRYFPAFEKVLQSHGQDYLVGNKLSRADISLVELLYYVEELDSSLISNFPLLKALKTRISNLPTVKKFLQPGSPRKPPADAKALEEARKIFRF

SEQ ID NO: 47888 - protein, 172 aa, Homo sapiens
MFQQVPMVEIDGMKLVQTRAILNYIASKYNLYGKDIKERALIDMYTEGMADLNEMILLLPLCRPEEKDAKIALIKEKTKSRYFPAFEKVLQSHGQDYLVGNKLSRADISLVELLYYVEELDSSLISNFPLLKALKTRISNLPTVKKFLQPGSPRKPPADAKALEEARKIFRF

SEQ ID NO: 47889 - protein, 108 aa, Homo sapiens
MFQQVPMVEIDGMKLVQTRAILNYIASKYNLYGKDIKERALIDMYTEGMADLNEMILLLPLCRPEEKDAKIALIKEKTKSRYFPAFEADISLVELLYYVEELDSSLIS

SEQ ID NO: 47890 - protein, 222 aa, Homo sapiens
MAARPKLHYPNGRGRMESVRWVLAAAGVEFDEEFLETKEQLYKLQDGNHLLFQQVPMVEIDGMKLVQTRSILHYIADKHNLFGKNLKERTLIDMYVEGTLDLLELLIMHPFLKPDDQQKEVVNMAQKAIIRYFPVFEKILRGHGQSFLVGNQLSLADVILLQTILALEEKIPNILSAFPFLQEYTVKLSNIPTIKRFLEPGSKKKPPPDEIYVRTVYNIFRP

SEQ ID NO: 47891 - protein, 129 aa, Homo sapiens
MYVEGTLDLLELLIMHPFLKPDDQQKEVVNMAQKAIIRYFPVFEKILRGHGQSFLVGNQLSLADVILLQTILALEEKIPNILSAFPFLQEYTVKLSNIPTIKRFLEPGSKKKPPPDEIYVRTVYNIFRP

SEQ ID NO: 47892 - protein, 222 aa, Homo sapiens; identical to SEQ ID NO: 47890

SEQ ID NO: 47893 - protein, 89 aa, Homo sapiens
MYVEGTLDLLELLIMHPFLKPDDQQKEVVNMAQKAIIRYFPVFEKILRGHGQSFLVGNQLSLADVILLQTILALEEKIPNILSAFPFLQ

SEQ ID NO: 47894 - protein, 129 aa, Homo sapiens; identical to SEQ ID NO: 47891

SEQ ID NO: 47895 - protein, 222 aa, Homo sapiens
MAEKPKLHYSNARGSMESIRWLLAAAGVELEEKFLESAEDLDKLRNDGSLLFQQVPMVEIDGMKLVQTRAILNYIASKYNLYGKDMKERALIDMYTEGIVDLTEMILLLLICQPEERDAKTALVKEKIKNRYFPAFEKVLKSHRQDYLVGNKLSWADIHLVELFYYVEELDSSLISSFPLLKALKTRISNLPTVKKFLQPGSQRKPPMDEKSLEEARKIFRF

SEQ ID NO: 47896 - protein, 222 aa, Homo sapiens; identical to SEQ ID NO: 47895

SEQ ID NO: 47897 - protein, 218 aa, Homo sapiens
MPMILGYWDIRGLAHAIRLLLEYTDSSYEEKKYTMGDAPDYDRSQWLNEKFKLGLDFPNLPYLIDGAHKITQSNAILCYIARKHNLCGETEEEKIRVDILENQTMDNHMQLGMICYNPEFEKLKPKYLEELPEKLKLYSEFLGKRPWFAGNKITFVDFLVYDVLDLHRIFEPKCLDAFPNLKDFISRFEGLEKISAYMKSSRFLPRPVFSKMAVWGNK

SEQ ID NO: 47898 - protein, 181 aa, Homo sapiens
MPMILGYWDIRGLAHAIRLLLEYTDSSYEEKKYTMGDAPDYDRSQWLNEKFKLGLDFPNLPYLIDGAHKITQSNAILCYIARKHNLCGETEEEKIRVDILENQTMDNHMQLGMICYNPEFEKLKPKYLEELPEKLKLYSEFLGKRPWFAGNKGLEKISAYMKSSRFLPRPVFSKMAVWGNK

SEQ ID NO: 47899 - protein, 149 aa, Homo sapiens
MPMILGYWDIRGLAHAIRLLLEYTDSSYEEKKYTMGDAPDYDRSQWLNEKFKLGLDFPNLPYLIDGAHKITQSNAILCYIARKHNLCGETEEEKIRVDILENQTMDNHMQLGMICYNPEFGLEKISAYMKSSRFLPRPVFSKMAVWGNK

SEQ ID NO: 47900 - protein, 237 aa, Homo sapiens
MPMILGYWDIRGLAHAIRLLLEYTDSSYEEKKYTMGDAPDYDRSQWLNEKFKLGLDFPNGMLGSLVAQLSFAGFPSIQLPYLIDGAHKITQSNAILCYIARKHNLCGETEEEKIRVDILENQTMDNHMQLGMICYNPEFEKLKPKYLEELPEKLKLYSEFLGKRPWFAGNKITFVDFLVYDVLDLHRIFEPKCLDAFPNLKDFISRFEGLEKISAYMKSSRFLPRPVFSKMAVWGNK

SEQ ID NO: 47901 - protein, 218 aa, Homo sapiens
MPMTLGYWNIRGLAHSIRLLLEYTDSSYEEKKYTMGDAPDYDRSQWLNEKFKLGLDFPNLPYLIDGTHKITQSNAILRYIARKHNLCGESEKEQIREDILENQFMDSRMQLAKLCYDPDFEKLKPEYLQALPEMLKLYSQFLGKQPWFLGDKITFVDFIAYDVLERNQVFEPSCLDAFPNLKDFISRFEGLEKISAYMKSSRFLPRPVFTKMAVWGNK

SEQ ID NO: 47902 - protein, 179 aa, Homo sapiens
MTLGYWNIRGLAHSIRLLLEYTDSSYEEKKYTMGDAPDYDRSQWLNEKFKLGLDFPNLPYLIDGTHKITQSNAILRYIARKHNLCGESEKEQIREDILENQFMDSRMQLAKLCYDPDFEKLKPEYLQALPEMLKLYSQFLGKQPWFLGDKGLEKISAYMKSSRFLPRPVFTKMAVWGNK

SEQ ID NO: 47903 - protein, 87 aa, Homo sapiens
MDSRMQLAKLCYDPDFEKLKPEYLQALPEMLKLYSQFLGKQPWFLGDKITFVDFIAYDVLERNQVFEPSCLDAFPNLKDFISRFEHS

SEQ ID NO: 47904 - protein, 191 aa, Homo sapiens
MPMTLGYWNIRGLAHSIRLLLEYTDSSYEEKKYTMGDAPDYDRSQWLNEKFKLGLDFPNLPYLIDGTHKITQSNAILRYIARKHNLCGESEKEQIREDILENQFMDSRMQLAKLCYDPDFEKLKPEYLQALPEMLKLYSQFLGKQPWFLGDKITFVDFIAYDVLERNQVFEPSCLDAFPNLKDFISRFEHS

SEQ ID NO: 47905 - protein, 191 aa, Homo sapiens; identical to SEQ ID NO: 47904

SEQ ID NO: 47906 - protein, 225 aa, Homo sapiens
MSCESSMVLGYWDIRGLAHAIRLLLEFTDTSYEEKRYTCGEAPDYDRSQWLDVKFKLDLDFPNLPYLLDGKNKITQSNAILRYIARKHNMCGETEEEKIRVDIIENQVMDFRTQLIRLCYSSDHEKLKPQYLEELPGQLKQFSMFLGKFSWFAGEKLTFVDFLTYDILDQNRIFDPKCLDEFPNLKAFMCRFEALEKIAAYLQSDQFCKMPINNKMAQWGNKPVC

SEQ ID NO: 47907 - protein, 225 aa, Homo sapiens; identical to SEQ ID NO: 47906

SEQ ID NO: 47908 - protein, 225 aa, Homo sapiens; identical to SEQ ID NO: 47906

SEQ ID NO: 47909 - protein, 195 aa, Homo sapiens
MSMTLGYWDIRGLAHAIRLLLEYTDSSYEEKKYTMGDAPDYDRSQWLNEKFKLGLDFPNLPYLIDGAHKITQSNAILCYIARKHNLCGETEEEKIRVDILENQAMDVSNQLARVCYSPDFEKLKPEYLEELPTMMQHFSQFLGKRPWFVGDKITFVDFLAYDVLDLHRIFEPNCLDAFPNLKDFISRFEVSCGIM

SEQ ID NO: 47910 - protein, 157 aa, Homo sapiens
MSMTLGYWDIRGLAHAIRLLLEYTDSSYEEKKYTMGDAPDYDRSQWLNEKFKLGLDFPNEKLKPEYLEELPTMMQHFSQFLGKRPWFVGDKITFVDFLAYDVLDLHRIFEPNCLDAFPNLKDFISRFEGLEKISAYMKSSRFLPKPLYTRVAVWGNK

SEQ ID NO: 47911 - protein, 202 aa, Homo sapiens
MLGSLLAQLSFPGFPSIQLPYLIDGAHKITQSNAILCYIARKHNLCGETEEEKIRVDILENQAMDVSNQLARVCYSPDFEKLKPEYLEELPTMMQHFSQFLGKRPWFVGDKITFVDFLAYDVLDLHRIFEPNCLDAFPNLKDFISRFEVMPPSSFLFDAPCSVTSFQMLSQSWSYIKNNLHLLSAGFMPGTLPSTLYLSCGI

SEQ ID NO: 47912 - protein, 218 aa, Homo sapiens
MSMTLGYWDIRGLAHAIRLLLEYTDSSYEEKKYTMGDAPDYDRSQWLNEKFKLGLDFPNLPYLIDGAHKITQSNAILCYIARKHNLCGETEEEKIRVDILENQAMDVSNQLARVCYSPDFEKLKPEYLEELPTMMQHFSQFLGKRPWFVGDKITFVDFLAYDVLDLHRIFEPNCLDAFPNLKDFISRFEGLEKISAYMKSSRFLPKPLYTRVAVWGNK

SEQ ID NO: 47913 - protein, 218 aa, Homo sapiens
MPMTLGYWDIRGLAHAIRLLLEYTDSSYVEKKYTLGDAPDYDRSQWLNEKFKLGLDFPNLPYLIDGAHKITQSNAILRYIARKHNLCGETEEEKIRVDILENQVMDNHMELVRLCYDPDFEKLKPKYLEELPEKLKLYSEFLGKRPWFAGDKITFVDFLAYDVLDMKRIFEPKCLDAFLNLKDFISRFEGLKKISAYMKSSQFLRGLLFGKSATWNSK

SEQ ID NO: 47914 - protein, 237 aa, Homo sapiens
MPMTLGYWDIRGLAHAIRLLLEYTDSSYVEKKYTLGDAPDYDRSQWLNEKFKLGLDFPNGMLGSLVAQLSFPGFPSIQLPYLIDGAHKITQSNAILRYIARKHNLCGETEEEKIRVDILENQVMDNHMELVRLCYDPDFEKLKPKYLEELPEKLKLYSEFLGKRPWFAGDKITFVDFLAYDVLDMKRIFEPKCLDAFLNLKDFISRFEGLKKISAYMKSSQFLRGLLFGKSATWNSK

SEQ ID NO: 47915 - protein, 202 aa, Homo sapiens
MLGSLVAQLSFPGFPSIQLPYLIDGAHKITQSNAILRYIARKHNLCGETEEEKIRVDILENQVMDNHMELVRLCYDPDFEKLKPKYLEELPEKLKLYSEFLGKRPWFAGDKITFVDFLAYDVLDMKRIFEPKCLDAFLNLKDFISRFEVMPPSSFLFDAPCSFLSFQMLSQSWSYTKNNSYVLSTGFMPGIMPSTLYLSCRI

SEQ ID NO: 47916 - protein, 208 aa, Homo sapiens
MSGESARSLGKGSAPPGPVPEGSIRIYSMRFCPFAERTRLVLKAKGIRHEVININLKNKPEWFFKKNPFGLVPVLENSQGQLIYESAITCEYLDEAYPGKKLLPDDPYEKACQKMILELFSKVLTNKKTTFFGGNSISMIDYLIWPWFERLEAMKLNECVDHTPKLKLWMAAMKEDPTVSALLTSEKDWQGFLELYLQNSPEACDYGL

SEQ ID NO: 47917 - protein, 241 aa, Homo sapiens
MSGESARSLGKGSAPPGPVPEGSIRIYSMRFCPFAERTRLVLKAKGIRHEVININLKNKPEWFFKKNPFGLVPVLENSQGQLIYESAITCEYLDEAYPGKKLLPDDPYEKACQKMILELFSKVPSLVGSFIRSQNKEDYAGLKEEFRKEFTKLEEVLTNKKTTFFGGNSISMIDYLIWPWFERLEAMKLNECVDHTPKLKLWMAAMKEDPTVSALLTSEKDWQGFLELYLQNSPEACDYGL

SEQ ID NO: 47918 - protein, 180 aa, Homo sapiens
MRFCPFAERTRLVLKAKGIRHEVININLKNKPEWFFKKNPFGLVPVLENSQGQLIYESAITCEYLDEAYPGKKLLPDDPYEKACQKMILELFSKVLTNKKTTFFGGNSISMIDYLIWPWFERLEAMKLNECVDHTPKLKLWMAAMKEDPTVSALLTSEKDWQGFLELYLQNSPEACDYGL

SEQ ID NO: 47919 - protein, 200 aa, Homo sapiens
MRFCPFAERTRLVLKAKGIRHEVININLKNKPEWFFKKNPFGLVPVLENSQGQLIYESAITCEYLDEAYPGKKLLPDDPYEKACQKMILELFSKVPSLVGSFIRSQNKEDYAGLKEEFRKEFTKLEEVLTNKKTTFFGGNSISMIDYLIWPWFERLEAMKLNECVDHTPKLKLWMAAMKEDPTVSALLTSEKDWQGFLEL

SEQ ID NO: 47920 - protein, 213 aa, Homo sapiens
MRFCPFAERTRLVLKAKGIRHEVININLKNKPEWFFKKNPFGLVPVLENSQGQLIYESAITCEYLDEAYPGKKLLPDDPYEKACQKMILELFSKVPSLVGSFIRSQNKEDYAGLKEEFRKEFTKLEEVLTNKKTTFFGGNSISMIDYLIWPWFERLEAMKLNECVDHTPKLKLWMAAMKEDPTVSALLTSEKDWQGFLELYLQNSPEACDYGL

SEQ ID NO: 47921 - protein, 243 aa, Homo sapiens
MSGDATRTLGKGSQPPGPVPEGLIRIYSMRFCPYSHRTRLVLKAKDIRHEVVNINLRNKPEWYYTKHPFGHIPVLETSQCQLIYESVIACEYLDDAYPGRKLFPYDPYERARQKMLLELFCKVPHLTKECLVALRCGRECTNLKAALRQEFSNLEEILEYQNTTFFGGTCISMIDYLLWPWFERLDVYGILDCVSHTPALRLWISAMKWDPTVCALLMDKSIFQGFLNLYFQNNPNAFDFGLC

SEQ ID NO: 47922 - protein, 215 aa, Homo sapiens
MRFCPYSHRTRLVLKAKDIRHEVVNINLRNKPEWYYTKHPFGHIPVLETSQCQLIYESVIACEYLDDAYPGRKLFPYDPYERARQKMLLELFCKVPHLTKECLVALRCGRECTNLKAALRQEFSNLEEILEYQNTTFFGGTCISMIDYLLWPWFERLDVYGILDCVSHTPALRLWISAMKWDPTVCALLMDKSIFQGFLNLYFQNNPNAFDFGLC

SEQ ID NO: 47923 - protein, 243 aa, Homo sapiens; identical to SEQ ID NO: 47921

SEQ ID NO: 47924 - protein, 166 aa, Homo sapiens
MSGDATRTLGKGSQPPGPVPEGLIRIYSMRFCPYSHRTRLVLKAKDIRHEVVNINLRNKPEWYYTKHPFGHIPVLETSQCQLIYESVIACEYLDDAYPGRKLFPYDPYERARQKMLLELFCKVPHLTKECLVALRCGRECTNLKAALRQEFSNLEEDRKKRKFIPG

SEQ ID NO: 47925 - protein, 121 aa, Homo sapiens
MRFCPYSHRTRLVLKAKDIRHEVVNINLRNKPEWYYTKHPFGHIPVLETSQCQLIYESVIACEYLDDAYPGRKLFPYDPYERARQKMLLELFCKLCEPHASPAALDISHEVGPHSLCSSHG

SEQ ID NO: 47926 - protein, 209 aa, Homo sapiens
MSGDATRTLGKGSQPPGPVPEGLIRIYSMRFCPYSHRTRLVLKAKDIRHEVVNINLRNKPEWYYTKHPFGHIPVLETSQCQLIYESVIACEYLDDAYPGRKLFPYDPYERARQKMLLELFCKILEYQNTTFFGGTCISMIDYLLWPWFERLDVYGILDCVSHTPALRLWISAMKWDPTVCALLMDKSIFQGFLNLYFQNNPNAFDFGLC

SEQ ID NO: 47927 - protein, 240 aa, Homo sapiens
MGLELYLDLLSQPCRAVYIFAKKNDIPFELRIVDLIKGQHLSDAFAQVNPLKKVPALKDGDFTLTESVAILLYLTRKYKVPDYWYPQDLQARARVDEYLAWQHTTLRRSCLRALWHKVMFPVFLGEPVSPQTLAATLAELDVTLQLLEDKFLQNKAFLTGPHISLADLVAITELMHPVGAGCQVFEGRPKLATWRQRVEAAVGEDLFQEAHEVILKAKDFPPADPTIKQKLMPWVLAMIR

SEQ ID NO: 47928 - protein, 161 aa, Homo sapiens
MGLELYLDLLSQPCRAVYIFAKKNDIPFELRIVDLIKGVMFPVFLGEPVSPQTLAATLAELDVTLQLLEDKFLQNKAFLTGPHISLADLVAITELMHPVGAGCQVFEGRPKLATWRQRVEAAVGEDLFQEAHEVILKAKDFPPADPTIKQKLMPWVLAMIR

SEQ ID NO: 47929 - protein, 122 aa, Homo sapiens
MFPVFLGEPVSPQTLAATLAELDVTLQLLEDKFLQNKAFLTGPHISLADLVAITELMHPVGAGCQVFEGRPKLATWRQRVEAAVGEDLFQEAHEVILKAKDFPPADPTIKQKLMPWVLAMIR

SEQ ID NO: 47930 - protein, 65 aa, Homo sapiens
MGLELYLDLLSQPCRAVYIFAKKNDIPFELRIVDLIKGQHLSDAFAQVNPLKKVPALKDGDFTLT

SEQ ID NO: 47931 - protein, 72 aa, Homo sapiens
MGLELYLDLLSQPCRAVYIFAKKNDIPFELRIVDLIKARGCWLPSLRRPTQAGHMAAARGGSSGGGPLPGGP

SEQ ID NO: 47932 - protein, 244 aa, Homo sapiens
MGLELFLDLVSQPSRAVYIFAKKNGIPLELRTVDLVKGQHKSKEFLQINSLGKLPTLKDGDFILTESSAILIYLSCKYQTPDHWYPSDLQARARVHEYLGWHADCIRGTFGIPLWVQVLGPLIGVQVPKEKVERNRTAMDQALQWLEDKFLGDRPFLAGQQVTLADLMALEELMQPVALGYELFEGRPRLAAWRGRVEAFLGAELCQEAHSIILSILEQAAKKTLPTPSPEAYQAMLLRIARIP

SEQ ID NO: 47933 - protein, 474 aa, Homo sapiens
MATNWGSLLQDKQQLEELARQAVDRALAEGVLLRTSQEPTSSEVVSYAPFTLFPSLVPSALLEQAYAVQMDFNLLVDAVSQNAAFLEQTLSSTIKQDDFTARLFDIHKQVLKEGIAQTVFLGLNRSDYMFQRSADGSPALKQIEINTISASFGGLASRTPAVHRHVLSVLSKTKEAGKILSNNPSKGLALGIAKAWELYGSPNALVLLIAQEKERNIFDQRAIENELLARNIHVIRRTFEDISEKGSLDQDRRLFVDGQEIAVVYFRDGYMPRQYSLQNWEARLLLERSHAAKCPDIATQLAGTKKVQQELSRPGMLEMLLPGQPEAVARLRATFAGLYSLDVGEEGDQAIAEALAAPSRFVLKPQREGGGNNLYGEEMVQALKQLKDSEERASYILMEKIEPEPFENCLLRPGSPARVVQCISELGIFGVYVRQEKTLVMNKHVGHLLRTKAIEHADGGVAAGVAVLDNPYPV

SEQ ID NO: 47934 - protein, 363 aa, Homo sapiens
MATNWGSLLQDKQQLEELARQAVDRALAEGVLLRTSQEPTSSEVVSYAPFTLFPSLVPSALLEQAYAVQMDFNLLVDAVSQNAAFLEQTLSSALVLLIAQEKERNIFDQRAIENELLARNIHVIRRTFEDISEKGSLDQDRRLFVDGQEIAVVYFRDGYMPRQYSLQNWEARLLLERSHAAKCPDIATQLAGTKKVQQELSRPGMLEMLLPGQPEAVARLRATFAGLYSLDVGEEGDQAIAEALAAPSRFVLKPQREGGGNNLYGEEMVQALKQLKDSEERASYILMEKIEPEPFENCLLRPGSPARVVQCISELGIFGVYVRQEKTLVMNKHVGHLLRTKAIEHADGGVAAGVAVLDNPYPV

SEQ ID NO: 47935 - protein, 346 aa, Homo sapiens
MFQRSADGSPALKQIEINTISASFGGLASRTPAVHRHVLSVLSKTKEAGKILSNNPSKGLALGIAKAWELYGSPNALVLLIAQEKERNIFDQRAIENELLARNIHVIRRTFEDISEKGSLDQDRRLFVDGQEIAVVYFRDGYMPRQYSLQNWEARLLLERSHAAKCPDIATQLAGTKKVQQELSRPGMLEMLLPGQPEAVARLRATFAGLYSLDVGEEGDQAIAEALAAPSRFVLKPQREGGGNNLYGEEMVQALKQLKDSEERASYILMEKIEPEPFENCLLRPGSPARVVQCISELGIFGVYVRQEKTLVMNKHVGHLLRTKAIEHADGGVAAGVAVLDNPYPV

SEQ ID NO: 47936 - protein, 216 aa, Homo sapiens
MQAGKPILYSYFRSSCSWRVRIALALKGIDYETVPINLIKDGGQQFSKDFQALNPMKQVPTLKIDGITIHQSLAIIEYLEEMRPTPRLLPQDPKKRASVRMISDLIAGGIQPLQNLSVLKQVGEEMQLTWAQNAITCGFNALEQILQSTAGIYCVGDEVTMADLCLVPQVANAERFKVDLTPYPTISSINKRLLVLEAFQVSHPCRQPDTPTELRA

SEQ ID NO: 47937 - protein, 174 aa, Homo sapiens
MQAGKPILYSYFRSSCSWRVRIALALKGIDYETVPINLIKDGGQQFSKDFQALNPMKQVPTLKIDGITIHQSNLSVLKQVGEEMQLTWAQNAITCGFNALEQILQSTAGIYCVGDEVTMADLCLVPQVANAERFKVDLTPYPTISSINKRLLVLEAFQVSHPCRQPDTPTELRA

SEQ ID NO: 47938 - protein, 161 aa, Homo sapiens
MKQVPTLKIDGITIHQSLAIIEYLEEMRPTPRLLPQDPKKRASVRMISDLIAGGIQPLQNLSVLKQVGEEMQLTWAQNAITCGFNALEQILQSTAGIYCVGDEVTMADLCLVPQVANAERFKVDLTPYPTISSINKRLLVLEAFQVSHPCRQPDTPTELRA

SEQ ID NO: 47939 - protein, 161 aa, Homo sapiens; identical to SEQ ID NO: 47938

SEQ ID NO: 47940 - protein, 59 aa, Homo sapiens
MKQVPTLKIDGITIHQSLAIIEYLEEMRPTPRLLPQDPKKRASVRMISDLIAGGIQPLQ

SEQ ID NO: 47941 - protein, 38 aa, Homo sapiens
MKQVPTLKIDGITIHQSLAIIEYLEEMRPTPRLLPQDP

SEQ ID NO: 47942 - protein, 161 aa, Homo sapiens; identical to SEQ ID NO: 47938

SEQ ID NO: 47943 - protein, 335 aa, Homo sapiens
MGKVKVGVNGFGRIGRLVTRAAFNSGKVDIVAINDPFIDLNYMVYMFQYDSTHGKFHGTVKAENGKLVINGNPITIFQERDPSKIKWGDAGAEYVVESTGVFTTMEKAGAHLQGGAKRVIISAPSADAPMFVMGVNHEKYDNSLKIISNASCTTNCLAPLAKVIHDNFGIVEGLMTTVHAITATQKTVDGPSGKLWRDGRGALQNIIPASTGAAKAVGKVIPELNGKLTGMAFRVPTANVSVVDLTCRLEKPAKYDDIKKVVKQASEGPLKGILGYTEHQVVSSDFNSDTHSSTFDAGAGIALNDHFVKLISWYDNEFGYSNRVVDLMAHMASKE

SEQ ID NO: 47944 - protein, 260 aa, Homo sapiens
MEEMRDPSKIKWGDAGAEYVVESTGVFTTMEKAGAHLQGGAKRVIISAPSADAPMFVMGVNHEKYDNSLKIISNASCTTNCLAPLAKVIHDNFGIVEGLMTTVHAITATQKTVDGPSGKLWRDGRGALQNIIPASTGAAKAVGKVIPELNGKLTGMAFRVPTANVSVVDLTCRLEKPAKYDDIKKVVKQASEGPLKGILGYTEHQVVSSDFNSDTHSSTFDAGAGIALNDHFVKLISWYDNEFGYSNRVVDLMAHMASKE

SEQ ID NO: 47945 - protein, 293 aa, Homo sapiens
MVYMFQYDSTHGKFHGTVKAENGKLVINGNPITIFQERDPSKIKWGDAGAEYVVESTGVFTTMEKAGAHLQGGAKRVIISAPSADAPMFVMGVNHEKYDNSLKIISNASCTTNCLAPLAKVIHDNFGIVEGLMTTVHAITATQKTVDGPSGKLWRDGRGALQNIIPASTGAAKAVGKVIPELNGKLTGMAFRVPTANVSVVDLTCRLEKPAKYDDIKKVVKQASEGPLKGILGYTEHQVVSSDFNSDTHSSTFDAGAGIALNDHFVKLISWYDNEFGYSNRVVDLMAHMASKE

SEQ ID NO: 47946 - protein, 335 aa, Homo sapiens; identical to SEQ ID NO: 47943

SEQ ID NO: 47947 - protein, 335 aa, Homo sapiens; identical to SEQ ID NO: 47943

SEQ ID NO: 47948 - protein, 215 aa, Homo sapiens
MGKVKVGVNGFGRIGRLVTRAAFNSGKVDIVAINDPFIDLNYMVYMFQYDSTHGKFHGTVKAENGKLVINGNPITIFQERDPSKIKWGDAGAEYVVESTGVFTTMEKAGAHLQGGAKRVIISAPSADAPMFVMGVNHEKYDNSLKIISNASCTTNCLAPLAKVIHDNFGIVEGLMTTVHAITATQREAHWHGLPCPHCQRVSGGPDLPSRKTCQI

SEQ ID NO: 47949 - protein, 408 aa, Homo sapiens
MSKRDIVLTNVTVVQLLRQPCPVTRAPPPPEPKAEVEPQPQPEPTPVREEIKPPPPPLPPHPATPPPKMVSVARELTVGINGFGRIGRLVLRACMEKGVKVVAVNDPFIDPEYMVYMFKYDSTHGRYKGSVEFRNGQLVVDNHEISVYQCKEPKQIPWRAVGSPYVVESTGVYLSIQAASDHISAGAQRVVISAPSPDAPMFVMGVNENDYNPGSMNIVSNASCTTNCLAPLAKVIHERFGIVEGLMTTVHSYTATQKTVDGPSRKAWRDGRGAHQNIIPASTGAAKAVTKVIPELKGKLTGMAFRVPTPDVSVVDLTCRLAQPAPYSAIKEAVKAAAKGPMAGILAYTEDEVVSTDFLGDTHSSIFDAKAGIALNDNFVKLISWYDNEYGYSHRVVDLLRYMFSRDK

SEQ ID NO: 47950 - protein, 367 aa, Homo sapiens
MAAALQVLPRLARAPLHPLLWRGSVARLASSMALAEQARQLFESAVGAVLPGPMLHRALSLDPGGRQLKVRDRNFQLRQNLYLVGFGKAVLGMAAAAEELLGQHLVQGVISVPKGIRAAMERAGKQEMLLKPHSRVQVFEGAEDNLPDRDALRAALAIQQLAEGLTADDLLLVLISGGGSALLPAPIPPVTLEEKQTLTRLLAARGATIQELNTIRKALSQLKGGGLAQAAYPAQVVSLILSDVVGDPVEVIASGPTVASSHNVQDCLHILNRYGLRAALPRSVKTVLSRADSDPHGPHTCGHVLNVIIGSNVLALAEAQRQAEALGYQAVVLSAAMQGWGTPAAHRDDRYQCHGHPPLVPAASVMA

SEQ ID NO: 47951 - protein, 234 aa, Homo sapiens
MAAALQVLPRLARAPLHPLLWRGSVARLASSMALAEQARQLFESAVGAVLPGPMLHRALSLDPGGRQLKVRDRNFQLRQNLYLVGFGKAVLGMAAAAEELLGQHLVQGVISVPKGIRAAMERAGKQEMLLKPHSRVQVFEGAEDNLPDRDALRAALAIQQLAEGLTADDLLLVLISGGEPHPVRCGGGPCGGDCQWPHRGQFPQCARLPAYPQSLRPPCSPATFCEDCAVSGRL

SEQ ID NO: 47952 - protein, 457 aa, Homo sapiens
MAAALQVLPRLARAPLHPLLWRGSVARLASSMALAEQARQLFESAVGAVLPGPMLHRALSLDPGGRQLKVRDRNFQLRQNLYLVGFGKAVLGMAAAAEELLGQHLVQGVISVPKGIRAAPIPPVTLEEKQTLTRLLAARGATIQELNTIRKALSQLKGGGLAQAAYPAQVVSLILSDVVGDPVEVIASGPTVASSHNVQDCLHILNRYGLRAALPRSVKTVLSRADSDPHGPHTCGHVLNVIIGSNVLALAEAQRQAEALGYQAVVLSAAMQGDVKSMAQFYGLLAHVARTRLTPSMAGASVEEDAQLHELAAELQIPDLQLEEALETMAWGRGPVCLLAGGEPTVQLQGSGRGGRNQELALRVGAELRRWPLGPIDVLFLSGGTDGQDGPTEAAGAWVTPELASQAAAEGLDIATFLAHNDSHTFFCCLQGGAHLLHTGMTGTNVMDTHLLFLRPR

SEQ ID NO: 47953 - protein, 523 aa, Homo sapiens
MAAALQVLPRLARAPLHPLLWRGSVARLASSMALAEQARQLFESAVGAVLPGPMLHRALSLDPGGRQLKVRDRNFQLRQNLYLVGFGKAVLGMAAAAEELLGQHLVQGVISVPKGIRAAMERAGKQEMLLKPHSRVQVFEGAEDNLPDRDALRAALAIQQLAEGLTADDLLLVLISGGGSALLPAPIPPVTLEEKQTLTRLLAARGATIQELNTIRKALSQLKGGGLAQAAYPAQVVSLILSDVVGDPVEVIASGPTVASSHNVQDCLHILNRYGLRAALPRSVKTVLSRADSDPHGPHTCGHVLNVIIGSNVLALAEAQRQAEALGYQAVVLSAAMQGDVKSMAQFYGLLAHVARTRLTPSMAGASVEEDAQLHELAAELQIPDLQLEEALETMAWGRGPVCLLAGGEPTVQLQGSGRGGRNQELALRVGAELRRWPLGPIDVLFLSGGTDGQDGPTEAAGAWVTPELASQAAAEGLDIATFLAHNDSHTFFCCLQGGAHLLHTGMTGTNVMDTHLLFLRPR

SEQ ID NO: 47954 - protein, 283 aa, Homo sapiens
MELLLSQSCIWWPMVGEGRTIISCGIKAMERSGNYLIWLQKGEMLLKPHSRVQVFEGAEDNLPDRDALRAALAIQQLAEGLTADDLLLVLISGGGSALLPAPIPPVTLEEKQTLTRLLAARGATIQELNTIRKALSQLKGGGLAQAAYPAQVVSLILSDVVGDPVEVIASGPTVASSHNVQDCLHILNRYGLRAALPRSVKTVLSRADSDPHGPHTCGHVLNVIIGSNVLALAEAQRQAEALGYQAVVLSAAMQGWGTPAAHRDDRYQCHGHPPLVPAASVMA

SEQ ID NO: 47955 - protein, 240 aa, Homo sapiens
MLLKPHSRVQVFEGAEDNLPDRDALRAALAIQQLAEGLTADDLLLVLISGGGSALLPAPIPPVTLEEKQTLTRLLAARGATIQELNTIRKALSQLKGGGLAQAAYPAQVVSLILSDVVGDPVEVIASGPTVASSHNVQDCLHILNRYGLRAALPRSVKTVLSRADSDPHGPHTCGHVLNVIIGSNVLALAEAQRQAEALGYQAVVLSAAMQGWGTPAAHRDDRYQCHGHPPLVPAASVMA

SEQ ID NO: 47956 - protein, 205 aa, Homo sapiens
MAAALQVLPRLARAPLHPLLWRGSVARLASSMALAEQARQLFESAVGAVLPGPMLHRALSLDPGGRQLKVRDRNFQLRQNLYLVGFGKAVLGMAAAAEELLGQHLVQGVISVPKGIRAAMERAGKQEMLLKPHSRVQVFEGAEDNLPDRDALRAALAIQQLAEGLTADDLLLVLISGWGTPAAHRDDRYQCHGHPPLVPAASVMA

SEQ ID NO: 47957 - protein, 234 aa, Homo sapiens; identical to SEQ ID NO: 47951

SEQ ID NO: 47958 - protein, 94 aa, Homo sapiens
KILDAMNRDCGIPLSHLQVDGGMTSNKILMQLQADILYIPVVKPSMPETTALGAAMAAGAAEGVGVWSLEPEDLSAVTMERFEPQINAEGTFKE

SEQ ID NO: 47959 - protein, 553 aa, Homo sapiens
MAASKKAVLGPLVGAVDQGTSSTRFLVFNSKTAELLSHHQVEIKQEFPREGWVEQDPKEILHSVYECIEKTCEKLGQLNIDISNIKAIGVSNQRETTVVWDKITGEPLYNAVVWLDLRTQSTVESLSKRIPGNNNFVKSKTGLPLSTYFSAVKLRWLLDNVRKVQKAVEEKRALFGTIDSWLIWSLTGGVNGGVHCTDVTNASRTMLFNIHSLEWDKQLCEFFGIPMEILPNVRSSSEIYGLMKAGALEGVPISGCLGDQSAALVGQMCFQIGQAKNTYGTGCFLLCNTGHKCVFSDHGLLTTVAYKLGRDKPVYYALEGSVAIAGAVIRWLRDNLGIIKTSEEIEKLAKEVGTSYGCYFVPAFSGLYAPYWEPSARGIICGLTQFTNKCHIAFAALEAVCFQTREILDAMNRDCGIPLSHLQVDGGMTSNKILMQLQADILYIPVVKPSMPETTALGAAMAAGAAEGVGVWSLEPEDLSAVTMERFEPQINAEESEIRYSTWKKAVMKSMGWVTTQSPESGDPSIFCSLPLGFFIVSSMVMLIGARYISGIP

SEQ ID NO: 47960 - protein, 524 aa, Homo sapiens
MAASKKAVLGPLVGAVDQGTSSTRFLVFNSKTAELLSHHQVEIKQEFPREGWVEQDPKEILHSVYECIEKTCEKLGQLNIDISNIKAIGVSNQRETTVVWDKITGEPLYNAVVWLDLRTQSTVESLSKRIPGNNNFVKSKTGLPLSTYFSAVKLRWLLDNVRKVQKAVEEKRALFGTIDSWLIWSLTGGVNGGVHCTDVTNASRTMLFNIHSLEWDKQLCEFFGIPMEILPNVRSSSEIYGLMKAGALEGVPISGCLGDQSAALVGQMCFQIGQAKNTYGTGCFLLCNTGHKCVFSDHGLLTTVAYKLGRDKPVYYALEGSVAIAGAVIRWLRDNLGIIKTSEEIEKLAKEVGTSYGCYFVPAFSGLYAPYWEPSARGIICGLTQFTNKCHIAFAALEAVCFQTREILDAMNRDCGIPLSHLQVDGGMTSNKILMQLQADILYIPVVKPSMPETTALGAAMAAGAAEGVGVWSLEPEDLSAVTMERFEPQINAEESEIRYSTWKKAVMKSMGWVTTQSPESGIP

SEQ ID NO: 47961 - protein, 530 aa, Homo sapiens
MAASKKAVLGPLVGAVDQGTSSTRFLVFNSKTAELLSHHQVEIKQEFPREGWVEQDPKEILHSVYECIEKTCEKLGQLNIDISNIKAIGVSNQRETTVVWDKITGEPLYNAVVWLDLRTQSTVESLSKRIPGNNNFVKSKTGLPLSTYFSAVKLRWLLDNVRKVQKAVEEKRALFGTIDSWLIWSLTGGVNGGVHCTDVTNASRTMLFNIHSLEWDKQLCEFFGIPMEILPNVRSSSEIYGLMKISHSVKAGALEGVPISGCLGDQSAALVGQMCFQIGQAKNTYGTGCFLLCNTGHKCVFSDHGLLTTVAYKLGRDKPVYYALEGSVAIAGAVIRWLRDNLGIIKTSEEIEKLAKEVGTSYGCYFVPAFSGLYAPYWEPSARGIICGLTQFTNKCHIAFAALEAVCFQTREILDAMNRDCGIPLSHLQVDGGMTSNKILMQLQADILYIPVVKPSMPETTALGAAMAAGAAEGVGVWSLEPEDLSAVTMERFEPQINAEESEIRYSTWKKAVMKSMGWVTTQSPESGIP

SEQ ID NO: 47962 - protein, 354 aa, Homo sapiens
MLFNIHSLEWDKQLCEFFGIPMEILPNVRSSSEIYGLMKISHSVKAGALEGVPISGCLGDQSAALVGQMCFQIGQAKNTYGTGCFLLCNTGHKCVFSDHGLLTTVAYKLGRDKPVYYALEGSVAIAGAVIRWLRDNLGIIKTSEEIEKLAKEVGTSYGCYFVPAFSGLYAPYWEPSARGIICGLTQFTNKCHIAFAALEAVCFQTREILDAMNRDCGIPLSHLQVDGGMTSNKILMQLQADILYIPVVKPSMPETTALGAAMAAGAAEGVGVWSLEPEDLSAVTMERFEPQINAEESEIRYSTWKKAVMKSMGWVTTQSPESGDPSIFCSLPLGFFIVSSMVMLIGARYISGIP

SEQ ID NO: 47963 - protein, 367 aa, Homo sapiens
MAYLDNFKTNARHFILFVNISSLTGGVNGGVHCTDVTNASRTMLFNIHSLEWDKQLCEFFGIPMEILPNVRSSSEIYGLMKISHSVKAGALEGVPISGCLGDQSAALVGQMCFQIGQAKNTYGTGCFLLCNTGHKCVFSDHGLLTTVAYKLGRDKPVYYALEGSVAIAGAVIRWLRDNLGIIKTSEEIEKLAKEVGTSYGCYFVPAFSGLYAPYWEPSARGIICGLTQFTNKCHIAFAALEAVCFQTREILDAMNRDCGIPLSHLQVDGGMTSNKILMQLQADILYIPVVKPSMPETTALGAAMAAGAAEGVGVWSLEPEDLSAVTMERFEPQINAEESEIRYSTWKKAVMKSMGWVTTQSPESGIP

SEQ ID NO: 47964 - protein, 559 aa, Homo sapiens
MAASKKAVLGPLVGAVDQGTSSTRFLVFNSKTAELLSHHQVEIKQEFPREGWVEQDPKEILHSVYECIEKTCEKLGQLNIDISNIKAIGVSNQRETTVVWDKITGEPLYNAVVWLDLRTQSTVESLSKRIPGNNNFVKSKTGLPLSTYFSAVKLRWLLDNVRKVQKAVEEKRALFGTIDSWLIWSLTGGVNGGVHCTDVTNASRTMLFNIHSLEWDKQLCEFFGIPMEILPNVRSSSEIYGLMTIHNSKKAGALEGVPISGCLGDQSAALVGQMCFQIGQAKNTYGTGCFLLCNTGHKCVFSDHGLLTTVAYKLGRDKPVYYALEGSVAIAGAVIRWLRDNLGIIKTSEEIEKLAKEVGTSYGCYFVPAFSGLYAPYWEPSARGIICGLTQFTNKCHIAFAALEAVCFQTREILDAMNRDCGIPLSHLQVDGGMTSNKILMQLQADILYIPVVKPSMPETTALGAAMAAGAAEGVGVWSLEPEDLSAVTMERFEPQINAEESEIRYSTWKKAVMKSMGWVTTQSPESGDPSIFCSLPLGFFIVSSMVMLIGARYISGIP

SEQ ID NO: 47965 - protein, 553 aa, Homo sapiens
MAAPKTAAVGPLVGAVVQGTNSTRFLVFNSKTAELLSHHKVELTQEFPKEGWVEQDPKEILQSVYECIARTCEKLDELNIDISNIKAVGVSNQRETTVIWDKLTGEPLYNAVVWLDLRTQTTVEDLSKKIPGNSNFVKSKTGLPLSTYFSAVKLRWMLDNVRNVQKAVEEGRALFGTIDSWLIWSLTGGVNGGVHCTDVTNASRTMLFNIHSLEWDKELCDFFEIPMDLLPNVFSSSEIYGLIKTGALEGVPISGCLGDQCAALVGQMCFQEGQAKNTYGTGCFLLCNTGRKCVFSEHGLLTTVAYKLGREKPAYYALEGSVAIAGAVIRWLRDNLGIIETSGDIERLAKEVGTSYGCYFVPAFSGLYAPYWEPSARGILCGLTQFTNKCHIAFAALEAVCFQTREILEAMNRDCGIPLRHLQVDGGMTNNKVLMQLQADILHIPVIKPFMPETTALGAAMAAGAAEGVSVWSLEPQALSVLRMERFEPQIQATESEIRYATWKKAVMKSMGWVTSQSPEGGDPSIFSSLPLGFFIVSSMVMLIGARYISGVP

SEQ ID NO: 47966 - protein, 349 aa, Homo sapiens
MASKKVCIVGSGNWGSAIAKIVGGNAAQLAQFDPRVTMWVFEEDIGGKKLTEIINTQHENVKYLPGHKLPPNVVAVPDVVQAAEDADILIFVVPHQFIGKICDQLKGHLKANATGISLIKGVDEGPNGLKLISEVIGERLGIPMSVLMGANIASEVADEKFCETTIGCKDPAQGQLLKELMQTPNFRITVVQEVDTVEICGALKNVVAVGAGFCDGLGFGDNTKAAVIRLGLMEMIAFAKLFCSGPVSSATFLESCGVADLITTCYGGRNRKVAEAFARTGKSIEQLEKELLNGQKLQGPETARELYSILQHKGLVDKFPLFMAVYKVCYEGQPVGEFIHCLQNHPEHM

SEQ ID NO: 47967 - protein, 326 aa, Homo sapiens
MQTPNFRITVVQEVDTVEICGALKVRGAQRQLWGEEKAPKEVWLSSARLQVLQALTIEQWFPFPTMSHAYRRSCRSKARAIQADYSSSDRGPPCSCPILAPCGTPHPLAPGGQGDKEMPRLMGDKTSLTPRQTNGQNYGSWTAVDGLYNGMVRWEDQLERRVVFRKCPRGGSMGQGLRKGVQQGGKPRGGSRLLKGHTLYLSSAVGVTADEMSMRGLHMGPIGGGLFTYDLHSFKNVVAVGAGFCDGLGFGDNTKAAVIRLGLMEMIAFAKLFCSGPVSSATFLESCGVADLITTCYGGRNRKVAEAFARTGKVGPGRRENRGAAL

SEQ ID NO: 47968 - protein, 351 aa, Homo sapiens
MAAAPLKVCIVGSGNWGSAVAKIIGNNVKKLQKFASTVKMWVFEETVNGRKLTDIINNDHENVKYLPGHKLPENVVAMSNLSEAVQDADLLVFVIPHQFIHRICDEITGRVPKKALGITLIKGIDEGPEGLKLISDIIREKMGIDISVLMGANIANEVAAEKFCETTIGSKVMENGLLFKELLQTPNFRITVVDDADTVELCGALKNIVAVGAGFCDGLRCGDNTKAAVIRLGLMEMIAFARIFCKGQVSTATFLESCGVADLITTCYGGRNRRVAEAFARTGKTIEELEKEMLNGQKLQGPQTSAEVYRILKQKGLLDKFPLFTAVYQICYESRPVQEMLSCLQSHPEHT

SEQ ID NO: 47969 - protein, 619 aa, Homo sapiens
MESSSSSNSYFSVGPTSPSAVVLLYSLSKESLQSVDVLREEVSEILDEMSHKLRLGAIRFCAFTLSKVFKQIFSKVCVNEEGIQKLQRAIQEHPVVLLPSHRSYIDFLMLSFLLYNYDLPVPVIAAGMDFLGMKMVGELLRMSGAFFMRRTFGGNKLYWAVFSEYVKTMLRNGYAPVEFFLEGTRSRSAKTLTPKFGLLNIVMEPFFKREVFDTYLVPISISYDKILEETLYVYELLGVPKPKESTTGLLKARKILSENFGSIHVYFGDPVSLRSLAAGRMSRSSYNLVPRYIPQKQSEDMHAFVTEVAYKMELLQIENMVLSPWTLIVAVLLQNRPSMDFDALVEKTLWLKGLTQAFGGFLIWPDNKPAEEVVPASILLHSNIASLVKDQVILKVDSGDSEVVDGLMLQHITLLMCSAYRNQLLNIFVRPSLVAVALQMTPGFRKEDVYSCFRFLRDVFADEFIFLPGNTLKDFEEGCYLLCKSEAIQVTTKDILVTEKGNTVLEFLVGLFKPFVESYQIICKYLLSEEEDHFSEEQYLAAVRKFTSQLLDQGTSQCYDVLSSDVQKNALAACVRLGVVEKKKINNNCIFNVNEPATTKLEEMLGCKTPIGKPATAKL

SEQ ID NO: 47970 - protein, 680 aa, Homo sapiens
MESSSSSNSYFSVGPTSPSAVVLLYSKELKKWDEFEDILEERRHVSDLKFAMKCYTPLVYKGITPCKPIDIKCSVLNSEEIHYVIKQLSKESLQSVDVLREEVSEILDEMSHKLRLGAIRFCAFTLSKVFKQIFSKVCVNEEGIQKLQRAIQEHPVVLLPSHRSYIDFLMLSFLLYNYDLPVPVIAAGMDFLGMKMVGELLRMSGAFFMRRTFGGNKLYWAVFSEYVKTMLRNGYAPVEFFLEGTRSRSAKTLTPKFGLLNIVMEPFFKREVFDTYLVPISISYDKILEETLYVYELLGVPKPKESTTGLLKARKILSENFGSIHVYFGDPVSLRSLAAGRMSRSSYNLVPRYIPQKQSEDMHAFVTEVAYKMELLQIENMVLSPWTLIVAVLLQNRPSMDFDALVEKTLWLKGLTQAFGGFLIWPDNKPAEEVVPASILLHSNIASLVKDQVILKVDSGDSEVVDGLMLQHITLLMCSAYRNQLLNIFVRPSLVAVALQMTPGFRKEDVYSCFRFLRDVFADEFIFLPGNTLKDFEEGCYLLCKSEAIQVTTKDILVTEKGNTVLEFLVGLFKPFVESYQIICKYLLSEEEDHFSEEQYLAAVRKFTSQLLDQGTSQCYDVLSSDVQKNALAACVRLGVVEKKKINNNCIFNVNEPATTKLEEMLGCKTPIGKPATAKL

SEQ ID NO: 47971 - protein, 587 aa, Homo sapiens
MESSSSSNSYFSVGPTSPSAVVLLYSKELKKWDEFEDILEERRHVSDLKFAMKCYTPLVYKGITPCKPIDIKCSVLNSEEIHYVIKQLSKESLQSVDVLREEVSEILDEMSHKLRLGAIRFCAFTLSKVFKQIFSKLQRAIQEHPVVLLPSHRSYIDFLMLSFLLYNYDLPVPVIAAGMDFLGMKMVGELLRMSGAFFMRRTFGGNKLYWAVFSEYVKTMLRNGYAPVEFFLEGTRSRSAKTLTPKFGLLNIVMEPFFKREVFDTYLVPISISYDKILEETLYVYELLGVPKPKESTTGLLKARKILSENFGSIHVYFGDPVSLRSLAAGRMSRSSYNLVPRYIPQKQSEDMHAFVTEVAYKMELLQIENMVLSPWTLIVAVLLQNRPSMDFDALVEKTLWLKGLTQAFGGFLIWPDNKPAEEVVPASILLHSNIASLVKDQVILKVDSGDSEVVDGLMLQHITLLMCSAYRNQLLNIFVRPSLVAVALQMTPGFRKEDVYSCFRFLRDVFADEFIFLPGNTLKDFEEGCYLLCKSEAIQVTTKDILVTEKGNTVLEFLVGLFKPFVESYQIICKYLLSEEEDHFSE

SEQ ID NO: 47972 - protein, 222 aa, Homo sapiens
MESSSSSNSYFSVGPTSPSAVVLLYSLSKESLQSVDVLREEVSEILDEMSHKLRLGAIRFCAFTLSKVFKQIFSKVCVNEEGIQKLQRAIQEHPVVLLPSHRSYIDFLMLSFLLYNYDLPVPVIAAGMDFLGMKMVGELLRMSGAFFMRRTFGGNKLYWAVFSEYVKTMLRNGYAPVEFFLEGTRSRSAKTLTPKFGLLNIVMEPFFKREVFDTYLVPISIS

SEQ ID NO: 47973 - protein, 289 aa, Homo sapiens
MSRNSRKTIGKVRVDYIIIKPLPGYSCDMKSSFSKYWKPRIPLDVGHRGAGNSTTTAQLAKVQENTIASLRNAASHGAAFVEFDVHLSKDFVPVVYHDLTCCLTMKKNLWFRRKIPFQKISHFLLLRWVRQKQNKYPILFLTQGKSEIYPELMDLRSRTTPIAMSFAQFENLLGINVHTEDLLRNPSYIQEAKAKGLVIFCWGDDTNDPENRRKLKELGVNGLIYDRIYDWMPEQPNIFQVEQLERLKQELPELKSCLCPTVSRFVPSSLCGESDIHVDANGIDNVENA

SEQ ID NO: 47974 - protein, 672 aa, Homo sapiens
MTPSQVAFEIRGTLLPGEVFAICGSCDALGNWNPQNAVALLPENDTGESMLWKATIVLSRGVSVQYRYFKGYFLEPKTIGGPCQVIVHKWETHLQPRSITPLESEIIIDDGQFGIHNGVETLDSGWLTCQTEIRLRLHYSEKPPVSITKKKLKKSRFRVKLTLEGLEEDDDDRVSPTVLHKMSNSLEISLISDNEFKCRHSQPECGYGLQPDRWTEYSIQTMEPDNLELIFDFFEEDLSEHVVQGDALPGHVGTACLLSSTIAESGKSAGILTLPIMSRNSRKTIGKVRVDYIIIKPLPGYSCDMKSSFSKYWKPRIPLDVGHRGAGNSTTTAQLAKVQENTIASLRNAASHGAAFVEFDVHLSKDFVPVVYHDLTCCLTMKKKFDADPVELFEIPVKELTFDQLQLLKLTHVTALKSKDRKESVVQEENSFSENQPFPSLKMVLESLPEDVGFNIEIKWICQQRDGMWDGNLSTYFDMNLFLDIILKTVLENSGKRRIVFSSFDADICTMVRQKQNKYPILFLTQGKSEIYPELMDLRSRTTPIAMSFAQFENLLGINVHTEDLLRNPSYIQEAKAKGLVIFCWGDDTNDPENRRKLKELGVNGLIYDRIYDWMPEQPNIFQVEQLERLKQELPELKSCLCPTVSRFVPSSLCGESDIHVDANGIDNVENA

SEQ ID NO: 47975 - protein, 264 aa, Homo sapiens
  VARIANT 1: note = MOD_RES - Any amino acid
XCDMKSSFSKYWKPRIPLDVGHRGAGNSTTTAQLAKVQENTIASLRNAASHGAAFVEFDVHLSKDFVPVVYHDLTCCLTMKKNLWFRRKIPFQKISHFLLLRWVRQKQNKYPILFLTQGKSEIYPELMDLRSRTTPIAMSFAQFENLLGINVHTEDLLRNPSYIQEAKAKGLVIFCWGDDTNDPENRRKLKELGVNGLIYDRIYDWMPEQPNIFQVEQLERLKQELPELKSCLCPTVSRFVPSSLCGESDIHVDANGIDNVENA

SEQ ID NO: 47976 - protein, 331 aa, Homo sapiens
MWLWEDQGGLLGPFSFLLLVLLLVTRSPVNACLLTGSLFVLLRVFSFEPVPSCRALQVLKPRDRISAIAHRGGSHDAPENTLAAIRQAAKNGATGVELDIEFTSDGIPVLMHDNTVDRTTDGTGRLCDLTFEQIRKLNPAANHRLRNDFPDEKIPTLREAVAECLNHNLTIFFDVKGHAHKATEALKKMYMEFPQLYNNSVVCSFLPEVIYKMRQTDRDVITALTHRPWSLSHTGDGKPRYDTFWKHFIFVMMDILLDWSMHNILWYLCGISAFLMQKDFVSPAYLKKWSAKGIQVVGWTVNTFDEKSYYESHLGSSYITDSMVEDCEPHF

SEQ ID NO: 47977 - protein, 605 aa, Homo sapiens
MVRHQPLQYYEPQLCLSCLTGIYGCRWKRYQRSHDDTTPWERLWFLLLTFTFGLTLTWLYFWWEVHNDYDEFNWYLYNRMGYWSDWPVPILVTTAAAFAYIAGLLVLALCHIAVGQQMNLHWLHKIGLVVILASTVVAMSAVAQLWEDEWEVLLISLQGTAPFLHVGAVAAVTMLSWIVAGQFARAERTSSQVTILCTFFTVVFALYLAPLTISSPCIMEKKDLGPKPALIGHRGAPMLAPEHTLMSFRKALEQKLYGLQADITISLDGVPFLMHDTTLRRTTNVEEEFPELARRPASMLNWTTLQRLNAGQWFLKTDPFWTASSLSPSDHREAQNQSICSLAELLELAKGNATLLLNLRDPPREHPYRSSFINVTLEAVLHSGFPQHQVMWLPSRQRPLVRKVAPGFQQTSGSKEAVASLRRGHIQRLNLRYTQVSRQELRDYASWNLSVNLYTVNAPWLFSLLWCAGVPSVTSDNSHALSQVPSPLWIMPPDEYCLMWVTADLVSFTLIVGIFVLQKWRLGGIRSYNPEQIMLSAAVRRTSRDVSIMKEKLIFSEISDGVEVSDVLSVCSDNSYDTYANSTATPVGPRGGGSHTKTLIERSGR

SEQ ID NO: 47978 - protein, 486 aa, Homo sapiens
MVRHQPLQYYEPQLCLSCLTGIYGCRWKRYQRSHDDTTPGTAPFLHVGAVAAVTMLSWIVAGQFARAERTSSQVTILCTFFTVVFALYLAPLTISSPCIMEKKDLGPKPALIGHRGAPMLAPEHTLMSFRKALEQKLYGLQADITISLDGVPFLMHDTTLRRTTNVEEEFPELARRPASMLNWTTLQRLNAGQWFLKTDPFWTASSLSPSDHREAQNQSICSLAELLELAKGNATLLLNLRDPPREHPYRSSFINVTLEAVLHSGFPQHQVMWLPSRQRPLVRKVAPGFQQTSGSKEAVASLRRGHIQRLNLRYTQVSRQELRDYASWNLSVNLYTVNAPWLFSLLWCAGVPSVTSDNSHALSQVPSPLWIMPPDEYCLMWVTADLVSFTLIVGIFVLQKWRLGGIRSYNPEQIMLSAAVRRTSRDVSIMKEKLIFSEISDGVEVSDVLSVCSDNSYDTYANSTATPVGPRGGGSHTKTLIERSGR

SEQ ID NO: 47979 - protein, 135 aa, Homo sapiens
MVRHQPLQYYEPQLCLSCLTGIYGCRWKRYQRSHDDTTPWERLWFLLLTFTFGLTLTWLYFWWEVHNDYDEFNWYLYNRMGYWSDWPVPILVTTAAAFAYIAGLLVLALCHIAVGQQMNLHWLHKASSGLPLSPL

SEQ ID NO: 47980 - protein, 467 aa, Homo sapiens
MSAVAQLWEDEWEVLLISLQGTAPFLHVGAVAAVTMLSWIVAGQFARAERTSSQVTILCTFFTVVFALYLAPLTISSPCIMEKKDLGPKPALIGHRGAPMLAPEHTLMSFRKALEQKLYGLQADITISLDGVPFLMHDTTLRRTTNVEEEFPELARRPASMLNWTTLQRLNAGQWFLKTDPFWTASSLSPSDHREAQNQSICSLAELLELAKGNATLLLNLRDPPREHPYRSSFINVTLEAVLHSGFPQHQVMWLPSRQRPLVRKVAPGFQQTSGSKEAVASLRRGHIQRLNLRYTQVSRQELRDYASWNLSVNLYTVNAPWLFSLLWCAGVPSVTSDNSHALSQVPSPLWIMPPDEYCLMWVTADLVSFTLIVGIFVLQKWRLGGIRSYNPEQIMLSAAVRRTSRDVSIMKEKLIFSEISDGVEVSDVLSVCSDNSYDTYANSTATPVGPRGGGSHTKTLIERSGR

SEQ ID NO: 47981 - protein, 605 aa, Homo sapiens; identical to SEQ ID NO: 47977

SEQ ID NO: 47982 - protein, 73 aa, Homo sapiens
MVRHQPLQYYEPQLCLSCLTGIYGCRWKRYQRSHDDTTPWERLWFLLLTFTFGLTLTWLYFWWEVHNDYDEFN

SEQ ID NO: 47983 - protein, 486 aa, Homo sapiens; identical to SEQ ID NO: 47978

SEQ ID NO: 47984 - protein, 360 aa, Homo sapiens
MSFRKALEQKLYGLQADITISLDGVPFLMHDTTLRRTTNVEEEFPELARRPASMLNWTTLQRLNAGQWFLKTDPFWTASSLSPSDHREAQNQSICSLAELLELAKGNATLLLNLRDPPREHPYRSSFINVTLEAVLHSGFPQHQVMWLPSRQRPLVRKVAPGFQQTSGSKEAVASLRRGHIQRLNLRYTQVSRQELRDYASWNLSVNLYTVNAPWLFSLLWCAGVPSVTSDNSHALSQVPSPLWIMPPDEYCLMWVTADLVSFTLIVGIFVLQKWRLGGIRSYNPEQIMLSAAVRRTSRDVSIMKEKLIFSEISDGVEVSDVLSVCSDNSYDTYANSTATPVGPRGGGSHTKTLIERSGR

SEQ ID NO: 47985 - protein, 423 aa, Homo sapiens
MLRVRCLRGGSRGAEAVHYIGSRLGRTLTGWVQRTFQSTQAATASSRNSCAADDKATEPLPKDCPVSSYNEWDPLEEVIVGRAENACVPPFTIEVKANTYEKYWPFYQKQGGHYFPKDHLKKAVAEIEEMCNILKTEGVTVRRPDPIDWSLKYKTPDFESTGLYSAMPRDILIVVGNEIIEAPMAWRSRFFEYRAYRSIIKDYFHRGAKWTTAPKPTMADELYNQDYPIHSVEDRHKLAAQGKFVTTEFEPCFDAADFIRAGRDIFAQRSQVTNYLGIEWMRRHLAPDYRVHIISFKDPNPMHIDATFNIIGPGIVLSNPDRPCHQIDLFKKAGWTIITPPTPIIPDDHPLWMSSKWLSMNVLMLDEKRVMVDANEVPIQKMFEKLGITTIKVNIRNANSLGGGFHCWTCDVRRRGTLQSYLD

SEQ ID NO: 47986 - protein, 391 aa, Homo sapiens
MLRVRCLRGGSRGAEAVHYIGSRLGRTLTGWVQRTFQSTQAATASSRNSCAADDKATEPLPKDCPVSSYNEWDPLEEVIVGRAENACVPPFTIEVKANTYEKYWPFYQKQGGHYFPKDHLKKAVAEIEEMCNILKTEGVTVRRPDPIDWSLKYKTPDFESTGLYSAMPRDILIVVGNEIIEAPMAWRSRFFEYRAYRSIIKDYFHRGAKWTTAPKPTMADELYNQDYPIHSVEDRHKLAAQGKFVTTEFEPCFDAADFIRAGRDIFAQRSQVTNYLGIEWMRRHLAPDYRVHIISFKDPNPMHIDATFNIIGPGIVLSNPDRPCHQIDLFKKAGWTIITPPTPIIPDDHPLWMSSKWLSMNVLMLDEKRVMVDANEVPIQKMFEKLGMYNK

SEQ ID NO: 47987 - protein, 419 aa, Homo sapiens
MWPGNAWRAALFWVPRGRRAQSALAQLRGILEGELEGIRGAGTWKSERVITSRQGPHIRVDGVSGGILNFCANNYLGLSSHPEVIQAGLQALEEFGAGLSSVRFICGTQSIHKNLEAKIARFHQREDAILYPSCYDANAGLFEALLTPEDAVLSDELNHASIIDGIRLCKAHKYRYRHLDMADLEAKLQEAQKHRLRLVATDGAFSMDGDIAPLQEICCLASRYGALVFMDECHATGFLGPTGRGTDELLGVMDQVTIINSTLGKALGGASGGYTTGPGPLVSLLRQRARPYLFSNSLPPAVVGCASKALDLLMGSNTIVQSMAAKTQRFRSKMEAAGFTISGASHPICPVMLGDARLASRMADDMLKRGIFVIGFSYPVVPKGKARIRVQISAVHSEEDIDRCVEAFVEVGRLHGALP

SEQ ID NO: 47988 - protein, 445 aa, Homo sapiens
MWPGNAWRAALFWVPRGRRAQSALAQLRGILEGELEGIRGAGTWKSERVITSRQGPHIRVDGVSGGPGTVIFPGLPLPHLSCCIHLLSFTSGILNFCANNYLGLSSHPEVIQAGLQALEEFGAGLSSVRFICGTQSIHKNLEAKIARFHQREDAILYPSCYDANAGLFEALLTPEDAVLSDELNHASIIDGIRLCKAHKYRYRHLDMADLEAKLQEAQKHRLRLVATDGAFSMDGDIAPLQEICCLASRYGALVFMDECHATGFLGPTGRGTDELLGVMDQVTIINSTLGKALGGASGGYTTGPGPLVSLLRQRARPYLFSNSLPPAVVGCASKALDLLMGSNTIVQSMAAKTQRFRSKMEAAGFTISGASHPICPVMLGDARLASRMADDMLKRGIFVIGFSYPVVPKGKARIRVQISAVHSEEDIDRCVEAFVEVGRLHGALP

SEQ ID NO: 47989 - protein, 247 aa, Homo sapiens
MWPGNAWRAALFWVPRGRRAQSALAQLRGILEGELEGIRGAGTWKSERVITSRQGPHIRVDGVSGGPGTVIFPGLPLPHLSCCIHLLSFTSGILNFCANNYLGLSSHPEVIQAGLQALEEFGAGLSSVRFICGTQSIHKNLEAKIARFHQREDAILYPSCYDANAGLFEALLTPEDAVLSDELNHASIIDGIRLCKAHKYRYRHLDMADLEAKLQEAQKHRLRLVATDGAFHGWRHRTPAGDLLPRL

SEQ ID NO: 47990 - protein, 173 aa, Homo sapiens
MALRVVRSVRALLCTLRAVPSPAAPCPPRPWQLGVGAVRTLRTGPALLSVRKFTEKHEWVTTENGIGTVGISNFAQEALGDVVYCSLPEVGTKLNKQDEFGALESVKAASELYSPLSGEVTEINEALAENPGLVNKSCYEDGWLIKMTLSNPSELDELMSEEAYEKYIKSIEE

SEQ ID NO: 47991 - protein, 1020 aa, Homo sapiens
MQSCARAWGLRLGRGVGGGRRLAGGSGPCWAPRSRDSSSGGGDSAAAGASRLLERLLPRHDDFARRHIGPGDKDQREMLQTLGLASIDELIEKTVPANIRLKRPLKMEDPVCENEILATLHAISSKNQIWRSYIGMGYYNCSVPQTILRNLLENSGWITQYTPYQPEVSQGRLESLLNYQTMVCDITGLDMANASLLDEGTAAAEALQLCYRHNKRRKFLVDPRCHPQTIAVVQTRAKYTGVLTELKLPCEMDFSGKDVSGVLFQYPDTEGKVEDFTELVERAHQSGSLACCATDLLALCILRPPGEFGVDIALGSSQRFGVPLGYGGPHAAFFAVRESLVRMMPGRMVGVTRDATGKEVYRLALQTREQHIRRDKATSNICTAQALLANMAAMFAIYHGSHGLEHIARRVHNATLILSEGLKRAGHQLQHDLFFDTLKIQCGCSVKEVLGRAAQRQINFRLFEDGTLGISLDETVNEKDLDDLLWIFGCESSAELVAESMGEECRGIPGSVFKRTSPFLTHQVFNSYHSETNIVRYMKKLENKDISLVHSMIPLGSCTMKLNSSSELAPITWKEFANIHPFVPLDQAQGYQQLFRELEKDLCELTGYDQVCFQPNSGAQGEYAGLATIRAYLNQKGEGHRTVCLIPKSAHGTNPASAHMAGMKIQPVEVDKYGNIDAVHLKAMVDKHKENLAAIMITYPSTNGVFEENISDVCDLIHQHGGQVYLDGANMNAQVGICRPGDFGSDVSHLNLHKTFCIPHGGGGPGMGPIGVKKHLAPFLPNHPVISLKRNEDACPVGTVSAAPWGSSSILPISWAYIKMMGGKGLKQATETAILNANYMAKRLETHYRILFRGARGYVGHEFILDTRPFKKSANIEAVDVAKRLQDYGFHAPTMSWPVAGTLMVEPTESEDKAELDRFCDAMISIRQEIADIEEGRIDPRVNPLKMSPHSLTCVTSSHWDRPYSREVAAFPLPFVKPENKFWPTIARIDDIYGDQHLVCTCPPMEVYESPFSEQKRASS

SEQ ID NO: 47992 - protein, 295 aa, Homo sapiens
MVDSVYRTRSLGVAAEGLPDQYADGEAARVWQLYIGDTRSRTAEYKAWLLGLLRQHGCQRVLDVACGTGVDSIMLVEEGFSVTSVDASDKMLKYALKERWNRRHEPAFDKWVIEEANWMTLDKDVPQSAEGGFDAVICLGNSFAHLPDCKGDQSEHRLALKNIASMVRAGGLLVIDHRNYDHILSTGCAPPGKNIYYKSDLTKDVTTSVLIVNNKAHMVTLDYTVQVPGAGQDGSPGLSKFRLSYYPHCLASFTELLQAAFGGKCQHSVLGDFKPYKPGQTYIPCYFIHVLKRTD

SEQ ID NO: 47993 - protein, 449 aa, Homo sapiens
MYSFNTLRLYLWETIVFFSLAASKEAEAARSAPKPMSPSDFLDKLMGRTSGYDARIRPNFKGPPVNVSCNIFINSFGSIAETTMDYRVNIFLRQQWNDPRLAYNEYPDDSLDLDPSMLDSIWKPDLFFANEKGAHFHEITTDNKLLRISRNGNVLYSIRITLTLACPMDLKNFPMDVQTCIMQLESFGYTMNDLIFEWQEQGAVQVADGLTLPQFILKEEKDLRYCTKHYNTGKFTCIEARFHLERQMGYYLIQMYIPSLLIVILSWISFWINMDAAPARVGLGITTVLTMTTQSSGSRASLPKVSYVKAIDIWMAVCLLFVFSALLEYAAVNFVSRQHKELLRFRRKRRHHKEDEAGEGRFNFSAYGMGPACLQAKDGISVKGANNSNTTNPPPAPSKSPEEMRKLFIQRAKKIDKISRIGFPMAFLIFNMFYWIIYKIVRREDVHNQ

SEQ ID NO: 47994 - protein, 457 aa, Homo sapiens
MYSFNTLRLYLWETIVFFSLAASKEAEAARSAPKPMSPSDFLDKLMGRTSGYDARIRPNFKGPPVNVSCNIFINSFGSIAETTMDYRVNIFLRQQWNDPRLAYNEYPDDSLDLDPSMLDSIWKPDLFFANEKGAHFHEITTDNKLLRISRNGNVLYSIRITLTLACPMDLKNFPMDVQTCIMQLESFGYTMNDLIFEWQEQGAVQVADGLTLPQFILKEEKDLRYCTKHYNTGKFTCIEARFHLERQMGYYLIQMYIPSLLIVILSWISFWINMDAAPARVGLGITTVLTMTTQSSGSRASLPKVSYVKAIDIWMAVCLLFVFSALLEYAAVNFVSRQHKELLRFRRKRRHHKSPMLNLFQEDEAGEGRFNFSAYGMGPACLQAKDGISVKGANNSNTTNPPPAPSKSPEEMRKLFIQRAKKIDKISRIGFPMAFLIFNMFYWIIYKIVRREDVHNQ

SEQ ID NO: 47995 - protein, 366 aa, Homo sapiens
MDYRVNIFLRQQWNDPRLAYNEYPDDSLDLDPSMLDSIWKPDLFFANEKGAHFHEITTDNKLLRISRNGNVLYSIRITLTLACPMDLKNFPMDVQTCIMQLESFGYTMNDLIFEWQEQGAVQVADGLTLPQFILKEEKDLRYCTKHYNTGKFTCIEARFHLERQMGYYLIQMYIPSLLIVILSWISFWINMDAAPARVGLGITTVLTMTTQSSGSRASLPKVSYVKAIDIWMAVCLLFVFSALLEYAAVNFVSRQHKELLRFRRKRRHHKEDEAGEGRFNFSAYGMGPACLQAKDGISVKGANNSNTTNPPPAPSKSPEEMRKLFIQRAKKIDKISRIGFPMAFLIFNMFYWIIYKIVRREDVHNQ

SEQ ID NO: 47996 - protein, 452 aa, Homo sapiens [sequence omitted]

SEQ ID NO: 47997 - protein, 452 aa, Homo sapiens
MNRQLVNILTALFAFFLETNHFRTAFCKDHDSRSGKQPSQTLSPSDFLDKLMGRTSGYDARIRPNFKGPPVNVTCNIFINSFGSIAETTMDYRVNIFLRQQWNDSRLAYSEYPDDSLDLDPSMLDSIWKPDLFFANEKGANFHDVTTDNKLLRISKNGKVLYSIRLTLTLSCPMDLKNFPMDVQTCTMQLESFGYTMNDLIFEWLSDGPVQVAEGLTLPQFILKEEKELGYCTKHYNTGKFTCIEVKFHLERQMGYYLIQMYIPSLLIVILSWVSFWINMDAAPARVALGITTVLTMTTQSSGSRASLPKVSYVKAIDIWMAVCLLFVFAALLEYAAVNFVSRQHKEFLRLRRRQKRQNKEEDVTRESRFNFSGYGMGHCLQVKDGTAVKATPANPLPQPPKDGDAIKKKFVDRAKRIDTISRAAFPLAFLIFNIFYWITYKIIRHEDVHKK

SEQ ID NO: 47998 - protein, 215 aa, Homo sapiens
MNLHMRMTAFCKDHDSRSGKQPSQTLSPSDFLDKLMGRTSGYDARIRPNFKGPPVNVTCNIFINSFGSVTETTMDYRVNIFLRQQWNDSRLAYSEYPDDSLDLDPSMLDSIWKPDLFFANEKGANFHDVTTDNKLLRISKNGKVLYSIRLTLTLSCPMDLKNFPMDVQTCTMQLESFGYTMNDLIFEWLSDGPVQVAEGLTLPQFILKEEKELGY

SEQ ID NO: 47999 - protein, 363 aa, Homo sapiens
MDYRVNIFLRQQWNDSRLAYSEYPDDSLDLDPSMLDSIWKPDLFFANEKGANFHDVTTDNKLLRISKNGKVLYSIRLTLTLSCPMDLKNFPMDVQTCTMQLESFGYTMNDLIFEWLSDGPVQVAEGLTLPQFILKEEKELGYCTKHYNTGKFTCIEVKFHLERQMGYYLIQMYIPSLLIVILSWVSFWINMDAAPARVALGITTVLTMTTQSSGSRASLPKVSYVKAIDIWMAVCLLFVFAALLEYAAVNFVSRQHKEFLRLRRRQKRQNKEEDVTRESRFNFSGYGMGHCLQVKDGTAVKATPANPLPQPPKDGDAIKKKFVDRAKRIDTISRAAFPLAFLIFNIFYWITYKIIRHEDVHKK

SEQ ID NO: 48000 - protein, 464 aa, Homo sapiens
MAHVRHFRTLVSGFYFWEAALLLSLVATKETDSARSRSAPMSPSDFLDKLMGRTSGYDARIRPNFKGPPVNVTCNIFINSFGSIAETTMDYRVNIFLRQKWNDPRLAYSEYPDDSLDLDPSMLDSIWKPDLFFANEKGANFHEVTTDNKLLRIFKNGNVLYSIRLTLTLSCPMDLKNFPMDVQTCIMQLESFGYTMNDLIFEWQDEAPVQVAEGLTLPQFLLKEEKDLRYCTKHYNTGKFTCIEVRFHLERQMGYYLIQMYIPSLLIVILSWVSFWINMDAAPARVALGITTVLTMTTQSSGSRASLPKVSYVKAIDIWMAVCLLFVFSALLEYAAVNFVSRQHKELLRFRRKRKNKTEAFALEKFYRFSDMDDEVRESRFSFTAYGMGPCLQAKDGMTPKGPNHPVQVMPKSPDEMRKVFIDRAKKIDTISRACFPLAFLIFNIFYWVIYKILRHEDIHQQQD

SEQ ID NO: 48001 - protein, 449 aa, Homo sapiens
MAHVRHFRTLVSGFYFWEAALLLSLVATKETDSARSRSAPMSPSDFLDKLMGRTSGYDARIRPNFKGPPVNVTCNIFINSFGSIAETTMDYRVNIFLRQKWNDPRLAYSEYPDDSLDLDPSMLDSIWKPDLFFANEKGANFHEVTTDNKLLRIFKNGNVLYSIRLTLTLSCPMDLKNFPMDVQTCIMQLESFGYTMNDLIFEWQDEAPVQVAEGLTLPQFLLKEEKDLRYCTKHYNTGKFTCIEVRFHLERQMGYYLIQMYIPSLLIVILSWVSFWINMDAAPARVALGITTVLTMTTQSSGSRASLPKVSYVKAIDIWMAVCLLFVFSALLEYAAVNFVSRQHKELLRFRRKRKNKDDEVRESRFSFTAYGMGPCLQAKDGMTPKGPNHPVQVMPKSPDEMRKVFIDRAKKIDTISRACFPLAFLIFNIFYWVIYKILRHEDIHQQQD

SEQ ID NO: 48002 - protein, 497 aa, Homo sapiens
MKFLLTTAFLILISLWVEEAYSKEKSSKKGKGKKKQYLCPSQQSAEDLARVPANSTSNILNRLLVSYDPRIRPNFKGIPVDVVVNIFINSFGSIQETTMDYRVNIFLRQKWNDPRLKLPSDFRGSDALTVDPTMYKCLWKPDLFFANEKSANFHDVTQENILLFIFRDGDVLVSMRLSITLSCPLDLTLFPMDTQRCKMQLESFGYTTDDLRFIWQSGDPVQLEKIALPQFDIKKEDIEYGNCTKYYKGTGYYTCVEVIFTLRRQVGFYMMGVYAPTLLIVVLSWLSFWINPDASAARVPLGIFSVLSLASECTTLAAELPKVSYVKALDVWLIACLLFGFASLVEYAVVQVMLNNPKRVEAEKARIAKAEQADGKGGNVAKKNTVNGTGTPVHISTLQVGETRCKKVCTSKSDLRSNDFSIVGSLPRDFELSNYDCYGKPIEVNNGLGKSQAKNNKKPPPAKPVIPTAAKRIDLYARALFPFCFLFFNVIYWSIYL

SEQ ID NO: 48003 - protein, 497 aa, Homo sapiens; identical to SEQ ID NO: 48002

SEQ ID NO: 48004 - protein, 303 aa, Homo sapiens
MKFLLTTAFLILISLWVEEAYSKEKSSKKGKGKKKQYLCPSQQSAEDLARVPANSTSNILNRLLVSYDPRIRPNFKGIPVDVVVNIFINSFGSIQETTMDYRVNIFLRQKWNDPRLKLPSDFRGSDALTVDPTMYKCLWKPDLFFANEKSANFHDVTQENILLFIFRDGDVLVSMRLSITLSCPLDLTLFPMDTQRCKMQLESFGYTTDDLRFIWQSGDPVQLEKIALPQFDIKKEDIEYGNCTKYYKGTGYYTCVEVIFTLRRQVGFYMMGVYAPTLLIVVLSWLSFWINPDASAARVPLGW

SEQ ID NO: 48005 - protein, 163 aa, Homo sapiens
MMLPLQGAQMLQMLEKSLRKSLPASLKVYGTVFHINHGNPFNLKAVVDKWPDFNTVVVCPQEQDMTDDLDHYTNTYQIYSKDPQNCQEFLGSPELINWKQHLQIQSSQPSLNEAIQNLAAIKSFKVKQTQRILYMAAETAKELTPFLLKSKILSPNGGKPKAM

SEQ ID NO: 48006 - protein, 296 aa, Homo sapiens
MMLPLQGAQMLQMLEKSLRKSLPASLKVYGTVFHINHGNPFNLKAVVDKWPDFNTVVVCPQEQDMTDDLDHYTNTYQIYSKDPQNCQEFLGSPELINWKQHLQIQSSQPSLNEAIQNLAAIKSFKVKQTQRILYMAAETAKELTPFLLKSKILSPNGGKPKAINQEMFKLSSMDVTHAHLVNKFWHFGGNERSQRFIERCIQTFPTCCLLGPEGTPVCWDLMDQTGEMRMAGTLPEYRLHGLVTYVIYSHAQKLGKLGFPVYSHVDYSNEAMQKMSYTLQHVPIPRSWNQWNCVPL

SEQ ID NO: 48007 - protein, 296 aa, Homo sapiens; identical to SEQ ID NO: 48006

SEQ ID NO: 48008 - protein, 673 aa, Homo sapiens
MPLNRTLSMSSLPGLEDWEDEFDLENAVLFEVAWEVANKVGGIYTVLQTKAKVTGDEWGDNYFLVGPYTEQGVRTQVELLEAPTPALKRTLDSMNSKGCKFLAQSEEKPHVVAHFHEWLAGVGLCLCRARRLPVATIFTTHATLLGRYLCAGAVDFYNNLENFNVDKEAGERQIYHRYCMERAAAHCAHVFTTVSQITAIEAQHLLKRKPDIVTPNGLNVKKFSAMHEFQNLHAQSKARIQEFVRGHFYGHLDFNLDKTLYFFIAGRYEFSNKGADVFLEALARLNYLLRVNGSEQTVVAFFIMPARTNNFNVETLKGQAVRKQLWDTANTVKEKFGRKLYESLLVGSLPDMNKMLDKEDFTMMKRAIFATQRQSFPPVCTHNMLDDSSDPILTTIRRIGLFNSSADRVKVIFHPEFLSSTSPLLPVDYEEFVRGCHLGVFPSYYEPWGYTPAECTVMGIPSISTNLSGFGCFMEEHIADPSAYGIYILDRRFRSLDDSCSQLTSFLYSFCQQSRRQRIIQRNRTERLSDLLDWKYLGRYYMSARHMALSKAFPEHFTYEPNEADAAQGYRYPRPASVPPSPSLSRHSSPHQSEDEEDPRNGPLEEDGERYDEDEEAAKDRRNIRAPEWPRRASCTSSTSGSKRNSVDTATSSSLSTPSEPLSPTSSLGEERN

SEQ ID NO: 48009 - protein, 737 aa, Homo sapiens
MPLNRTLSMSSLPGLEDWEDEFDLENAVLFEVAWEVANKVGGIYTVLQTKAKVTGDEWGDNYFLVGPYTEQGVRTQVELLEAPTPALKRTLDSMNSKGCKVYFGRWLIEGGPLVVLLDVGASAWALERWKGELWDTCNIGVPWYDREANDAVLFGFLTTWFLGEFLAQSEEKPHVVAHFHEWLAGVGLCLCRARRLPVATIFTTHATLLGRYLCAGAVDFYNNLENFNVDKEAGERQIYHRYCMERAAAHCAHVFTTVSQITAIEAQHLLKRKPDIVTPNGLNVKKFSAMHEFQNLHAQSKARIQEFVRGHFYGHLDFNLDKTLYFFIAGRYEFSNKGADVFLEALARLNYLLRVNGSEQTVVAFFIMPARTNNFNVETLKGQAVRKQLWDTANTVKEKFGRKLYESLLVGSLPDMNKMLDKEDFTMMKRAIFATQRQSFPPVCTHNMLDDSSDPILTTIRRIGLFNSSADRVKVIFHPEFLSSTSPLLPVDYEEFVRGCHLGVFPSYYEPWGYTPAECTVMGIPSISTNLSGFGCFMEEHIADPSAYGIYILDRRFRSLDDSCSQLTSFLYSFCQQSRRQRIIQRNRTERLSDLLDWKYLGRYYMSARHMALSKAFPEHFTYEPNEADAAQGYRYPRPASVPPSPSLSRHSSPHQSEDEEDPRNGPLEEDGERYDEDEEAAKDRRNIRAPEWPRRASCTSSTSGSKRNSVDTATSSSLSTPSEPLSPTSSLGEERN

SEQ ID NO: 48010 - protein, 235 aa, Homo sapiens
MNSTWRTQCSSKWPGRWLTRVYFGRWLIEGGPLVVLLDVGASAWALERWKGELWDTCNIGVPWYDREANDAVLFGFLTTWFLGEFLAQSEEKPHVVAHFHEWLAGVGLCLCRARRLPVATIFTTHATLLGRYLCAGAVDFYNNLENFNVDKEAGERQIYHRYCMERAAAHCAHVFTTVSQITAIEAQHLLKRKPGIWTSTWTRPYTSLSPAAMSSPTRVLTSSWRHWLGSTICSE

SEQ ID NO: 48011 - protein, 657 aa, Homo sapiens
MNSTWRTQCSSKWPGRWLTRVYFGRWLIEGGPLVVLLDVGASAWALERWKGELWDTCNIGVPWYDREANDAVLFGFLTTWFLGEFLAQSEEKPHVVAHFHEWLAGVGLCLCRARRLPVATIFTTHATLLGRYLCAGAVDFYNNLENFNVDKEAGERQIYHRYCMERAAAHCAHVFTTVSQITAIEAQHLLKRKPDIVTPNGLNVKKFSAMHEFQNLHAQSKARIQEFVRGHFYGHLDFNLDKTLYFFIAGRYEFSNKGADVFLEALARLNYLLRVNGSEQTVVAFFIMPARTNNFNVETLKGQAVRKQLWDTANTVKEKFGRKLYESLLVGSLPDMNKMLDKEDFTMMKRAIFATQRQSFPPVCTHNMLDDSSDPILTTIRRIGLFNSSADRVKVIFHPEFLSSTSPLLPVDYEEFVRGCHLGVFPSYYEPWGYTPAECTVMGIPSISTNLSGFGCFMEEHIADPSAYGIYILDRRFRSLDDSCSQLTSFLYSFCQQSRRQRIIQRNRTERLSDLLDWKYLGRYYMSARHMALSKAFPEHFTYEPNEADAAQGYRYPRPASVPPSPSLSRHSSPHQSEDEEDPRNGPLEEDGERYDEDEEAAKDRRNIRAPEWPRRASCTSSTSGSKRNSVDTATSSSLSTPSEPLSPTSSLGEERN

SEQ ID NO: 48012 - protein, 370 aa, Homo sapiens
MPARTNNFNVETLKGQAVRKQLWDTANTVKEKFGRKLYESLLVGSLPDMNKMLDKEDFTMMKRAIFATQRQSFPPVCTHNMLDDSSDPILTTIRRIGLFNSSADRVKVIFHPEFLSSTSPLLPVDYEEFVRGCHLGVFPSYYEPWGYTPAECTVMGIPSISTNLSGFGCFMEEHIADPSAYGIYILDRRFRSLDDSCSQLTSFLYSFCQQSRRQRIIQRNRTERLSDLLDWKYLGRYYMSARHMALSKAFPEHFTYEPNEADAAQGYRYPRPASVPPSPSLSRHSSPHQSEDEEDPRNGPLEEDGERYDEDEEAAKDRRNIRAPEWPRRASCTSSTSGSKRNSVDTATSSSLSTPSEPLSPTSSLGEERN

SEQ ID NO: 48013 - protein, 333 aa, Homo sapiens
MTDQAFVTLTTNDAYAKGALVLGSSLKQHRTTRRLVVLATPQVSDSMRKVLETVFDEVIMVDVLDSGDSAHLTLMKRPELGVTLTKLHCWSLTQYSKCVFMDADTLVLANIDDLFDREELSAAPDPGWPDCFNSGVFVYQPSVETYNQLLHLASEQGSFDGGDQGILNTFFSSWATTDIRKHLPFIYNLSSISIYSYLPAFKVFGASAKVVHFLGRVKPWNYTYDPKTKSVKSEAHDPNMTHPEFLILWWNIFTTNVLPLLQQFGLVKDTCSYVNVEDVSGAISHLSLGEIPAMAQPFVSSEERKERWEQGQADYMGADSFDNIKRKLDTYLQ

SEQ ID NO: 48014 - protein, 350 aa, Homo sapiens
MTDQAFVTLTTNDAYAKGALVLGSSLKQHRTTRRLVVLATPQVSDSMRKVLETVFDEVIMVDVLDSGDSAHLTLMKRPELGVTLTKLHCWSLTQYSKCVFMDADTLVLANIDDLFDREELSAAPDPGWPDCFNSGVFVYQPSVETYNQLLHLASEQGSFDGGDQGILNTFFSSWATTDIRKHLPFIYNLSSISIYSYLPAFKVFGASAKVVHFLGRVKPWNYTYDPKTKSVKSEAHDPNMTHPEFLILWWNIFTTNVLPLLQQFGLVKDTCSYVNVLSDLVYTLAFSCGFCRKEDVSGAISHLSLGEIPAMAQPFVSSEERKERWEQGQADYMGADSFDNIKRKLDTYLQ

SEQ ID NO: 48015 - protein, 279 aa, Homo sapiens
MTDQAFVTLTTNDAYAKGALVLGSSLKQHRTTRRLVVLATPQVSDSMRKVLETVFDEVIMVDVLDSGDSAHLTLMKRPELGVTLTKLHCWSLTQYSKCVFMDADTLVLANIDDLFDREELSAAPDPGWPDCFNSGVFVYQPSVETYNQLLHLASEQGSFDGGDQGILNTFFSSWATTDIRKHLPFIYNLSSISIYSYLPAFKVKMSQEPYHICPLGRSQLWHSRLYPRKNGRNDGNRARLIIWEQIPLTTSRGNLTLTSSRNTAFFCEHIHFTSLVSDT

SEQ ID NO: 48016 - protein, 465 aa, Homo sapiens
MSETEFHHGAQAGLELLRSSNSPTSASQSAGMTVTDQAFVTLATNDIYCQGALVLGQSLRRHRLTRKLVVLITPQVSSLLRVILSKVFDEVIEVNLIDSADYIHLAFLKRPELGLTLTKLHCWTLTHYSKCVFLDADTLVLSNVDELFDRGEFSAAPDPGWPDCFNSGVFVFQPSLHTHKLLLQHAMEHGSFDGADQGLLNSFFRNWSTTDIHKHLPFIYNLSSNTMYTYSPAFKQFGSSAKVVHFLGSMKPWNYKYNPQSGSVLEQGSASSSQHQAAFLHLWWTVYQNNVLPLYKSVQAGEARASPGHTLCHSDVGGPCADSASGVGEPCENSTPSAGVPCANSPLGSNQPAQGLPEPTQIVDETLSLPEGRRSEDMIACPETETPAVITCDPLSQPSPQPADFTETETILVDLAVSVSQISIEEKVKELSPEEERRKWEEGRIDYMGKDAFARIQEKLDRFLQ

SEQ ID NO: 48017 - protein, 501 aa, Homo sapiens
MSETEFHHGAQAGLELLRSSNSPTSASQSAGMTVTDQAFVTLATNDIYCQGALVLGQSLRRHRLTRKLVVLITPQVSSLLRVILSKVFDEVIEVNLIDSADYIHLAFLKRPELGLTLTKLHCWTLTHYSKCVFLDADTLVLSNVDELFDRGEFSAAPDPGWPDCFNSGVFVFQPSLHTHKLLLQHAMEHGSFDGADQGLLNSFFRNWSTTDIHKHLPFIYNLSSNTMYTYSPAFKQFGSSAKVVHFLGSMKPWNYKYNPQSGSVLEQGSASSSQHQAAFLHLWWTVYQNNVLPLYKSVQAGEARASPGHTLCHSDVGGPCADSASGVGEPCENSTPSAGVPCANSPLGSNQPAQGLPEPTQIVDETLSLPEGRRSEDMIACPETETPAVITCDPLSQPSPQPADFTETETILQPANKVESVSSEETFEPSQELPAEALRDPSLQDALEVDLAVSVSQISIEEKVKELSPEEERRKWEEGRIDYMGKDAFARIQEKLDRFLQ

SEQ ID NO: 48018 - protein, 470 aa, Homo sapiens
MSVTDQAFVTLATNDIYCQGALVLGQSLRRHRLTRKLVVLITPQVSSLLRVILSKVFDEVIEVNLIDSADYIHLAFLKRPELGLTLTKLHCWTLTHYSKCVFLDADTLVLSNVDELFDRGEFSAAPDPGWPDCFNSGVFVFQPSLHTHKLLLQHAMEHGSFDGADQGLLNSFFRNWSTTDIHKHLPFIYNLSSNTMYTYSPAFKQFGSSAKVVHFLGSMKPWNYKYNPQSGSVLEQGSASSSQHQAAFLHLWWTVYQNNVLPLYKSVQAGEARASPGHTLCHSDVGGPCADSASGVGEPCENSTPSAGVPCANSPLGSNQPAQGLPEPTQIVDETLSLPEGRRSEDMIACPETETPAVITCDPLSQPSPQPADFTETETILQPANKVESVSSEETFEPSQELPAEALRDPSLQDALEVDLAVSVSQISIEEKVKELSPEEERRKWEEGRIDYMGKDAFARIQEKLDRFLQ

SEQ ID NO: 48019 - protein, 138 aa, Homo sapiens
MSVTDQAFVTLATNDIYCQGALVLGQSLRRHRLTRKLVVLITPQVSSLLRVILSKVFDEVIEVNLIDSADYIHLAFLKRPELGLTLTKLHCWTLTHYSKCVFLDADTLVLSNVDELFDRGEFSAAPDPGWPDCFNSGV

SEQ ID NO: 48020 - protein, 430 aa, Homo sapiens
MSETEFHHGAQAGLELLRSSNSPTSASQSAGMTVTDQAFVTLATNDIYCQGALVLGQSLRRHRLTRKLVVLITPQVSSLLRVILSKVFDEVIEVNLIDSADYIHLAFLKRPELGLTLTKLHCWTLTHYSKCVFLDADTLVLSNVDELFDRGEFSAAPDPGWPDCFNSGVFVFQPSLHTHKLLLQHAMEHGSFDGADQGLLNSFFRNWSTTDIHKHLPFIYNLSSNTMYTYSPAFKQFGSSAKVVHFLGSMKPWNYKYNPQSGSVLEQGSASSSQHQAAFLHLWWTVYQNNVLPLYKSVQAGEARASPGHTLCHSDVGGPCADSASGVGEPCENSTPSAGVPCANSPLGSNQPAQGLPEPTQIVDETLSLPEGRRSEDVDLAVSVSQISIEEKVKELSPEEERRKWEEGRIDYMGKDAFARIQEKLDRFLQ

SEQ ID NO: 48021 - protein, 117 aa, Homo sapiens
MYGKIIFVLLLSDTHKRDTYAATPRAHEVSEISVRTVYPPEEETGERVQLAHHFSEPEITLIIFGVMAGVIGTILLISYGIRRLIKKSPSDVKPLPSPDTDVPLSSVEIENPETSDQ

SEQ ID NO: 48022 - protein, 150 aa, Homo sapiens
MYGKIIFVLLLSEIVSISALSTTEVAMHTSTSSSVTKSYISSQTNDTHKRDTYAATPRAHEVSEISVRTVYPPEEETGERVQLAHHFSEPEITLIIFGVMAGVIGTILLISYGIRRLIKKSPSDVKPLPSPDTDVPLSSVEIENPETSDQ

SEQ ID NO: 48023 - protein, 62 aa, Homo sapiens
MYGKIIFVLLLSEIVSISALSTTEVAMHTSTSSSVTKSYISSQTNGERVQLAHHFSEPDFHN

SEQ ID NO: 48024 - protein, 118 aa, Homo sapiens
MYGKIIFVLLLSEIVSISALSTTEVAMHTSTSSSVTKSYISSQTNGERVQLAHHFSEPEITLIIFGVMAGVIGTILLISYGIRRLIKKSPSDVKPLPSPDTDVPLSSVEIENPETSDQ

SEQ ID NO: 48025 - protein, 137 aa, Homo sapiens
MYGKIIFVLLLSEIVSISALSTTEVAMHTSTSSSVTKSYISSQTNDTHKRDTYAATPRAHEVSEISVRTVYPPEEETEITLIIFGVMAGVIGTILLISYGIRRLIKKSPSDVKPLPSPDTDVPLSSVEIENPETSDQ

SEQ ID NO: 48026 - protein, 85 aa, Homo sapiens
MYGKIIFVLLLSGERVQLAHHFSEPEITLIIFGVMAGVIGTILLISYGIRRLIKKSPSDVKPLPSPDTDVPLSSVEIENPETSDQ

SEQ ID NO: 48027 - protein, 124 aa, Homo sapiens
MHTSTSSSVTKSYISSQTNDTHKRDTYAATPRAHEVSEISVRTVYPPEEETGERVQLAHHFSEPEITLIIFGVMAGVIGTILLISYGIRRLIKKSPSDVKPLPSPDTDVPLSSVEIENPETSDQ

SEQ ID NO: 48028 - protein, 91 aa, Homo sapiens
MYGKIIFVLLLSEIVSISALSTTEVAMHTSTSSSVTKSYISSQTNGETGQLVHRFTVPAPVVIILIILCVMAGIIGTILLISYSIRRLIKA

SEQ ID NO: 48029 - protein, 91 aa, Homo sapiens; identical to SEQ ID NO: 48028

SEQ ID NO: 48030 - protein, 58 aa, Homo sapiens
MYGKIIFVLLLSGETGQLVHRFTVPAPVVIILIILCVMAGIIGTILLISYSIRRLIKA

SEQ ID NO: 48031 - protein, 128 aa, Homo sapiens
MWSTRSPNSTAWPLSLEPDPGMASASTTMHTTTIAEPDPGMSGWPDGRMETSTPTIMDIVVIAGVIAAVAIVLVSLLFVMLRYMYRHKGTYHTNEAKGTEFAESADAALQGDPALQDAGDSSRKEYFI

SEQ ID NO: 48032 - protein, 107 aa, Homo sapiens
MASASTTMHTTTIAEPDPGMSGWPDGRMETSTPTIMDIVVIAGVIAAVAIVLVSLLFVMLRYMYRHKGTYHTNEAKGTEFAESADAALQGDPALQDAGDSSRKEYFI

SEQ ID NO: 48033 - protein, 109 aa, Homo sapiens
MWSTRSPNSTAWPLSLEPDPGMSGWPDGRMETSTPTIMDIVVIAGVIAAVAIVLVSLLFVMLRYMYRHKGTYHTNEAKGTEFAESADAALQGDPALQDAGDSSRKEYFI

SEQ ID NO: 48034 - protein, 78 aa, Homo sapiens
MYGKIIFVLLLSGIVSISASSTTGVAMHTSTSSSVTKSYISSQTNGITLINWWAMARVIFEVMLVVVGMIILISYCIR

SEQ ID NO: 48035 - protein, 55 aa, Homo sapiens
MYGKIIFVLLLSGIVSISASSTTGVAMHTSTSSSVTKSYISSQTNGERGQLVHRF

SEQ ID NO: 48036 - protein, 78 aa, Homo sapiens; identical to SEQ ID NO: 48034

SEQ ID NO: 48037 - protein, 59 aa, Homo sapiens
MYGKIIFVLLLSGIVSISASSTTGVAMHTSTSSSVTKSYISSQTNGCVIGNIICSDKSK

SEQ ID NO: 48038 - protein, 534 aa, Homo sapiens
MPHLMERMVGSGLLWLALVSCILTQASAVQRGYGNPIEASSYGLDLDCGAPGTPEAHVCFDPCQNYTLLDEPFRSTENSAGSQGCDKNMSGWYRFVGEGGVRMSETCVQVHRCQTDAPMWLNGTHPALGDGITNHTACAHWSGNCCFWKTEVLVKACPGGYHVYRLEGTPWCNLRYCTDPSTVEDKCEKACRPEEECLALNSTWGCFCRQDLNSSDVHSLQPQLDCGPREIKVKVDKCLLGGLGLGEEVIAYLRDPNCSSILQTEERNWVSVTSPVQASACRNILERNQTHAIYKNTLSLVNDFIIRDTILNINFQCAYPLDMKVSLQAALQPIVSSLNVSVDGNGEFIVRMALFQDQNYTNPYEGDAVELSVESVLYVGAILEQGDTSRFNLVLRNCYATPTEDKADLVKYFIIRNSCSNQRDSTIHVEENGQSSESRFSVQMFMFAGHYDLVFLHCEIHLCDSLNEQCQPSCSRSQVRSEVPAIDLARVLDLGPITRRGAQSPGVMNGTPSTAGFLVAWPMVLLTVLLAWLF

SEQ ID NO: 48039 - protein, 387 aa, Homo sapiens
MPHLMERMVGSGLLWLALVSCILTQASAVQRDPSTVEDKCEKACRPEEECLALNSTWGCFCRQDLNSSDVHSLQPQLDCGPREIKVKVDKCLLGGLGLGEEVIAYLRDPNCSSILQTEERNWVSVTSPVQASACRNILERNQTHAIYKNTLSLVNDFIIRDTILNINFQCAYPLDMKVSLQAALQPIVSSLNVSVDGNGEFIVRMALFQDQNYTNPYEGDAVELSVESVLYVGAILEQGDTSRFNLVLRNCYATPTEDKADLVKYFIIRNSCSNQRDSTIHVEENGQSSESRFSVQMFMFAGHYDLVFLHCEIHLCDSLNEQCQPSCSRSQVRSEVPAIDLARVLDLGPITRRGAQSPGVMNGTPSTAGFLVAWPMVLLTVLLAWLF

SEQ ID NO: 48040 - protein, 390 aa, Homo sapiens
MPHLMERMVGSGLLWLALVSCILTQASAVQRVPRDPSTVEDKCEKACRPEEECLALNSTWGCFCRQDLNSSDVHSLQPQLDCGPREIKVKVDKCLLGGLGLGEEVIAYLRDPNCSSILQTEERNWVSVTSPVQASACRNILERNQTHAIYKNTLSLVNDFIIRDTILNINFQCAYPLDMKVSLQAALQPIVSSLNVSVDGNGEFIVRMALFQDQNYTNPYEGDAVELSVESVLYVGAILEQGDTSRFNLVLRNCYATPTEDKADLVKYFIIRNSCSNQRDSTIHVEENGQSSESRFSVQMFMFAGHYDLVFLHCEIHLCDSLNEQCQPSCSRSQVRSEVPAIDLARVLDLGPITRRGAQSPGVMNGTPSTAGFLVAWPMVLLTVLLAWLF

SEQ ID NO: 48041 - protein, 537 aa, Homo sapiens
MPHLMERMVGSGLLWLALVSCILTQASAVQRGYGNPIEASSYGLDLDCGAPGTPEAHVCFDPCQNYTLLDEPFRSTENSAGSQGCDKNMSGWYRFVGEGGVRMSETCVQVHRCQTDAPMWLNGTHPALGDGITNHTACAHWSGNCCFWKTEVLVKACPGGYHVYRLEGTPWCNLRYCTVPRDPSTVEDKCEKACRPEEECLALNSTWGCFCRQDLNSSDVHSLQPQLDCGPREIKVKVDKCLLGGLGLGEEVIAYLRDPNCSSILQTEERNWVSVTSPVQASACRNILERNQTHAIYKNTLSLVNDFIIRDTILNINFQCAYPLDMKVSLQAALQPIVSSLNVSVDGNGEFIVRMALFQDQNYTNPYEGDAVELSVESVLYVGAILEQGDTSRFNLVLRNCYATPTEDKADLVKYFIIRNSCSNQRDSTIHVEENGQSSESRFSVQMFMFAGHYDLVFLHCEIHLCDSLNEQCQPSCSRSQVRSEVPAIDLARVLDLGPITRRGAQSPGVMNGTPSTAGFLVAWPMVLLTVLLAWLF

SEQ ID NO: 48042 - protein, 515 aa, Homo sapiens
MKIKCEKSRTQSSAQHVQHSAHSTIVCRKHSHNAETAGRVDIVRGGPFFHHPLRKWLISPPLNKPSVWPRTPIIPVHQLRRDTWVGNCNKKTAHSRLHSHGWPEEERFVFSSELHGKSAYSKVTCMPHLMERMVGSGLLWLALVSCILTQASAVQRDHLDPSTVEDKCEKACRPEEECLALNSTWGCFCRQDLNSSDVHSLQPQLDCGPREIKVKVDKCLLGGLGLGEEVIAYLRDPNCSSILQTEERNWVSVTSPVQASACRNILERNQTHAIYKNTLSLVNDFIIRDTILNINFQCAYPLDMKVSLQAALQPIVSSLNVSVDGNGEFIVRMALFQDQNYTNPYEGDAVELSVESVLYVGAILEQGDTSRFNLVLRNCYATPTEDKADLVKYFIIRNSCSNQRDSTIHVEENGQSSESRFSVQMFMFAGHYDLVFLHCEIHLCDSLNEQCQPSCSRSQVRSEVPAIDLARVLDLGPITRRGAQSPGVMNGTPSTAGFLVAWPMVLLTVLLAWLF

SEQ ID NO: 48043 - protein, 652 aa, Homo sapiens
MPLLLLLLLLPSPLHPHPICEVSKVASHLEVNCDKRNLTALPPDLPKDTTILHLSENLLYTFSLATLMPYTRLTQLNLDRCELTKLQVDGTLPVLGTLDLSHNQLQSLPLLGQTLPALTVLDVSFNRLTSLPLGALRGLGELQELYLKGNELKTLPPGLLTPTPKLEKLSLANNNLTELPAGLLNGLENLDTLLLQENSLYTIPKGFFGSHLLPFAFLHGNPWLCNCEILYFRRWLQDNAENVYVWKQGVDVKAMTSNVASVQCDNSDKFPVYKYPGKGCPTLGDEGDTDLYDYYPEEDTEGDKVRATRTVVKFPTKAHTTPWGLFYSWSTASLDSQMPSSLHPTQESTKEQTTFPPRWTPNFTLHMESITFSKTPKSTTEPTPSPTTSEPVPEPAPNMTTLEPTPSPTTPEPTSEPAPSPTTPEPTSEPAPSPTTPEPTSEPAPSPTTPEPTPIPTIATSPTILVSATSLITPKSTFLTTTKPVSLLESTKKTIPELDQPPKLRGVLQGHLESSRNDPFLHPDFCCLLPLGFYVLGLFWLLFASVVLILLLSWVGHVKPQALDSGQGAALTTATQTTHLELQRGRQVTVPRAWLLFLRGSLPTFRSSLFLWVRPNGRVGPLVAGRRPSALSQGRGQDLLSTVSIRYSGHSL

SEQ ID NO: 48044 - protein, 626 aa, Homo sapiens
MPLLLLLLLLPSPLHPHPICEVSKVASHLEVNCDKRNLTALPPDLPKDTTILHLSENLLYTFSLATLMPYTRLTQLNLDRCELTKLQVDGTLPVLGTLDLSHNQLQSLPLLGQTLPALTVLDVSFNRLTSLPLGALRGLGELQELYLKGNELKTLPPGLLTPTPKLEKLSLANNNLTELPAGLLNGLENLDTLLLQENSLYTIPKGFFGSHLLPFAFLHGNPWLCNCEILYFRRWLQDNAENVYVWKQGVDVKAMTSNVASVQCDNSDKFPVYKYPGKGCPTLGDEGDTDLYDYYPEEDTEGDKVRATRTVVKFPTKAHTTPWGLFYSWSTASLDSQMPSSLHPTQESTKEQTTFPPRWTPNFTLHMESITFSKTPKSTTEPTPSPTTSEPVPEPAPNMTTLEPTPSPTTPEPTSEPAPSPTTPEPTPIPTIATSPTILVSATSLITPKSTFLTTTKPVSLLESTKKTIPELDQPPKLRGVLQGHLESSRNDPFLHPDFCCLLPLGFYVLGLFWLLFASVVLILLLSWVGHVKPQALDSGQGAALTTATQTTHLELQRGRQVTVPRAWLLFLRGSLPTFRSSLFLWVRPNGRVGPLVAGRRPSALSQGRGQDLLSTVSIRYSGHSL

SEQ ID NO: 48045 - protein, 206 aa, Homo sapiens
MGSGPRGALSLLLLLLAPPSRPAAGCPAPCSCAGTLVDCGRRGLTWASLPTAFPVDTTELVLTGNNLTALPPGLLDALPALRTAHLGANPWRCDCRLVPLRAWLAGRPERAPYRDLRCVAPPALRGRLLPYLAEDELRAACAPGPLCWGALAAQLALLGLGLLHALLLVLLLCRLRRLRARARARAAARLSLTDPLVAERAGTDES

SEQ ID NO: 48046 - protein, 409 aa, Homo sapiens
MIPSRHTMLRFLPVNAASCPGDRRTMLVNVAAGVRVLRVPLRAGGSGSLSGLRPPAIVCYLPLQRASASGLFLARPQHCGRCGRGRGGAALSLGSPAYASRCRVSRAAVFSPWAPVSLESGRAPGCSLGRPGLRGALVVWLQLGETWVRLRGDFQPACGVVRVERLAGYRDAGHQGLDGAGPAVWVLRDVAQVPADRSAYCGASLAGPRGALSLLLLLLAPPSRPAAGCPAPCSCAGTLVDCGRRGLTWASLPTAFPVDTTELVLTGNNLTALPPGLLDALPALRTAHLGANPWRCDCRLVPLRAWLAGRPERAPYRDLRCVAPPALRGRLLPYLAEDELRAACAPGPLCWGALAAQLALLGLGLLHALLLVLLLCRLRRLRARARARAAARLSLTDPLVAERAGTDES

SEQ ID NO: 48047 - protein, 177 aa, Homo sapiens
MPAWGALFLLWATAEATKDCPSPCTCRALETMGLWVDCRGHGLTALPALPARTRHLLLANNSLQSVPPGAFDHLPQLQTLDVTQNPWHCDCSLTYLRLWLEDRTPEALLQVRCASPSLAAHGPLGRLTGYQLGSCGWQLQASWVRPGVLWDVALVAVAALGLALLAGLLCATTEALD

SEQ ID NO: 48048 - protein, 328 aa, Homo sapiens
MKPAMETAAEENTEQSQERKVNSRAEMEIGRYHWMYPGSKNHQYHPVPTLGDRASPLSSPGCFECCIKCLGGVPYASLVATILCFSGVALFCGCGHVALAGTVAILEQHFSTNASDHALLSEVIQLMQYVIYGIASFFFLYGIILLAEGFYTTSAVKELHGEFKTTACGRCISGMFVFLTYVLGVAWLGVFGFSAVPVFMFYNIWSTCEVIKSPQTNGTTGVEQICVDIRQYGIIPWNAFPGKICGSALENICNTNEFYMSYHLFIVACAGAGATVIALIHFLMILSSNWAYLKDASKMQAYQDIKAKEEQELQDIQSRSKEQLNSYT

SEQ ID NO: 48049 - protein, 305 aa, Homo sapiens
MKPAMETAAEENTEQSQERKVNSRAEMEIGRYHWMYPGSKNHQYHPVPTLGDRASPLSSPGCFECCIKCLGGVPYASLVATILCFSGVALFCGCGHVALAGTVAILEQHFSTNASDHALLSEVIQLMQYVIYGIASFFFLYGIILLAEGFYTTSAVKELHGEFKTTACGRCISGMFVFLTYVLGVAWLGVFGFSAVPVFMFYNIWSTCEVIKSPQTNGTTGVEQICVDIRQYGIIPWNAFPGKICGSALENICNTNEFYMSYHLFIVACAGAGATVIALLIYMMATTYNYAVLKFKSREDCCTKF

SEQ ID NO: 48050 - protein, 265 aa, Homo sapiens
MKPAMETAAEENTEQSQERKGCFECCIKCLGGVPYASLVATILCFSGVALFCGCGHVALAGTVAILEQHFSTNASDHALLSEVIQLMQYVIYGIASFFFLYGIILLAEGFYTTSAVKELHGEFKTTACGRCISGMFVFLTYVLGVAWLGVFGFSAVPVFMFYNIWSTCEVIKSPQTNGTTGVEQICVDIRQYGIIPWNAFPGKICGSALENICNTNEFYMSYHLFIVACAGAGATVIALLIYMMATTYNYAVLKFKSREDCCTKF

SEQ ID NO: 48051 - protein, 179 aa, Homo sapiens
MQYVIYGIASFFFLYGIILLAEGFYTTSAVKELHGEFKTTACGRCISGMFVFLTYVLGVAWLGVFGFSAVPVFMFYNIWSTCEVIKSPQTNGTTGVEQICVDIRQYGIIPWNAFPGKICGSALENICNTNEFYMSYHLFIVACAGAGATVIALLIYMMATTYNYAVLKFKSREDCCTKF

SEQ ID NO: 48052 - protein, 246 aa, Homo sapiens
MGCFECCIKCLGGVPYASLVATILCFSGVALFCGCGHVALAGTVAILEQHFSTNASDHALLSEVIQLMQYVIYGIASFFFLYGIILLAEGFYTTSAVKELHGEFKTTACGRCISGMFVFLTYVLGVAWLGVFGFSAVPVFMFYNIWSTCEVIKSPQTNGTTGVEQICVDIRQYGIIPWNAFPGKICGSALENICNTNEFYMSYHLFIVACAGAGATVIALLIYMMATTYNYAVLKFKSREDCCTKF

SEQ ID NO: 48053 - protein, 107 aa, Homo sapiens
MKPAMETAAEENTEQSQERKGCFECCIKCLGGVPYASLVATILCFSGVALFCGCGHVALAGTVAILEQHFSTNASDHALLSEVIQLMQYVIYGIASFFFLYGIILLA

SEQ ID NO: 48054 - protein, 302 aa, Homo sapiens
MEIGRYHWMYPGSKNHQYHPVPTLGDRASPLSSPGCFECCIKCLGGVPYASLVATILCFSGVALFCGCGHVALAGTVAILEQHFSTNASDHALLSEVIQLMQYVIYGIASFFFLYGIILLAEGFYTTSAVKELHGEFKTTACGRCISGMFVFLTYVLGVAWLGVFGFSAVPVFMFYNIWSTCEVIKSPQTNGTTGVEQICVDIRQYGIIPWNAFPGKICGSALENICNTNEFYMSYHLFIVACAGAGATVIALIHFLMILSSNWAYLKDASKMQAYQDIKAKEEQELQDIQSRSKEQLNSYT

SEQ ID NO: 48055 - protein, 620 aa, Homo sapiens
MSPSPTALFCLGLCLGRVPAQSGPLPKPSLQALPSSLVPLEKPVTLRCQGPPGVDLYRLEKLSSSRYQDQAVLFIPAMKRSLAGRYRCSYQNGSLWSLPSDQLELVATGVFAKPSLSAQPGPAVSSGGDVTLQCQTRYGFDQFALYKEGDPAPYKNPERWYRASFPIITVTAAHSGTYRCYSFSSRDPYLWSAPSDPLELVVTGTSVTPSRLPTEPPSPVAEFSEATAELTVSFTNEVFTTETSRSITASPKESDSPAGESCPPVLHQGQPGPDMPRGCDPNNPGGVSGRGLAQPEEAPAAQGQGCAEAASAPPAPPADPEIKRGSGWRPTGCSQPRVMFMTAEPQARSYPREGSWHGRRLKDWRVWSVEAGGQRLQLWKRGHAASSWCSIREPFGQCLSVCLPLCLRAPSIWDGRNLWRPHPPPCTLWMTWYPGWTTYWPLSSTSLIWAPDGSLRFPALRVDSVPSSVQNPPVLPFGPLCSCLVFPRNSHPHSISHCGLTNLLSSLRTGLAGSLGMSFIFLSVKLARCPLPFTLENKISLCNMVKPHLYQQNKKTQKLARCGGASLYSQQLRGLRWENGLSLGGRGCSELRSHHCTLARVTKPDFVSKNTGMNMSITLI

SEQ ID NO: 48056 - protein, 321 aa, Homo sapiens
MSPSPTALFCLGLCLGRVPAQSGPLPKPSLQALPSSLVPLEKPVTLRCQGPPGVDLYRLEKLSSSRYQDQAVLFIPAMKRSLAGRYRCSYQNGSLWSLPSDQLELVATGVFAKPSLSAQPGPAVSSGGDVTLQCQTRYGFDQFALYKEGDPAPYKNPERWYRASFPIITVTAAHSGTYRCYSFSSRDPYLWSAPSDPLELVVTEFSEATAELTVSFTNEVFTTETSRSITASPKESDSPAGPARQYYTKGNLVRICLGAVILIILAGFLAEDWHSRRKRLRHRGRAVQRPLPPLPPLPLTRKSNGGQDGGRQDVHSRGLCS

SEQ ID NO: 48057 - protein, 339 aa, Homo sapiens
MSPSPTALFCLGLCLGRVPAQSGPLPKPSLQALPSSLVPLEKPVTLRCQGPPGVDLYRLEKLSSSRYQDQAVLFIPAMKRSLAGRYRCSYQNGSLWSLPSDQLELVATGVFAKPSLSAQPGPAVSSGGDVTLQCQTRYGFDQFALYKEGDPAPYKNPERWYRASFPIITVTAAHSGTYRCYSFSSRDPYLWSAPSDPLELVVTGTSVTPSRLPTEPPSPVAEFSEATAELTVSFTNEVFTTETSRSITASPKESDSPAGPARQYYTKGNLVRICLGAVILIILAGFLAEDWHSRRKRLRHRGRAVQRPLPPLPPLPLTRKSNGGQDGGRQDVHSRGLCS

SEQ ID NO: 48058 - protein, 621 aa, Homo sapiens
MGLLSDPVRRRALARLVLRLNAPLCVLSYVAGIAWFLALVFPPLTQRTYMSENAMGSTMVEEQFAGGDRARAFARDFAAHRKKSGALPVAWLERTMRSVGLEVYTQSFSRKLPFPDETHERYMVSGTNVYGILRAPRAASTESLVLTVPCGSDSTNSQAVGLLLALAAHFRGQIYWAKDIVFLVTEHDLLGTEAWLEAYHDVNVTGMQSSPLQGRAGAIQAAVALELSSDVVTSLDVAVEGLNGQLPNLDLLNLFQTFCQKGGLLCTLQGKLQPEDWTSLDGPLQGLQTLLLMVLRQASGRPHGSHGLFLRYRVEALTLRGINSFRQYKYDLVAVGKALEGMFRKLNHLLERLHQSFFLYLLPGLSRFVSIGLYMPAVGFLLLVLGLKALELWMQLHEAGMGLEEPGGAPGPSVPLPPSQGVGLASLVAPLLISQAMGLALYVLPVLGQHVATQHFPVAEAEAVVLTLLAIYAAGLALPHNTHRVVSTQAPDRGWMALKLVALIYLALQLGCIALTNFSLGFLLATTMVPTAALAKPHGPRTLYAALLVLTSPAATLLGSLFLWRELQEAPLSLAEGWQLFLAALAQGVLEHHTYGALLFPLLSLGLYPCWLLFWNVLFWK

SEQ ID NO: 48059 - protein, 561 aa, Homo sapiens
MGLLSDPVRRRALARLVLRLNAPLWALPVAWLERTMRSVGLEVYTQSFSRKLPFPDETHERYMVSGTNVYGILRAPRAASTESLVLTVPCGSDSTNSQAVGLLLALAAHFRGQIYWAKDIVFLVTEHDLLGTEAWLEAYHDVNVTGMQSSPLQGRAGAIQAAVALELSSDVVTSLDVAVEGLNGQLPNLDLLNLFQTFCQKGGLLCTLQGKLQPEDWTSLDGPLQGLQTLLLMVLRQASGRPHGSHGLFLRYRVEALTLRGINSFRQYKYDLVAVGKALEGMFRKLNHLLERLHQSFFLYLLPGLSRFVSIGLYMPAVGFLLLVLGLKALELWMQLHEAGMGLEEPGGAPGPSVPLPPSQGVGLASLVAPLLISQAMGLALYVLPVLGQHVATQHFPVAEAEAVVLTLLAIYAAGLALPHNTHRVVSTQAPDRGWMALKLVALIYLALQLGCIALTNFSLGFLLATTMVPTAALAKPHGPRTLYAALLVLTSPAATLLGSLFLWRELQEAPLSLAEGWQLFLAALAQGVLEHHTYGALLFPLLSLGLYPCWLLFWNVLFWK

SEQ ID NO: 48060 - protein, 184 aa, Homo sapiens
MKALGAVLLALLLCGRPGRGQTQQEEEEEDEDHGPDDYDEEDEDEVEEEETNRLPGGRSRVLLRCYTCKSLPRDERCNLTQNCSHGQTCTTLIAHGNTESGLLTTHSTWCTDSCQPITKTVEGTQVTMTCCQSSLCNVPPWQSSRVQDPTGKGAGGPRGSSETVGAALLLNLLAGLGAMGARRP

SEQ ID NO: 48061 - protein, 158 aa, Homo sapiens
MLLFALLLAMELPLVAASATMRAQWTYSLRCHDCAVINDFNCPNIRVCPYHIRRCMTISIRINSRELLVYKNCTNNCTFVYAAEQPPEAPGKIFKTNSFYWVCCCNSMVCNAGGPTNLERDMLPDEVTEEELPEGTVRLGVSKLLLSFASIIVSNILP

SEQ ID NO: 48062 - protein, 840 aa, Homo sapiens
MSAFRLWPGLLIMLGSLCHRGSPCGLSTHVEIGHRALEFLQLHNGRVNYRELLLEHQDAYQAGIVFPDCFYPSICKGGKFHDVSESTHWTPFLNASVHYIRENYPLPWEKDTEKLVAFLFGITSHMAADVSWHSLGLEQGFLRTMGAIDFHGSYSEAHSAGDFGGDVLSQFEFNFNYLARRWYVPVKDLLGIYEKLYGRKVITENVIVDCSHIQFLEMYGEMLAVSKLYPTYSTKSPFLVEQFQEYFLGGLDDMAFWSTNIYHLTSFMLENGTSDCNLPENPLFIACGGQQNHTQGSKMQKNDFHRNLTTSLTESVDRNINYTERGVFFSVNSWTPDSMSFIYKALERNIRTMFIGGSQLSQKHVSSPLASYFLSFPYARLGWAMTSADLNQDGHGDLVVGAPGYSRPGHIHIGRVYLIYGNDLGLPPVDLDLDKEAHRILEGFQPSGRFGSALAVLDFNVDGVPDLAVGAPSVGSEQLTYKGAVYVYFGSKQGGMSSSPNITISCQDIYCNLGWTLLAADVNGDSEPDLVIGSPFAPGGGKQKGIVAAFYSGPSLSDKEKLNVEAANWTVRGEEDFSWFGYSLHGVTVDNRTLLLVGSPTWKNASRLGHLLHIRDEKKSLGRVYGYFPPNGQSWFTISGDKAMGKLGTSLSSGHVLMNGTLKQVLLVGAPTYDDVSKVAFLTVTLHQGGATRMYALTSDAQPLLLSTFSGDRRFSRFGGVLHLSDLDDDGLDEIIMAAPLRIADVTSGLIGGEDGRVYVYNGKETTLGDMTGKCKSWITPCPEEKAQYVLISPEASSRFGSSLITVRSKAKNQVVIAAGRSSLGARLSGALHVYSLGSD

SEQ ID NO: 48063 - protein, 176 aa, Homo sapiens
MSAFRLWPGLLIMLGSLCHRGSPCGLSTHVEIGHRALEFLQLHNGRVNYRELLLEHQDAYQAGIVFPDCFYPSICKGGKFHDVSESTHWTPFLNASVHYIRENYPLPWEKDTEKLVAFLFGITSHMAADVSWHSLGLEQGFLRTMGAIDFHGSYSEAHSAGDFGTVYLHLLNFLVV

SEQ ID NO: 48064 - protein, 276 aa, Homo sapiens
MNSKRMLLLVLFAFSLMLVERYFRNHQVEELRLSDWFHPRKRPDVITKTDWLAPVLWEGTFDRRVLEKHYRRRNITVGLAVFATGRFAEEYLRPFLHSANKHFMTGYRVIFYIMVDAFFKLPDIEPSPLRTFKAFKVGTERWWLDGPLVHVKSLGEHIASHIQDEVDFLFSMAANQVFQNEFGVETLGPLVAQLHAWWYFRNTKNFPYERRPTSAACIPFGQGDFYYGNLMVGGTPHNILDFIKEYLNGVIHDIKNGLNSTYEKHLNKYFYLNKPT

SEQ ID NO: 48065 - protein, 721 aa, Homo sapiens
MLPRGRPRALGAAALLLLLLLLGFLLFGGDLGCERREPGGRAGAPGCFPGPLMPRVPPDGRLRRAAALDGDPGAGPGDHNRSDCGPQPPPPPKCELLHVAIVCAGHNSSRDVITLVKSMLFYRKNPLHLHLVTDAVARNILETLFHTWMVPAVRVSFYHADQLKPQVSWIPNKHYSGLYGLMKLVLPSALPAELARVIVLDTDVTFASDISELWALFAHFSDTQAIGLVENQSDWYLGNLWKNHRPWPALGRGFNTGVILLRLDRLRQAGWEQMWRLTARRELLSLPATSLADQDIFNAVIKEHPGLVQRLPCVWNVQLSDHTLAERCYSEASDLKVIHWNSPKKLRVKNKHVEFFRNFYLTFLEYDGNLLRRELFVCPSQPPPGAEQLQQALAQLDEEDPCFEFRQQQLTVHRVHVTFLPHEPPPPRPHDVTLVAQLSMDRLQMLEALCRHWPGPMSLALYLTDAEAQQFLHFVEASPVLAARQDVAYHVVYREGPLYPVNQLRNVALAQALTPYVFLSDIDFLPAYSLYDYLRASIEQLGLGSRRKAALVVPAFETLRYRFSFPHSKVELLALLDAGTLYTFRYHEWPRGHAPTDYARWREAQAPYRVQWAANYEPYVVVPRDCPRYDPRFVGFGWNKVAHIVELDAQEYELLVLPEAFTIHLPHAPSLDISRFRSSPTYRDCLQALKDEFHQDLSRHHGAAALKYLPALQQPQSPARG

SEQ ID NO: 48066 - protein, 289 aa, Homo sapiens
MWRLTARRELLSLPATSLADQDIFNAVIKEHPGLVQRLPCVWNVQLSDHTLAERCYSEASDLKVIHWNSPKKLRVKNKHVEFFRNFYLTFLEYDGNLLRRELFVCPSQPPPGAEQLQQALAQLDEEDPCFEFRQQQLTVHRVHVTFLPHEPPPPRPHDVTLVAQLSMDRLQMLEALCRHWPGPMSLALYLTDAEAQQFLHFVEASPVLAARQDVAYHVVYREGPLYPVNQLRNVALAQALTPYVFLSDIDFLPAYSLYDYLREARAGFNSSSTCGCAHPSHQARWPMVV

SEQ ID NO: 48067 - protein, 721 aa, Homo sapiens; identical to SEQ ID NO: 48065

SEQ ID NO: 48068 - protein, 721 aa, Homo sapiens; identical to SEQ ID NO: 48065

SEQ ID NO: 48069 - protein, 690 aa, Homo sapiens
MLPRGRPRALGAAALLLLLLLLGFLLFDGRLRRAAALDGDPGAGPGDHNRSDCGPQPPPPPKCELLHVAIVCAGHNSSRDVITLVKSMLFYRKNPLHLHLVTDAVARNILETLFHTWMVPAVRVSFYHADQLKPQVSWIPNKHYSGLYGLMKLVLPSALPAELARVIVLDTDVTFASDISELWALFAHFSDTQAIGLVENQSDWYLGNLWKNHRPWPALGRGFNTGVILLRLDRLRQAGWEQMWRLTARRELLSLPATSLADQDIFNAVIKEHPGLVQRLPCVWNVQLSDHTLAERCYSEASDLKVIHWNSPKKLRVKNKHVEFFRNFYLTFLEYDGNLLRRELFVCPSQPPPGAEQLQQALAQLDEEDPCFEFRQQQLTVHRVHVTFLPHEPPPPRPHDVTLVAQLSMDRLQMLEALCRHWPGPMSLALYLTDAEAQQFLHFVEASPVLAARQDVAYHVVYREGPLYPVNQLRNVALAQALTPYVFLSDIDFLPAYSLYDYLRASIEQLGLGSRRKAALVVPAFETLRYRFSFPHSKVELLALLDAGTLYTFRYHEWPRGHAPTDYARWREAQAPYRVQWAANYEPYVVVPRDCPRYDPRFVGFGWNKVAHIVELDAQEYELLVLPEAFTIHLPHAPSLDISRFRSSPTYRDCLQALKDEFHQDLSRHHGAAALKYLPALQQPQSPARG

SEQ ID NO: 48070 - protein, 373 aa, Homo sapiens
MSILIIEAFYGGSHKQLVDLLQEELGDCVVYTLPAKKWHWRARTSALYFSQTIPISEHYRTLFASSVLNLTELAALRPDLGKLKKILYFHENQLIYPVKKCQERDFQYGYNQILSCLVADVVVFNSVFNMESFLTSMGKFMKLIPDHRPKDLESIIRPKCQVIYFPIRFPDVSRFMPKHKTTHLKKMLGLKGNGGAVLSMALPFQPEQRDSEDLLKNFNSECDTHCGLDTARQEYLGNSLRQESDLKKSTSSDNSSSHHGENKQNLTVDPCDILGGVDNQQRLLHIVWPHRWLEAVYCGCYPLCPKDLVYPEIFPAEYLYSTPEQLSKRLQNFCKRPDIIRKHLYKGEIAPFSWAALHGKFRSLLTTEPREDL

SEQ ID NO: 48071 - protein, 458 aa, Homo sapiens
MSILIIEAFYGGSHKQLVDLLQEELGDCVVYTLPAKKWHWRARTSALYFSQTIPISEHYRTLFASSVLNLTELAALRPDLGKLKKILYFHENQLIYPVKKCQERDFQYGYNQILSCLVADVVVFNSVFNMESFLTSMGKFMKLIPDHRPKDLESIIRPKCQVIYFPIRFPDVSRFMPKHKTTHLKKMLGLKGNGGAVLSMALPFQPEQRDSEDLLKNFNSECDTHCGLDTARQEYLGNSLRQESDLKKSTSSDNSSSHHGENKQNLTVDPCDILGGVDNQQRLLHIVWPHRWEHDKDPESFFKVLMHLKDLGLNFHVSVLGETFTDVPDIFSEAKKALGSSVLHWGYLPSKDDYFQVLCMADVVISTAKHEFFGVAMLEAVYCGCYPLCPKDLVYPEIFPAEYLYSTPEQLSKRLQNFCKRPDIIRKHLYKGEIAPFSWAALHGKFRSLLTTEPREDL

SEQ ID NO: 48072 - protein, 373 aa, Homo sapiens; identical to SEQ ID NO: 48070

SEQ ID NO: 48073 - protein, 458 aa, Homo sapiens; identical to SEQ ID NO: 48071

SEQ ID NO: 48074 - protein, 458 aa, Homo sapiens; identical to SEQ ID NO: 48071

SEQ ID NO: 48075 - protein, 99 aa, Homo sapiens
MSILIIEAFYGGSHKQLVDLLQEELGDCVVYTLPAKKWHWRARTSALYFSQTIPISEHYRTLFASSVLNLTELAALRPDLGKLKKILYFHENQLIYPVK

SEQ ID NO: 48076 - protein, 173 aa, Homo sapiens
MSILIIEAFYGGSHKQLVDLLQEELGDCVVYTLPAKKWHWRARTSALYFSQTIPISEHYRTLFASSVLNLTELAALRPDLGKLKKILYFHENQLIYPVKKCQERDFQYGYNQILSCLVADVVVFNSVFNMESFLTSMGKFMKLIPDHRPKDLESIIRPKCQVIYFPIRFPDVS

SEQ ID NO: 48077 - protein, 458 aa, Homo sapiens; identical to SEQ ID NO: 48071

SEQ ID NO: 48078 - protein, 739 aa, Homo sapiens
MPSPRPVLLRGARAALLLLLPPRLLARPSLLLRRSLSAASCPPISLPAAASRSSMDGAGAEEVLAPLRLAVRQQGDLVRKLKEDKAPQVDVDKAVAELKARKRVLEAKELALQPKDDIVDRAKMEDTLKRRFFYDQAFAIYGGVSGLYDFGPVGCALKNNIIQTWRQHFIQEEQILEIDCTMLTPEPVLKTSGHVDKFADFMVKDVKNGECFRADHLLKAHLQKLMSDKKCSVEKKSEMESVLAQLDNYGQQELADLFVNYNVKSPITGNDLSPPVSFNLMFKTFIGPGGNMPGYLRPETAQGIFLNFKRLLEFNQGKLPFAAAQIGNSFRNEISPRSGLIRVREFTMAEIEHFVDPSEKDHPKFQNVADLHLYLYSAKAQVSGQSARKMRLGDAVEQGVINNTVLGYFIGRIYLYLTKVGISPDKLRFRQHMENEMAHYACDCWDAESKTSYGWIEIVGCADRSCYDLSCHARATKVPLVAEKPLKEPKTVNVVQFEPSKGAIGKAYKKDAKLVMEYLAICDECYITEMEMLLNEKGEFTIETEGKTFQLTKDMINVKRFQKTLYVEEVVPNVIEPSFGLGRIMYTVFEHTFHVREGDEQRTFFSFPAVVAPFKCSVLPLSQNQEFMPFVKELSEALTRHGVSHKVDDSSGSIGRRYARTDEIGVAFGVTIDFDTVNKTPHTATLRDRDSMRQIRAEISELPSIVQDLANGNITWADVEARYPLFEGQETGKKETIEE

SEQ ID NO: 48079 - protein, 184 aa, Homo sapiens
MAEPQPPSGGLTDEAALSCCSDADPSTKDFLLQQTMLRVKDPKKSLDFYTRVLGMTLIQKCDFPIMKFSLYFLAYEDKNDIPKEKDEKIAWALSRKATLELTHNWGTEDDETQSYHNGNSDPRGFGHIGIAVPDVYSACKRFEELGVKFVKKPDDGKMKGLAFIQDPDGYWIEILNPNKMATLM

SEQ ID NO: 48080 - protein, 328 aa, Homo sapiens
MRPVRLMKVFVTRRIPAEGRVALARAADCEVEQWDSDEPIPAKELERGVAGAHGLLCLLSDHVDKRILDAAGANLKVISTMSVGIDHLALDEIKKRGIRVGYTPDVLTDTTAELAVSLLLTTCRRLPEAIEEVKNGGWTSWKPLWLCGYGLTQSTVGIIGLGRIGQAIARRLKPFGVQRFLYTGRQPRPEEAAEFQAEFVSTPELAAQSDFIVVACSLTPATEGLCNKDFFQKMKETAVFINISRGDVVNQDDLYQALASGKIAAAGLDVTSPEPLPTNHPLLTLKNCVILPHIGSATHRTRNTMSLLAANNLLAGLRGEPMPSELKL

SEQ ID NO: 48081 - protein, 395 aa, Homo sapiens
MRPVRLMKVFVTRRIPAEGRVALARAADCEVEQWDSDEPIPAKELERGVAGAHGLLCLLSDHVDKRILDAAGANLKVISTMSVGIDHLALDEIKKRGIRVGYTPDVLTDTTAELAVSLLLTTCRRLPEAIEEVKNGGWTSWKPLWLCGYGLTQSTVGIIGLGRIGQAIARRLKPFGVQRFLYTGRQPRPEEAAEFQAEFVSTPELAAQSDFIVVACSLTPATEGLCNKDFFQKMKETAVFINISRYPRATLPSKPGEEPSPLLPSGDFLPRGLLVRPQAELAGFHKPNNQLRNSWEYTRPPYREEEPSEWAWPVCFSAVAPTRRGLAHSSVASGSVPREPLQAHYPPPQRAGLEDLKGPLEAASHTAEPGFVWLWFSDTLNLMLLGGQTLKLTWS

SEQ ID NO: 48082 - protein, 252 aa, Homo sapiens
MLGGVPTLCGTGNETWTLLALGQAIARRLKPFGVQRFLYTGRQPRPEEAAEFQAEFVSTPELAAQSDFIVVACSLTPATEGLCNKDFFQKMKETAVFINISRYPRATLPSKPGEEPSPLLPSGDFLPRGLLVRPQAELAGFHKPNNQLRNSWEYTRPPYREEEPSEWAWPVCFSAVAPTRRGLAHSSVASGSVPREPLQAHYPPPQRAGLEDLKGPLEAASHTAEPGFVWLWFSDTLNLMLLGGQTLKLTWS

SEQ ID NO: 48083 - protein, 558 aa, Homo sapiens
MELRARGWWLLCAAAALVACARGDPASKSRSCGEVRQIYGAKGFSLSDVPQAEISGEHLRICPQGYTCCTSEMEENLANRSHAELETALRDSSRVLQAMLATQLRSFDDHFQHLLNDSERTLQATFPGAFGELYTQNARAFRDLYSELRLYYRGANLHLEETLAEFWARLLERLFKQLHPQLLLPDDYLDCLGKQAEALRPFGEAPRELRLRATRAFVAARSFVQGLGVASDVVRKVAQVPLGPECSRAVMKLVYCAHCLGVPGARPCPDYCRNVLKGCLANQADLDAEWRNLLDSMVLITDKFWGTSGVESVIGSVHTWLAEAINALQDNRDTLTAKVIQGCGNPKVNPQGPGPEEKRRRGKLAPRERPPSGTLEKLVSEAKAQLRDVQDFWISLPGTLCSEKMALSTASDDRCWNGMARGRYLPEVMGDGLANQINNPEVEVDITKPDMTIRQQIMQLKIMTNRLRSAYNGNDVDFQDASDDGSGSGSGDGCLDDLCSRKVSRKSSSSRTPLTHALPGLSEQEGQKTSAASCPQPPTFLLPLLLFLALTVARPRWR

SEQ ID NO: 48084 - protein, 580 aa, Homo sapiens
MAGTVRTACLVVAMLLSLDFPGQAQPPPPPPDATCHQVRSFFQRLQPGLKWVPETPVPGSDLQVCLPKGPTCCSRKMEEKYQLTARLNMEQLLQSASMELKFLIIQNAAVFQEAFEIVVRHAKNYTNAMFKNNYPSLTPQAFEFVGEFFTDVSLYILGSDINVDDMVNELFDSLFPVIYTQLMNPGLPDSALDINECLRGARRDLKVFGNFPKLIMTQVSKSLQVTRIFLQALNLGIEVINTTDHLKFSKDCGRMLTRMWYCSYCQGLMMVKPCGGYCNVVMQGCMAGVVEIDKYWREYILSLEELVNGMYRIYDMENVLLGLFSTIHDSIQYVQKNAGKLTTTIGKLCAHSQQRQYRSAYYPEDLFIDKKVLKVAHVEHEETLSSRRRELIQKLKSFISFYSALPGYICSHSPVAENDTLCWNGQELVERYSQKAARNGMKNQFNLHELKMKGPEPVVSQIIDKLKHINQLLRTMSMPKGRVLDKNLDEEGFESGDCGDDEDECIGGSGDGMIKVKNQLRFLAELAYDLDVDDAPGNSQQATPKDNEISTFHNLGNVHSPLKLLTSMAISVVCFFFLVH

SEQ ID NO: 48085 - protein, 603 aa, Homo sapiens
MAGTVRTACLVVAMLLSLDFPGQAQPPPPPPDATCHQVRSFFQRLQPGLKWVPETPVPGSDLQVCLPKGPTCCSRKMEEKYQLTARLNMEQLLQSASMELKFLIIQNAAVFQEAFEIVVRHAKNYTNAMFKNNYPSLTPQAFEFVGEFFTDVSLYILGSDINVDDMVNELFDSLFPVIYTQLMNPGLPDSALDINECLRGARRDLKVFGNFPKLIMTQVSKSLQVTRIFLQALNLGIEVINTTDHLKFSKDCGRMLTRMWYCSYCQGLMMVKPCGGYCNVVMQGCMAGVVEIDKYWREYILSLEELVNGMYRIYDMENVLLGLFSTIHDSIQYVQKNAGKLTTTETEKKIWHFKYPIFFLCIGLDLQIGKLCAHSQQRQYRSAYYPEDLFIDKKVLKVAHVEHEETLSSRRRELIQKLKSFISFYSALPGYICSHSPVAENDTLCWNGQELVERYSQKAARNGMKNQFNLHELKMKGPEPVVSQIIDKLKHINQLLRTMSMPKGRVLDKNLDEEGFESGDCGDDEDECIGGSGDGMIKVKNQLRFLAELAYDLDVDDAPGNSQQATPKDNEISTFHNLGNVHSPLKLLTSMAISVVCFFFLVH

SEQ ID NO: 48086 - protein, 256 aa, Homo sapiens
  VARIANT 1: note = MOD_RES - Any amino acid
XKPCGGYCNVVMQGCMAGVVEIDKYWREYILSLEELVNGMYRIYDMENVLLGLFSTIHDSIQYVQKNAGKLTTTIGKLCAHSQQRQYRSAYYPEDLFIDKKVLKVAHVEHEETLSSRRRELIQKLKSFISFYSALPGYICSHSPVAENDTLCWNGQELVERYSQKAARNGMKNQFNLHELKMKGPEPVVSQIIDKLKHINQLLRTMSMPKGRVLDKNLDEEGFESGDCGDDEDECIGGSGDGMIKVKNQLRFLAGN

SEQ ID NO: 48087 - protein, 526 aa, Homo sapiens
MAGTVRTACLVVAMLLSLDFPGQAQPPPPPPDATCHQVRSFFQRLQPGLKWVPETPVPEAFEIVVRHAKNYTNAMFKNNYPSLTPQAFEFVGEFFTDVSLYILGSDINVDDMVNELFDSLFPVIYTQLMNPGLPDSALDINECLRGARRDLKVFGNFPKLIMTQVSKSLQVTRIFLQALNLGIEVINTTDHLKFSKDCGRMLTRMWYCSYCQGLMMVKPCGGYCNVVMQGCMAGVVEIDKYWREYILSLEELVNGMYRIYDMENVLLGLFSTIHDSIQYVQKNAGKLTTTIGKLCAHSQQRQYRSAYYPEDLFIDKKVLKVAHVEHEETLSSRRRELIQKLKSFISFYSALPGYICSHSPVAENDTLCWNGQELVERYSQKAARNGMKNQFNLHELKMKGPEPVVSQIIDKLKHINQLLRTMSMPKGRVLDKNLDEEGFESGDCGDDEDECIGGSGDGMIKVKNQLRFLAELAYDLDVDDAPGNSQQATPKDNEISTFHNLGNVHSPLKLLTSMAISVVCFFFLVH

SEQ ID NO: 48088 - protein, 556 aa, Homo sapiens
MARFGLPALLCTLAVLSAALLAAELKSKSCSEVRRLYVSKGFNKNDAPLHEINGDHLKICPQGSTCCSQEMEEKYSLQSKDDFKSVVSEQCNHLQAVFASRYKKFDEFFKELLENAEKSLNDMFVKTYGHLYMQNSELFKDLFVELKRYYVVGNVNLEEMLNDFWARLLERMFRLVNSQYHFTDEYLECVSKYTEQLKPFGDVPRKLKLQVTRAFVAARTFAQGLAVAGDVVSKVSVVNPTAQCTHALLKMIYCSHCRGLVTVKPCYNYCSNIMRGCLANQGDLDFEWNNFIDAMLMVAERLEGPFNIESVMDPIDVKISDAIMNMQDNSVQVSQKVFQGCGPPKPLPAGRISRSISESAFSARFRPHHPEERPTTAAGTSLDRLVTDVKEKLKQAKKFWSSLPSNVCNDERMAAGNGNEDDCWNGKGKSRYLFAVTGNGLANQGNNPEVQVDTSKPDILILRQIMALRVMTSKMKNAYNGNDVDFFDISDESSGEGSGSGCEYQQCPSEFDYNATDHAGKSANEKADSAGVRPGAQAYLLTVFCILFLVMQREWR

SEQ ID NO: 48089 - protein, 486 aa, Homo sapiens
MEEKYSLQSKDDFKSVVSEQCNHLQAVFASRYKKFDEFFKELLENAEKSLNDMFVKTYGHLYMQNSELFKDLFVELKRYYVVGNVNLEEMLNDFWARLLERMFRLVNSQYHFTDEYLECVSKYTEQLKPFGDVPRKLKLQVTRAFVAARTFAQGLAVAGDVVSKVSVVNPTAQCTHALLKMIYCSHCRGLVTVKPCYNYCSNIMRGCLANQGDLDFEWNNFIDAMLMVAERLEGPFNIESVMDPIDVKISDAIMNMQDNSVQVSQKVFQGCGPPKPLPAGRISRSISESAFSARFRPHHPEERPTTAAGTSLDRLVTDVKEKLKQAKKFWSSLPSNVCNDERMAAGNGNEDDCWNGKGKSRYLFAVTGNGLANQGNNPEVQVDTSKPDILILRQIMALRVMTSKMKNAYNGNDVDFFDISDESSGEGSGSGCEYQQCPSEFDYNATDHAGKSANEKADSAGVRPGAQAYLLTVFCILFLVMQREWR

SEQ ID NO: 48090 - protein, 550 aa, Homo sapiens
MARFGLPALLCTLAVLSAALLAAELKSKSCSEVRRLYVSKGFNKNDAPLHEINGDHEDLSPGFYLLLSRDGGYSLQSKDDFKSVVSEQCNHLQAVFASRYKKFDEFFKELLENAEKSLNDMFVKTYGHLYMQNSELFKDLFVELKRYYVVGNVNLEEMLNDFWARLLERMFRLVNSQYHFTDEYLECVSKYTEQLKPFGDVPRKLKLQVTRAFVAARTFAQGLAVAGDVVSKVSVPSCTHALLKMIYCSHCRGLVTVKPCYNYCSNIMRGCLANQGDLDFEWNNFIDAMLMVAERLEGPFNIESVMDPIDVKISDAIMNMQDNSVQVSQKVFQGCGPPKPLPAGRISRSISESAFSARFRPHHPEERPTTAAGTSLDRLVTDVKEKLKQAKKFWSSLPSNVCNDERMAAGNGNEDDCWNGKGKSRYLFAVTGNGLANQGNNPEVQVDTSKPDILILRQIMALRVMTSKMKNAYNGNDVDFFDISDESSGEGSGSGCEYQQCPSEFDYNATDHAGKSANEKADSAGVRPGAQAYLLTVFCILFLVMQREWR

SEQ ID NO: 48091 - protein, 572 aa, Homo sapiens
MDAQTWPVGFRCLLLLALVGSARSEGVQTCEEVRKLFQWRLLGAVRGLPDSPRAGPDLQVCISKKPTCCTRKMEERYQIAARQDMQQFLQTSSSTLKFLISRNAAAFQETLETLIKQAENYTSILFCSTYRNMALEAAASVQEFFTDVGLYLFGADVNPEEFVNRFFDSLFPLVYNHLINPGVTDSSLEYSECIRMARRDVSPFGNIPQRVMGQMGRSLLPSRTFLQALNLGIEVINTTDYLHFSKECSRALLKMQYCPHCQGLALTKPCMGYCLNVMRGCLAHMAELNPHWHAYIRSLEELSDAMHGTYDIGHVLLNFHLLVNDAVLQAHLNGQKLLEQVNRICGRPVRTPTQSPRCSFDQSKEKHGMKTTTRNSEETLANRRKEFINSLRLYRSFYGGLADQLCANELAAADGLPCWNGEDIVKSYTQRVVGNGIKAQSGNPEVKVKGIDPVINQIIDKLKHVVQLLQGRSPKPDKWELLQLGSGGGMVEQVSGDCDDEDGCGGSGSGEVKRTLKITDWMPDDMNFSDVKQIHQTDTGSTLDTTGAGCAVATESMTFTLISVVMLLPGIW

SEQ ID NO: 48092 - protein, 555 aa, Homo sapiens
MPSWIGAVILPLLGLLLSLPAGADVKARSCGEVRQAYGAKGFSLADIPYQEIAGEHLRICPQEYTCCTTEMEDKLSQQSKLEFENLVEETSHFVRTTFVSRHKKFDEFFRELLENAEKSLNDMFVRTYGMLYMQNSEVFQDLFTELKRYYTGGNVNLEEMLNDFWARLLERMFQLINPQYHFSEDYLECVSKYTDQLKPFGDVPRKLKIQVTRAFIAARTFVQGLTVGREVANRVSKVSPTPGCIRALMKMLYCPYCRGLPTVRPCNNYCLNVMKGCLANQADLDTEWNLFIDAMLLVAERLEGPFNIESVMDPIDVKISEAIMNMQENSMQVSAKVFQGCGQPKPAPALRSARSAPENFNTRFRPYNPEERPTTAAGTSLDRLVTDIKEKLKLSKKVWSALPYTICKDESVTAGTSNEEECWNGHSKARYLPEIMNDGLTNQINNPEVDVDITRPDTFIRQQIMALRVMTNKLKNAYNGNDVNFQDTSDESSGSGSGSGCMDDVCPTEFEFVTTEAPAVDPDRREVDSSAAQRGHSLLSWSLTCIVLALQRLCR

SEQ ID NO: 48093 - protein, 193 aa, Homo sapiens
MQSLMQAPLLIALGLLLAAPAQAHLKKPSQLSSFSWDNCDEGKDPAVIRSLTLEPDPIIVPGNVTLSVMGSTSVPLSSPLKVDLVLEKEVAGLWIKIPCTDYIGSCTFEHFCDVLDMLIPTGEPCPEPLRTYGLPCHCPFKEGTYSLPKSEFVVPDLELPSWLTTGNYRIESVLSSSGKRLGCIKIAASLKGI

SEQ ID NO: 48094 - protein, 379 aa, Homo sapiens
MGCLGNSKTEDQRNEEKAQREANKKIEKQLQKDKQVYRATHRLLLLGAGESGKSTIVKQMRILHVNGFNGDEKATKVQDIKNNLKEAIETIVAAMSNLVPPVELANPENQFRVDYILSVMNVPDFDFPPEFYEHAKALWEDEGVRACYERSNEYQLIDCAQYFLDKIDVIKQADYVPSDQDLLRCRVLTSGIFETKFQVDKVNFHMFDVGGQRDERRKWIQCFNDVTAIIFVVASSSYNMVIREDNQTNRLQEALNLFKSIWNNRWLRTISVILFLNKQDLLAEKVLAGKSKIEDYFPEFARYTTPEDATPEPGEDPRVTRAKYFIRDEFLRISTASGDGRHYCYPHFTCAVDTENIRRVFNDCRDIIQRMHLRQYELL

SEQ ID NO: 48095 - protein, 380 aa, Homo sapiens
MGCLGNSKTEDQRNEEKAQREANKKIEKQLQKDKQVYRATHRLLLLGAGESGKSTIVKQMRILHVNGFNGDSEKATKVQDIKNNLKEAIETIVAAMSNLVPPVELANPENQFRVDYILSVMNVPDFDFPPEFYEHAKALWEDEGVRACYERSNEYQLIDCAQYFLDKIDVIKQADYVPSDQDLLRCRVLTSGIFETKFQVDKVNFHMFDVGGQRDERRKWIQCFNDVTAIIFVVASSSYNMVIREDNQTNRLQEALNLFKSIWNNRWLRTISVILFLNKQDLLAEKVLAGKSKIEDYFPEFARYTTPEDATPEPGEDPRVTRAKYFIRDEFLRISTASGDGRHYCYPHFTCAVDTENIRRVFNDCRDIIQRMHLRQYELL

SEQ ID NO: 48096 - protein, 245 aa, Homo sapiens
MDRRSRAQQWRRARHNYNDLCPPIGRRAATALLWLSCSIALLRALATSNARAQQRAAAQQRRSFLNAHHRSGAQVFPESPESESDHEHEEADLELSLPECLEYEEEFDYETESETESEIESETDFETEPETAPTTEPETEPEDDRGPVVPKHSTFGQSLTQRLHALKLRSPDASPSRAPPSTQEPQSPREGEELKPEDKDPRDPEESKEPKEEKQRRRCKPKKPTRRDASPESPSKKGPIPIRRH

SEQ ID NO: 48097 - protein, 395 aa, Homo sapiens
MGCLGNSKTEDQRNEEKAQREANKKIEKQLQKDKQVYRATHRLLLLGAGESGKSTIVKQMRILHVNGFNGEGGEEDPQAARSNSDGSEKATKVQDIKNNLKEAIETIVAAMSNLVPPVELANPENQFRVDYILSVMNVPDFDFPPEFYEHAKALWEDEGVRACYERSNEYQLIDCAQYFLDKIDVIKQADYVPSDQDLLRCRVLTSGIFETKFQVDKVNFHMFDVGGQRDERRKWIQCFNDVTAIIFVVASSSYNMVIREDNQTNRLQEALNLFKSIWNNRWLRTISVILFLNKQDLLAEKVLAGKSKIEDYFPEFARYTTPEDATPEPGEDPRVTRAKYFIRDEFLRISTASGDGRHYCYPHFTCAVDTENIRRVFNDCRDIIQRMHLRQYELL

SEQ ID NO: 48098 - protein, 245 aa, Homo sapiens; identical to SEQ ID NO: 48096

SEQ ID NO: 48099 - protein, 160 aa, Homo sapiens
MGCLGNSKTEDQRNEEKAQREANKEDNQTNRLQEALNLFKSIWNNRWLRTISVILFLNKQDLLAEKVLAGKSKIEDYFPEFARYTTPEDATPEPGEDPRVTRAKYFIRDEFLRISTASGDGRHYCYPHFTCAVDTENIRRVFNDCRDIIQRMHLRQYELL

SEQ ID NO: 48100 - protein, 394 aa, Homo sapiens
MGCLGNSKTEDQRNEEKAQREANKKIEKQLQKDKQVYRATHRLLLLGAGESGKSTIVKQMRILHVNGFNGEGGEEDPQAARSNSDGEKATKVQDIKNNLKEAIETIVAAMSNLVPPVELANPENQFRVDYILSVMNVPDFDFPPEFYEHAKALWEDEGVRACYERSNEYQLIDCAQYFLDKIDVIKQADYVPSDQDLLRCRVLTSGIFETKFQVDKVNFHMFDVGGQRDERRKWIQCFNDVTAIIFVVASSSYNMVIREDNQTNRLQEALNLFKSIWNNRWLRTISVILFLNKQDLLAEKVLAGKSKIEDYFPEFARYTTPEDATPEPGEDPRVTRAKYFIRDEFLRISTASGDGRHYCYPHFTCAVDTENIRRVFNDCRDIIQRMHLRQYELL

SEQ ID NO: 48101 - protein, 380 aa, Homo sapiens; identical to SEQ ID NO: 48095

SEQ ID NO: 48102 - protein, 245 aa, Homo sapiens; identical to SEQ ID NO: 48096

SEQ ID NO: 48103 - protein, 1037 aa, Homo sapiens
MGVRNCLYGNNMSGQRDIPPEIGEQPEQPPLEAPGAAAPGAGPSPAEEMETEPPHNEPIPVENDGEACGPPEVSRPNFQVLNPAFREAGAHGSYSPPPEEAMPFEAEQPSLGGFWPTLEQPGFPSGVHAGLEAFGPALMEPGAFSGARPGLGGYSPPPEEAMPFEFDQPAQRGCSQLLLQVPDLAPGGPGAAGVPGAPPEEPQALRPAKAGSRGGYSPPPEETMPFELDGEGFGDDSPPPGLSRVIAQVDGSSQFAAVAASSAVRLTPAANAPPLWVPGAIGSPSQEAVRPPSNFTGSSPWMEISGPPFEIGSAPAGVDDTPVNMDSPPIALDGPPIKVSGAPDKRERAERPPVEEEAAEMEGAADAAEGGKVPSPGYGSPAAGAASADTAARAAPAAPADPDSGATPEDPDSGTAPADPDSGAFAADPDSGAAPAAPADPDSGAAPDAPADPDSGAAPDAPADPDAGAAPEAPAAPAAAETRAAHVAPAAPDAGAPTAPAASATRAAQVRRAASAAPASGARRKIHLRPPSPEIQAADPPTPRPTRASAWRGKSESSRGRRVYYDEGVASSDDDSSGDESDDGTSGCLRWFQHRRNRRRRKPQRNLLRNFLVQAFGGCFGRSESPQPKASRSLKVKKVPLAEKRRQMRKEALEKRAQKRAEKKRSKLIDKQLQDEKMGYMCTHRLLLLGAGESGKSTIVKQMRILHVNGFNGEGGEEDPQAARSNSDGEKATKVQDIKNNLKEAIETIVAAMSNLVPPVELANPENQFRVDYILSVMNVPDFDFPPEFYEHAKALWEDEGVRACYERSNEYQLIDCAQYFLDKIDVIKQADYVPSDQDLLRCRVLTSGIFETKFQVDKVNFHMFDVGGQRDERRKWIQCFNDVTAIIFVVASSSYNMVIREDNQTNRLQEALNLFKSIWNNRWLRTISVILFLNKQDLLAEKVLAGKSKIEDYFPEFARYTTPEDATPEPGEDPRVTRAKYFIRDEFLRISTASGDGRHYCYPHFTCAVDTENIRRVFNDCRDIIQRMHLRQYELL

SEQ ID NO: 48104 - protein, 113 aa, Homo sapiens
  VARIANT 1: note = MOD_RES - Any amino acid
XTTEPETEPEDDRGPVVPKHSTFGQSLTQRLHALKLRSPDASPSRAPPSTQEPQSPREGEELKPEDKDPRDPEESKEPKEEKQRRRCKPKKPTRRDASPESPSKKGPIPIRRH

SEQ ID NO: 48105 - protein, 166 aa, Homo sapiens
PESESDHEHEEADLELSLPECLEYEEEFDYETESETESEIESETDFETEPETAPTTEPETEPEDDRGPVVPKHSTFGQSLTQRLHALKLRSPDASPSRAPPSTQEPQSPREGEELKPEDKDPRDPEESKEPKEEKQRRRCKPKKPTRRDASPESPSKKGPIPIRRH

SEQ ID NO: 48106 - protein, 1859 aa, Homo sapiens
MVDKNIYIIQGEINIVVGAIKRNARWSTHTPLDEERDPLLHSFGHLKEVLNSITELSEIEPNVFLRPFLEVIRSEDTTGPITGLALTSVNKFLSYALIDPTHEGTAEGMENMADAVTHARFVGTDPASDEVVLMKILQVLRTLLLTPVGAHLTNESVCEIMQSCFRICFEMRLSELLRKSAEHTLVDMVQLLFTRLPQFKEEPKNYVGTNMKKLKMRAGGMSDSSKWKKQKRSPRPPRHMTKVTPGSELPTPNGTTLSSNLTGGMPFIDVPTPISSASSEAASAVVSPSTDSGLEFSSQTTSKEDLTDLEQPGSPGYSTATEPGSSELGVPEQPDLQEGTHVEKSQSASVESIPEVLEECTSPADHSDSASVHDMDYVNPRGVRFTQSSQKEGTALVPYGLPCIRELFRFLISLTNPHDRHNSEVMIHMGLHLLTVALESAPVAQCQTLLGLIKDEMCRHLFQLLSIERLNLYAASLRVCFLLFESMREHLKFQMEMYIKKLMEIITVENPKMPYEMKEMALEAIVQLWRIPSFVTELYINYDCDYYCSNLFEELTKLLSKNAFPVSGQLYTTHLLSLDALLTVIDSTEAHCQAKVLNSLTQQEKKETARPSCEIVDGTREASNTERTASDGKAVGMASDIPGLHLPGGGRLPPEHGKSGCSDLEEAVDSGADKKFARKPPRFSCLLPDPRELIEIKNKKKLLITGTEQFNQKPKKGIQFLQEKGLLTIPMDNTEVAQWLRENPRLDKKMIGEFVSDRKNIDLLESFVSTFSFQGLRLDEALRLYLEAFRLPGEAPVIQRLLEAFTERWMNCNGSPFANSDACFSLAYAVIMLNTDQHNHNVRKQNAPMTLEEFRKNLKGVNGGKDFEQDILEDMYHAIKNEEIVMPEEQTGLVRENYVWNVLLHRGATPEGIFLRVPTASYDLDLFTMTWGPTIAALSYVFDKSLEETIIQKAISGFRKCAMISAHYGLSDVFDNLIISLCKFTALSSESIENLPSVFGSNPKAHIAAKTVFHLAHRHGDILREGWKNIMEAMLQLFRAQLLPKAMIEVEDFVDPNGKISLQREETPSNRGESTVLSFVSWLTLSGPEQSSVRGPSTENQEAKRVALECIKQCDPEKMITESKFLQLESLQELMKALVSVTPDEETYDEEDAAFCLEMLLRIVLENRDRVGCVWQTVRDHLYHLCVQAQDFCFLVERAVVGLLRLAIRLLRREEISAQVLLSLRILLLMKPSVLSRVSHQVAYGLHELLKTNAANIHSGDDWATLFTLLECIGSGVKPPAALQATARADAPDAGAQSDSELPSYHQNDVSLDRGYTSDSEVYTDHGRPGKIHRSATDADVVNSGWLVVGKDDVDNSKPGPSRPGPSPLINQYSLTVGLDLGPHDTKSLLKCVESLSFIVRDAAHITPDNFELCVKTLRIFVEASLNGGCKSQEKRGKSHKYDSKGNRFKKKSKEGSMLRRPRTSSQHASRGGQSDDDEDEGVPASYHTVSLQVSQDLLDLMHTLHTRAASIYSSWAEEQRHLETGGQKIEADSRTLWAHCWCPLLQGIACLCCDARRQVRMQALTYLQRALLVHDLQKLDALEWESCFNKVLFPLLTKLLENISPADVGGMEETRMRASTLLSKVFLQHLSPLLSLSTFAALWLTILDFMDKYMHAGSSDLLSEAIPESLKNMLLVMDTAEIFHSADARGGGPSALWEITWERIDCFLPHLRDELFKQTVIQDPMPMEPQGQKPLASAHLTSAAGDTRTPGHPPPPEIPSELGACDFEKPESPRAASSSSPGSPVASSPSRLSPTPDGPPPLAQPPLILQPLASPLQVGVPPMTLPIILNPALIEATSPVPLLATPRPTDPIPTSEVN

SEQ ID NO: 48107 - protein, 1203 aa, Homo sapiens
MAACGRVRRMFRLSAALHLLLLFAAGAEKLPGQGVHSQGQGPGANFVSFVGQAGGGGPAGQQLPQLPQSSQLQQQQQQQQQQQQPQPPQPPFPAGGPPARRGGAGAGGGWKLAEEESCREDVTRVCPKHTWSNNLAVLECLQDVREPENEISSDCNHLLWNYKLNLTTDPKFESVAREVCKSTITEIKECADEPVGKGYMVSCLVDHRGNITEYQCHQYITKMTAIIFSDYRLICGFMDDCKNDINILKCGSIRLGEKDAHSQGEVVSCLEKGLVKEAEEREPKIQVSELCKKAILRVAELSSDDFHLDRHLYFACRDDRERFCENTQAGEGRVYKCLFNHKFEESMSEKCREALTTRQKLIAQDYKVSYSLAKSCKSDLKKYRCNVENLPRSREARLSYLLMCLESAVHRGRQVSSECQGEMLDYRRMLMEDFSLSPEIILSCRGEIEHHCSGLHRKGRTLHCLMKVVRGEKGNLGMNCQQALQTLIQETDPGADYRIDRALNEACESVIQTACKHIRSGDPMILSCLMEHLYTEKMVEDCEHRLLELQYFISRDWKLDPVLYRKCQGDASRLCHTHGWNETSEFMPQGAVFSCLYRHAYRTEEQGRRLSRECRAEVQRILHQRAMDVKLDPALQDKCLIDLGKWCSEKTETGQELECLQDHLDDLVVECRDIVGNLTELESEDIQIEALLMRACEPIIQNFCHDVADNQIDSGDLMECLIQNKHQKDMNEKCAIGVTHFQLVQMKDFRFSYKFKMACKEDVLKLCPNIKKKVDVVICLSTTVRNDTLQEAKEHRVSLKCRRQLRVEELEMTEDIRLEPDLYEACKSDIKNFCSAVQYGNAQIIECLKENKKQLSTRCHQKVFKLQETEMMDPELDYTLMRVCKQMIKRFCPEADSKTMLQCLKQNKNSELMDPKCKQMITKRQITQNTDYRLNPMLRKACKADIPKFCHGILTKAKDDSELEGQVISCLKLRYADQRLSSDCEDQIRIIIQESALDYRLDPQLQLHCSDEISSLCAEEAAAQEQTGQVEECLKVNLLKIKTELCKKEVLNMLKESKADIFVDPVLHTACALDIKHHCAAITPGRGRQMSCLMEALEDKRVRLQPECKKRLNDRIEMWSYAAKVAPADGFSDLAMQVMTSPSKNYILSVISGSICILFLIGLMCGRITKRVTRELKDRLQYRSETMAYKGLVWSQDVTGSPA

SEQ ID NO: 48108 - protein, 1179 aa, Homo sapiens
MAACGRVRRMFRLSAALHLLLLFAAGAEKLPGQGVHSQGQGPGANFVSFVGQAGGGGPAGQQLPQLPQSSQLQQQQQQQQQQQQPQPPQPPFPAGGPPARRGGAGAGGGWKLAEEESCREDVTRVCPKHTWSNNLAVLECLQDVREPENEISSDCNHLLWNYKLNLTTDPKFESVAREVCKSTITEIKECADEPVGKGYMVSCLVDHRGNITEYQCHQYITKMTAIIFSDYRLICGFMDDCKNDINILKCGSIRLGEKDAHSQGEVVSCLEKGLVKEAEEREPKIQVSELCKKAILRVAELSSDDFHLDRHLYFACRDDRERFCENTQAGEGRVYKCLFNHKFEESMSEKCREALTTRQKLIAQDYKVSYSLAKSCKSDLKKYRCNVENLPRSREARLSYLLMCLESAVHRGRQVSSECQGEMLDYRRMLMEDFSLSPEIILSCRGEIEHHCSGLHRKGRTLHCLMKVVRGEKGNLGMNCQQALQTLIQETDPGADYRIDRALNEACESVIQTACKHIRSGDPMILSCLMEHLYTEKMVEDCEHRLLELQYFISRDWKLDPVLYRKCQGDASRLCHTHGWNETSEFMPQGAVFSCLYRHAYRTEEQGRRLSRECRAEVQRILHQRAMDVKLDPALQDKCLIDLGKWCSEKTETGQELECLQDHLDDLVVECRDIVGNLTELESEDIQIEALLMRACEPIIQNFCHDVADNQIDSGDLMECLIQNKHQKDMNEKCAIGVTHFQLVQMKDFRFSYKFKMACKEDVLKLCPNIKKKVDVVICLSTTVRNDTLQEAKEHRVSLKCRRQLRVEELEMTEDIRLEPDLYEACKSDIKNFCSAVQYGNAQIIECLKENKKQLSTRCHQKVFKLQETEMMDPELDYTLMRVCKQMIKRFCPEADSKTMLQCLKQNKNSELMDPKCKQMITKRQITQNTDYRLNPMLRKACKADIPKFCHGILTKAKDDSELEGQVISCLKLRYADQRLSSDCEDQIRIIIQESALDYRLDPQLQLHCSDEISSLCAEEAAAQEQTGQVEECLKVNLLKIKTELCKKEVLNMLKESKADIFVDPVLHTACALDIKHHCAAITPGRGRQMSCLMEALEDKRVRLQPECKKRLNDRIEMWSYAAKVAPADGFSDLAMQVMTSPSKNYILSVISGSICILFLIGLMCGRITKRVTRELKDR

SEQ ID NO: 48109 - protein, 1192 aa, Homo sapiens
MAACGRVRRMFRLSAALHLLLLFAAGAEKLPGQGVHSQGQGPGANFVSFVGQAGGGGPAGQQLPQLPQSSQLQQQQQQQQQQQQPQPPQPPFPAGGPPARRGGAGAGGGWKLAEEESCREDVTRVCPKHTWSNNLAVLECLQDVRELLWNYKLNLTTDPKFESVAREVCKSTITEIKECADEPVGKGYMVSCLVDHRGNITEYQCHQYITKMTAIIFSDYRLICGFMDDCKNDINILKCGSIRLGEKDAHSQGEVVSCLEKGLVKEAEEREPKIQVSELCKKAILRVAELSSDDFHLDRHLYFACRDDRERFCENTQAGEGRVYKCLFNHKFEESMSEKCREALTTRQKLIAQDYKVSYSLAKSCKSDLKKYRCNVENLPRSREARLSYLLMCLESAVHRGRQVSSECQGEMLDYRRMLMEDFSLSPEIILSCRGEIEHHCSGLHRKGRTLHCLMKVVRGEKGNLGMNCQQALQTLIQETDPGADYRIDRALNEACESVIQTACKHIRSGDPMILSCLMEHLYTEKMVEDCEHRLLELQYFISRDWKLDPVLYRKCQGDASRLCHTHGWNETSEFMPQGAVFSCLYRHAYRTEEQGRRLSRECRAEVQRILHQRAMDVKLDPALQDKCLIDLGKWCSEKTETGQELECLQDHLDDLVVECRDIVGNLTELESEDIQIEALLMRACEPIIQNFCHDVADNQIDSGDLMECLIQNKHQKDMNEKCAIGVTHFQLVQMKDFRFSYKFKMACKEDVLKLCPNIKKKVDVVICLSTTVRNDTLQEAKEHRVSLKCRRQLRVEELEMTEDIRLEPDLYEACKSDIKNFCSAVQYGNAQIIECLKENKKQLSTRCHQKVFKLQETEMMDPELDYTLMRVCKQMIKRFCPEADSKTMLQCLKQNKNSELMDPKCKQMITKRQITQNTDYRLNPMLRKACKADIPKFCHGILTKAKDDSELEGQVISCLKLRYADQRLSSDCEDQIRIIIQESALDYRLDPQLQLHCSDEISSLCAEEAAAQEQTGQVEECLKVNLLKIKTELCKKEVLNMLKESKADIFVDPVLHTACALDIKHHCAAITPGRGRQMSCLMEALEDKRVRLQPECKKRLNDRIEMWSYAAKVAPADGFSDLAMQVMTSPSKNYILSVISGSICILFLIGLMCGRITKRVTRELKDRLQYRSETMAYKGLVWSQDVTGSPA

SEQ ID NO: 48110 - protein, 696 aa, Homo sapiens
MGNGMCSRKQKRIFQTLLLLTVVFGFLYGAMLYYELQTQLRKAEAVALKYQQHQESLSAQLQVVYEHRSRLEKSLQKERLEHKKAKEDFLVYKLEAQETLNKGRQDSNSRYSALNVQHQMLKSQHEELKKQHSDLEEEHRKQGEDFSRTFNDHKQKYLQLQQEKEQELSKLKETVYNLREENRQLRKAHQDIHTQLQDVKQQHKNLLSEHEQLVVTLEDHKSALAAAQTQVAEYKQLKDTLNRIPSLRKPDPAEQQNVTQVAHSPQGYNTAREKPTREVQEVSRNNDVWQNHEAVPGRAEDTKLYAPTHKEAEFQAPPEPIQQEVERREPEEHQVEEEHRKALEEEEMEQVGQAEHLEEEHDPSPEEQDREWKEQHEQREAANLLEGHARAEVYPSAKPMIKFQSPYEEQLEQQRLAVQQVEEAQQLREHQEALHQQRLQGHLLRQQEQQQQQVAREMALQRQAELEEGRPQHQEQLRQQAHYDAMDNDIVQGAEDQGIQGEEGAYERDNQHQDEAEGDPGNRHEPREQGPREADPESEADRAAVEDINPADDPNNQGEDEFEEAEQVREENLPDENEEQKQSNQKQENTEVEEHLVMAGNPDQQEDNVDEQYQEEAEEEVQEDLTEEKKRELEHNAEETYGENDENTDDKNNDGEEQEVRDDNRPKGREEHYEEEEEEEEDGAAVAEKSHRRAEM

SEQ ID NO: 48111 - protein, 298 aa, Homo sapiens
MTSLTQRSSGLVQRRTEASRNAADKERAAGGGAGSSEDDAQSRRDEQDDDDKGDSKETRLTLMEEVLLLGLKDREGYTSFWNDCISSGLRGCMLIELALRGRLQLEACGMRRKSLLTRKVICKSDAPTGDVLLDEALKHVKETQPPETVQNWIELLSGETWNPLKLHYQLRNVRERLAKNLVEKGVLTTEKQNFLLFDMTTHPLTNNNIKQRLIKKVQEAVLDKWVNDPHRMDRRLLALIYLAHASDVLENAFAPLLDEQYDLATKRVRQLLDLDPEVECLKANTNEVLWAVVAAFTK

SEQ ID NO: 48112 - protein, 281 aa, Homo sapiens
MTSLTQRSSGLVQRRTEASRNAADSRRDEQDDDDKGDSKETRLTLMEEVLLLGLKDREGYTSFWNDCISSGLRGCMLIELALRGRLQLEACGMRRKSLLTRKVICKSDAPTGDVLLDEALKHVKETQPPETVQNWIELLSGETWNPLKLHYQLRNVRERLAKNLVEKGVLTTEKQNFLLFDMTTHPLTNNNIKQRLIKKVQEAVLDKWVNDPHRMDRRLLALIYLAHASDVLENAFAPLLDEQYDLATKRVRQLLDLDPEVECLKANTNEVLWAVVAAFTK

SEQ ID NO: 48113 - protein, 285 aa, Homo sapiens
MTTLTHRARRTEISKNSEKKMESEEDSNWEKSPDNEDSGDSKDIRLTLMEEVLLLGLKDKEGYTSFWNDCISSGLRGGILIELAMRGRIYLEPPTMRKKRLLDRKVLLKSDSPTGDVLLDETLKHIKATEPTETVQTWIELLTGETWNPFKLQYQLRNVRERIAKNLVEKGILTTEKQNFLLFDMTTHPVTNTTEKQRLVKKLQDSVLERWVNDPQRMDKRTLALLVLAHSSDVLENVFSSLTDDKYDVAMNRAKDLVELDPEVEGTKPSATEMIWAVLAAFNKS

SEQ ID NO: 48114 - protein, 307 aa, Homo sapiens
MTTLTHRARRTEISKNSEKKMESEEDSNWEKSPDNEDSGDSKDIRLTLMEEVLLLGLKDKEANINSWITRWLTPVIPALWGAEGYTSFWNDCISSGLRGGILIELAMRGRIYLEPPTMRKKRLLDRKVLLKSDSPTGDVLLDETLKHIKATEPTETVQTWIELLTGETWNPFKLQYQLRNVRERIAKNLVEKGILTTEKQNFLLFDMTTHPVTNTTEKQRLVKKLQDSVLERWVNDPQRMDKRTLALLVLAHSSDVLENVFSSLTDDKYDVAMNRAKDLVELDPEVEGTKPSATEMIWAVLAAFNKS

SEQ ID NO: 48115 - protein, 269 aa, Homo sapiens
MTTLTHRARRTEISKNSEKKMESEEDSNWEKSPDNEDSGDSKDIRLTLMEEVLLLGLKDKEANINSWITRWLTPVIPALWGAEGYTSFWNDCISSGLRGGILIELAMRGRIYLEPPTMRKKRLLDRKVLLKSDSPTGDVLLDETLKHIKATEPTETVQTWIELLTGETWNPFKLQYQLRNVRERIAKNLVEKGILTTEKQNFLLFDMTTHPVTNTTEKQRLVKKLQDSVLERWVNDPQRMDKRTLALLVLAHSSDVLENVFSSLTDDKY

SEQ ID NO: 48116 - protein, 241 aa, Homo sapiens
MTTLTHRARRTEISKNSEKKMESEEDSNWEKSPDNEDSGDSKDIRLTLMEEVLLLGLKDKEVLLKSDSPTGDVLLDETLKHIKATEPTETVQTWIELLTGETWNPFKLQYQLRNVRERIAKNLVEKGILTTEKQNFLLFDMTTHPVTNTTEKQRLVKKLQDSVLERWVNDPQRMDKRTLALLVLAHSSDVLENVFSSLTDDKYDVAMNRAKDLVELDPEVEGTKPSATEMIWAVLAAFNKS

SEQ ID NO: 48117 - protein, 440 aa, Homo sapiens
MGLGVSAEQPAGGAEGFHLHGVQENSPAQQAGLEPYFDFIITIGHSRLNKENDTLKALLKANVEKPVKLEVFNMKTMRVREVEVVPSNMWGGQGLLGASVRFCSFRRASEQVWHVLDVEPSSPAALAGLRPYTDYVVGSDQILQESEDFFTLIESHEGKPLKLMVYNSKSDSCREVTVTPNAAWGGEGSLGCGIGYGYLHRIPTQPPSYHKKPPGTPPPSALPLGAPPPDALPPGPTPEDSPSLETGSRQSDYMEALLQAPGSSMEDPLPGPGSPSHSAPDPDGLPHFMETPLQPPPPVQRVMDPGFLDVSGISLLDNSNASVWPSLPSSTELTTTAVSTSGPEDICSSSSSHERGGEATWSGSEFEVSFLDSPGAQAQADHLPQLTLPDSLTSAASPEDGLSAELLEAQAEEEPASTEGLDTGTEAEGLDSQAQISTTE

SEQ ID NO: 48118 - protein, 250 aa, Homo sapiens
MAAGTSSYWEDLRKQARQLENELDLKLVSFSKLCTSYSHSSTRDGRRDRYSSDTTPLLNGSSQDRMFETMAIEIEQLLARLTGVNDKMAEYTNSAGVPSLNAALMHTLQRHRDILQDYTHEFHKTKANFMAIRERENLMGSVRKDIESYKSGSGVNNRRTELFLKEHDHLRNSDRLIEETISIAMATKENMTSQRGMLKSIHSKMNTLANRFPAVNSLIQRINLRKRRDSLILGGVIGICTILLLLYAFH

SEQ ID NO: 48119 - protein, 185 aa, Homo sapiens
MFETMAIEIEQLLARLTGVNDKMAEYTNSAGVPSLNAALMHTLQRHRDILQDYTHEFHKTKANFMAIRERENLMGSVRKDIESYKSGSGVNNRRTELFLKEHDHLRNSDRLIEETISIAMATKENMTSQRGMLKSIHSKMNTLANRFPAVNSLIQRINLRKRRDSLILGGVIGICTILLLLYAFH

SEQ ID NO: 48120 - protein, 174 aa, Homo sapiens
MAAGTSSYWEDLRKQARQLENELDLKLVSFSKLCTSYSHSSTRDGRRDSSDTTPLLNGSSQDRMFETMAIEIEQLLARLTGVNDKMAEYTNSAGVPSLNAALMHTLQRHRDILQDYTHEFHKTKANFMAIRERENLMGSVRKDIESYKSGSGVNNRRTELFLKEHDHLRKGFQW

SEQ ID NO: 48121 - protein, 248 aa, Homo sapiens
MAAGTSSYWEDLRKQARQLENELDLKLVSFSKLCTSYSHSSTRDGRRDSSDTTPLLNGSSQDRMFETMAIEIEQLLARLTGVNDKMAEYTNSAGVPSLNAALMHTLQRHRDILQDYTHEFHKTKANFMAIRERENLMGSVRKDIESYKSGSGVNNRRTELFLKEHDHLRNSDRLIEETISIAMATKENMTSQRGMLKSIHSKMNTLANRFPAVNSLIQRINLRKRRDSLILGGVIGICTILLLLYAFH

SEQ ID NO: 48122 - protein, 175 aa, Homo sapiens
MAAGTSSYWEDLRKQARQLENELDLKLVSFSKLCTSYSHSSTRDGRRDRYSSDTTPLLNGSSQDRMFETMAIEIEQLLARLTGVNDKMAEYTNSAGVPSLNAALMHTLQRHRDILQVIYWARDVFIITGVWVFFFNPCIGYVHIYLKGQREKSEKINAMLKGLVLLFFGVTIIKF

SEQ ID NO: 48123 - protein, 185 aa, Homo sapiens; identical to SEQ ID NO: 48119

SEQ ID NO: 48124 - protein, 213 aa, Homo sapiens
MDPLFQQTHKQVHEIQSCMGRLETADKQSVHIVENEIQASIDQIFSRLERLEILSSKEPPNKRQNARLRVDQLKYDVQHLQTALRNFQHRRHAREQQERQREELLSRTFTTNDSDTTIPMDESLQFNSSLQKVHNGMDDLILDGHNILDGLRTQRLTLKGTQKKILDIANMLGLSNTVMRLIEKRAFQDKYFMIGTQGSCQTAHFGGRSAGSS

SEQ ID NO: 48125 - protein, 212 aa, Homo sapiens
MDPLFQQTHKQVHEIQSCMGRLETADKQSVHIVENEIQASIDQIFSRLERLEILSSKEPPNKRQNARLRVDQLKYDVQHLQTALRNFQHRRHAREQQERQREELLSRTFTTNDSDTTIPMDESLQFNSSLQKVHNGMDDLILDGHNILDGLRTQRLTLKGTQKKILDIANMLGLSNTVMRLIEKRAFQDKYFMIGGMLLTCVVMFLVVQYLT

SEQ ID NO: 48126 - protein, 195 aa, Homo sapiens
MDPLFQQTHKQVHEIQSCMGRLETADKQSVHIVENEIQASIDQIFSRLERLEILSSKEPPNKRQNARLRVDQLKYDVQHLQTALRNFQHRRHAREQQERQREELLSRTFTTNDSDTTIPMDESLQFNSSLQKVHNGMDDLILDGHNILDGLRTQRLTLKVGSLLGDREKASCFSLIQQFSNCVYILITCPQIVIF

SEQ ID NO: 48127 - protein, 232 aa, Homo sapiens
MDPLFQQTHKQVHEIQSCMGRLETADKQSVHIVENEIQASIDQIFSRLERLEILSSKEPPNKRQNARLRVDQLKYDVQHLQTALRNFQHRRHAREQQERQREELLSRTFTTNDSDTTIPMDESLQFNSSLQKVHNGMDDLILDGHNILDGLRTQRLTLKGTQKKILDIANMLGLSNTVMRLIEKRAFQDKYFMIETRSHHVAQNGPELLSSRDPPASASRSAGIIEFSEKIT

SEQ ID NO: 48128 - protein, 327 aa, Homo sapiens
MAAAAAMAEQESARNGGRNRGGVQRVEGKLRASVEKGDYYEAHQMYRTLFFRYMSQSKHTEARELMYSGALLFFSHGQQNSAADLSMLVLESLEKAEVEVADELLENLAKVFSLMDPNSPERVTFVSRALKWSSGGSGKLGHPRLHQLLALTLWKEQNYCESRYHFLHSADGEGCANMLVEYSTSRGFRSEVDMFVAQAVLQFLCLKNKSSASVVFTTYTQKHPSIEDGPPFVEPLLNFIWFLLLAVDGGKLTVFTVLCEQYQPSLRRDPMYNEYLDRIGQLFFGVPPKQTSSYGGLLGNLLTSLMGSSEQEDGEESPSDGSPIELD

SEQ ID NO: 48129 - protein, 592 aa, Homo sapiens
MALPEEAKIKDAYHMLKRQGIVQSDPPIPVDRTLIPSPPPRPKNPVFDDEEKSKLLAKLLKSKNPDDLQEANKLIKSMVKEDEARIQKVTKRLHTLEEVNNNVRLLSEMLLHYSQEDSSDGDRELMKELFDQCENKRRTLFKLASETEDNDNSLGDILQASDNLSRVINSYKTIIEGQVINGEVATLTLPDSEGNSQCSNQGTLIDLAELDTTNSLSSVLAPAPTPPSSGIPILPPPPQASGPPRSRSSSQAEATLGPSSTSNALSWLDEELLCLGLADPAPNVPPKESAGNSQWHLLQREQSDLDFFSPRPGTAACGASDAPLLQPSAPSSSSSQAPLPPPFPAPVVPASVPAPSAGSSLFSTGVAPALAPKVEPAVPGHHGLALGNSALHHLDALDQLLEEAKVTSGLVKPTTSPLIPTTTPARPLLPFSTGPGSPLFQPLSFQSQGSPPKGPELSLASIHVPLESIKPSSALPVTAYDKNGFRILFHFAKECPPGRPDVLVVVVSMLNTAPLPVKSIVLQAAVPKSMKVKLQPPSGTELSPFSPIQPPAAITQVMLLANPLKKQVLSFLGKACLQPWGQAILLTTSCLA

SEQ ID NO: 48130 - protein, 651 aa, Homo sapiens
MKNCGRRFHNEVGKFRFLNELIKVVSPKYLGDRVSEKVKTKVIELLYSWTMALPEEAKIKDAYHMLKRQGIVQSDPPIPVDRTLIPSPPPRPKNPVFDDEEKSKLLAKLLKSKNPDDLQEANKLIKSMVKEDEARIQKVTKRLHTLEEVNNNVRLLSEMLLHYSQEDSSDGDRELMKELFDQCENKRRTLFKLASETEDNDNSLGDILQASDNLSRVINSYKTIIEGQVINGEVATLTLPDSEGNSQCSNQGTLIDLAELDTTNSLSSVLAPAPTPPSSGIPILPPPPQASGPPRSRSSSQAEATLGPSSTSNALSWLDEELLCLGLADPAPNVPPKESAGNSQWHLLQREQSDLDFFSPRPGTAACGASDAPLLQPSAPSSSSSQAPLPPPFPAPVVPASVPAPSAGSSLFSTGVAPALAPKVEPAVPGHHGLALGNSALHHLDALDQLLEEAKVTSGLVKPTTSPLIPTTTPARPLLPFSTGPGSPLFQPLSFQSQGSPPKGPELSLASIHVPLESIKPSSALPVTAYDKNGFRILFHFAKECPPGRPDVLVVVVSMLNTAPLPVKSIVLQAAVPKSMKVKLQPPSGTELSPFSPIQPPAAITQVMLLANPLKEKVRLRYKLTFALGEQLSTEVGEVDQFPPVEQWGNL

SEQ ID NO: 48131 - protein, 454 aa, Homo sapiens
MSAGGPCPAAAGGGPGGASCSVGAPGGVSMFRWLEVLEKEFDKAFVDVDLLLGEIDPDQADITYEGRQKMTSLSSCFAQLCHKAQSVSQINHKLEAQLVDLKSELTETQAEKVVLEKEVHDQLLQLHSIQLQLHAKTGQSADSGTIKAKLERELEANKKEKMKEAQLEAEVKLLRKENEALRRHIAVLQAEVYGARLAAKYLDKELAGRVQQIQLLGRDMKGPAHDKLWNQLEAEIHLHRHKTVIRACRGRNDLKRPMQAPPGHDQDSLKKSQGVGPIRKVLLLKEDHEGLGISITGGKEHGVPILISEIHPGQPADRCGGLHVGDAILAVNGVNLRDTKHKEAVTILSQQRGEIEFEVVYVAPEVDSDDENVEYEDESGHRYRLYLDELEGGGNPGASCKDTSGEIKVLQGFNKKAVTDTHENGDLGTASETPLDDGASKLDDLHTLYHKKSY

SEQ ID NO: 48132 - protein, 462 aa, Homo sapiens
MSAGGPCPAAAGGGPGGASCSVGAPGGVSMFRWLEVLEKEFDKAFVDVDLLLGEIDPDQADITYEGRQKMTSLSSCFAQLCHKAQSVSQINHKLEAQLVDLKSELTETQAEKVVLEKEVHDQLLQLHSIQLQLHAKTGQSADSGTIKAKLSGPSVEELERELEANKKEKMKEAQLEAEVKLLRKENEALRRHIAVLQAEVYGARLAAKYLDKELAGRVQQIQLLGRDMKGPAHDKLWNQLEAEIHLHRHKTVIRACRGRNDLKRPMQAPPGHDQDSLKKSQGVGPIRKVLLLKEDHEGLGISITGGKEHGVPILISEIHPGQPADRCGGLHVGDAILAVNGVNLRDTKHKEAVTILSQQRGEIEFEVVYVAPEVDSDDENVEYEDESGHRYRLYLDELEGGGNPGASCKDTSGEIKVLQGFNKKAVTDTHENGDLGTASETPLDDGASKLDDLHTLYHKKSY

SEQ ID NO: 48133 - protein, 462 aa, Homo sapiens
MSAGGPCPAAAGGGPGGASCSVGAPGGVSMFRWLEVLEKEFDKAFVDVDLLLGEIDPDQADITYEGRQKMTSLSSCFAQLCHKAQSVSQINHKLEAQLVDLKSELTETQAEKVVLEKEVHDQLLQLHSIQLQLHAKTGQSADSGTIKAKLVSRSSSKMERELEANKKEKMKEAQLEAEVKLLRKENEALRRHIAVLQAEVYGARLAAKYLDKELAGRVQQIQLLGRDMKGPAHDKLWNQLEAEIHLHRHKTVIRACRGRNDLKRPMQAPPGHDQDSLKKSQGVGPIRKVLLLKEDHEGLGISITGGKEHGVPILISEIHPGQPADRCGGLHVGDAILAVNGVNLRDTKHKEAVTILSQQRGEIEFEVVYVAPEVDSDDENVEYEDESGHRYRLYLDELEGGGNPGASCKDTSGEIKVLQGFNKKAVTDTHENGDLGTASETPLDDGASKLDDLHTLYHKKSY

SEQ ID NO: 48134 - protein, 552 aa, Homo sapiens
MEPAMEPETLEARINRATNPLNKELDWASINGFCEQLNEDFEGPPLATRLLAHKIQSPQEWEAIQALTVLETCMKSCGKRFHDEVGKFRFLNELIKVVSPKYLGSRTSEKVKNKILELLYSWTVGLPEEVKIAEAYQMLKKQGIVKSDPKLPDDTTFPLPPPRPKNVIFEDEEKSKMLARLLKSSHPEDLRAANKLIKEMVQEDQKRMEKISKRVNAIEEVNNNVKLLTEMVMSHSQGGAAAGSSEDLMKELYQRCERMRPTLFRLASDTEDNDEALGLSDPTPPSGPSLDGTGWNSFQSSDATEPPAPALAQAPSMESRPPAQTSLPASSGLDDLDLLGKTLLQQSLPPESQQVRWEKQQPTPRLTLRDLQNKSSSCSSPSSSATSLLHTVSPEPPRPPQQPVPTELSLASITVPLESIKPSNILPVTVYDQHGFRILFHFARDPLPGRSDVLVVVVSMLSTAPQPIRNIVFQSAVPKVMKVKLQPPSGTELPAFNPIVHPSAITQVLLLANPQKEKVRLRYKLTFTMGDQTYNEMGDVDQFPPPETWGSL

SEQ ID NO: 48135 - protein, 38 aa, Homo sapiens
MKSCGKRFHDEVGKFRFLNELIKVVSPKYLGSRTSEKV

SEQ ID NO: 48136 - protein, 606 aa, Homo sapiens
MEPAMEPETLEARINRATNPLNKELDWASINGFCEQLNEDFEGPPLATRLLAHKIQSPQEWEAIQALTYLGSRTSEKVKNKILELLYSWTVGLPEEVKIAEAYQMLKKQGIVKSDPKLPDDTTFPLPPPRPKNVIFEDEEKSKMLARLLKSSHPEDLRAANKLIKEMVQEDQKRMEKISKRVNAIEEVNNNVKLLTEMVMSHSQGGAAAGSSEDLMKELYQRCERMRPTLFRLASDTEDNDEALAEILQANDNLTQVINLYKQLVRGEEVNGDATAGSIPGSTSALLDLSGLDLPPAGTTYPAMPTRPGEQASPEQPSASVSLLDDELMSLGLSDPTPPSGPSLDGTGWNSFQSSDATEPPAPALAQAPSMESRPPAQTSLPASSGLDDLDLLGKTLLQQSLPPESQQVRWEKQQPTPRLTLRDLQNKSSSCSSPSSSATSLLHTVSPEPPRPPQQPVPTELSLASITVPLESIKPSNILPVTVYDQHGFRILFHFARDPLPGRSDVLVVVVSMLSTAPQPIRNIVFQSAVPKVMKVKLQPPSGTELPAFNPIVHPSAITQVLLLANPQKEKVRLRYKLTFTMGDQTYNEMGDVDQFPPPETWGSL

SEQ ID NO: 48137 - protein, 639 aa, Homo sapiens
MEPAMEPETLEARINRATNPLNKELDWASINGFCEQLNEDFEGPPLATRLLAHKIQSPQEWEAIQALTVLETCMKSCGKRFHDEVGKFRFLNELIKVVSPKYLGSRTSEKVKNKILELLYSWTVGLPEEVKIAEAYQMLKKQGIVKSDPKLPDDTTFPLPPPRPKNVIFEDEEKSKMLARLLKSSHPEDLRAANKLIKEMVQEDQKRMEKISKRVNAIEEVNNNVKLLTEMVMSHSQGGAAAGSSEDLMKELYQRCERMRPTLFRLASDTEDNDEALAEILQANDNLTQVINLYKQLVRGEEVNGDATAGSIPGSTSALLDLSGLDLPPAGTTYPAMPTRPGEQASPEQPSASVSLLDDELMSLGLSDPTPPSGPSLDGTGWNSFQSSDATEPPAPALAQAPSMESRPPAQTSLPASSGLDDLDLLGKTLLQQSLPPESQQVRWEKQQPTPRLTLRDLQNKSSSCSSPSSSATSLLHTVSPEPPRPPQQPVPTELSLASITVPLESIKPSNILPVTVYDQHGFRILFHFARDPLPGRSDVLVVVVSMLSTAPQPIRNIVFQSAVPKVMKVKLQPPSGTELPAFNPIVHPSAITQVLLLANPQKEKVRLRYKLTFTMGDQTYNEMGDVDQFPPPETWGSL

SEQ ID NO: 48138 - protein, 656 aa, Homo sapiens
MEPAMEPETLEARINRATNPLNKELDWASINGFCEQLNEDFEGPPLATRLLAHKIQSPQEWEAIQALTVRRGEATIRPPPCDDTKVLETCMKSCGKRFHDEVGKFRFLNELIKVVSPKYLGSRTSEKVKNKILELLYSWTVGLPEEVKIAEAYQMLKKQGIVKSDPKLPDDTTFPLPPPRPKNVIFEDEEKSKMLARLLKSSHPEDLRAANKLIKEMVQEDQKRMEKISKRVNAIEEVNNNVKLLTEMVMSHSQGGAAAGSSEDLMKELYQRCERMRPTLFRLASDTEDNDEALAEILQANDNLTQVINLYKQLVRGEEVNGDATAGSIPGSTSALLDLSGLDLPPAGTTYPAMPTRPGEQASPEQPSASVSLLDDELMSLGLSDPTPPSGPSLDGTGWNSFQSSDATEPPAPALAQAPSMESRPPAQTSLPASSGLDDLDLLGKTLLQQSLPPESQQVRWEKQQPTPRLTLRDLQNKSSSCSSPSSSATSLLHTVSPEPPRPPQQPVPTELSLASITVPLESIKPSNILPVTVYDQHGFRILFHFARDPLPGRSDVLVVVVSMLSTAPQPIRNIVFQSAVPKVMKVKLQPPSGTELPAFNPIVHPSAITQVLLLANPQKEKVRLRYKLTFTMGDQTYNEMGDVDQFPPPETWGSL

SEQ ID NO: 48139 - protein, 566 aa, Homo sapiens
MKSCGKRFHDEVGKFRFLNELIKVVSPKYLGSRTSEKVKNKILELLYSWTVGLPEEVKIAEAYQMLKKQGIVKSDPKLPDDTTFPLPPPRPKNVIFEDEEKSKMLARLLKSSHPEDLRAANKLIKEMVQEDQKRMEKISKRVNAIEEVNNNVKLLTEMVMSHSQGGAAAGSSEDLMKELYQRCERMRPTLFRLASDTEDNDEALAEILQANDNLTQVINLYKQLVRGEEVNGDATAGSIPGSTSALLDLSGLDLPPAGTTYPAMPTRPGEQASPEQPSASVSLLDDELMSLGLSDPTPPSGPSLDGTGWNSFQSSDATEPPAPALAQAPSMESRPPAQTSLPASSGLDDLDLLGKTLLQQSLPPESQQVRWEKQQPTPRLTLRDLQNKSSSCSSPSSSATSLLHTVSPEPPRPPQQPVPTELSLASITVPLESIKPSNILPVTVYDQHGFRILFHFARDPLPGRSDVLVVVVSMLSTAPQPIRNIVFQSAVPKVMKVKLQPPSGTELPAFNPIVHPSAITQVLLLANPQKEKVRLRYKLTFTMGDQTYNEMGDVDQFPPPETWGSL

SEQ ID NO: 48140 - protein, 40 aa, Homo sapiens
MKSCGKRFHDEVGKFRFLNELIKVVSPKYLGSRTSEKVKN

SEQ ID NO: 48141 - protein, 109 aa, Homo sapiens
MKSCGKRFHDEVGKFRFLNELIKVVSPKYLGSRTSEKVKNKILELLYSWTVGLPEEVKIAEAYQMLKKQGIVKSDPKLPDDTTFPLPPPRPKNVIFEDEEKSKMLARLL

SEQ ID NO: 48142 - protein, 89 aa, Homo sapiens
MEPAMEPETLEARINRATNPLNKELDWASINGFCEQLNEDFEGPPLATRLLAHKIQSPQEWEAIQALTVRRGEATIRPPPCDDTKGGQD

SEQ ID NO: 48143 - protein, 109 aa, Homo sapiens; identical to SEQ ID NO: 48141

SEQ ID NO: 48144 - protein, 108 aa, Homo sapiens
MKSCGKRFHDEVGKFRFLNELIKVVSPKYLGSRTSEKVKNKILELLYSWTVGLPEEVKIAEAYQMLKKQGIVKSDPKLPDDTTFPLPPPRPKNVIFEDEEKSKMLARL

SEQ ID NO: 48145 - protein, 18 aa, Homo sapiens
MKSCGKRFHDEVGKFRFL

SEQ ID NO: 48146 - protein, 60 aa, Homo sapiens
MKSCGKRFHDEVGKFRFLNELIKVVSPKYLGSRTSEKVKNKILELLYSWTVGLPEEVKIA

SEQ ID NO: 48147 - protein, 28 aa, Homo sapiens
MKSCGKRFHDEVGKFRFLNELIKVVSPK

SEQ ID NO: 48148 - protein, 246 aa, Homo sapiens
MTPGTANRATNPLNKELDWASINGFCEQLNEDFEGPPLATRLLAHKIQSPQEWEAIQALTVLETCMKSCGKRFHDEVGKFRFLNELIKVVSPKYLGSRTSEKVKNKILELLYSWTVGLPEEVKIAEAYQMLKKQGIVKSDPKLPDDTTFPLPPPRPKNVIFEDEEKSKMLARLLKSSHPEDLRAANKLIKEMVQEDQKRMEKISKRVNAIEEVNNNVKLLTEMVMSHSQGGAAAGSSEDLMKELYQ

SEQ ID NO: 48149 - protein, 70 aa, Homo sapiens
MKSCGKRFHDEVGKFRFLNELIKVVSPKYLGSRTSEKVKNKILELLYSWTVGLPEEVKIAEAYQMLKKQG

SEQ ID NO: 48150 - protein, 723 aa, Homo sapiens
MAEAEGESLESWLNKATNPSNRQEDWEYIIGFCDQINKELEGPQIAVRLLAHKIQSPQEWEALQALTVLEACMKNCGRRFHNEVGKFRFLNELIKVVSPKYLGDRVSEKVKTKVIELLYSWTMALPEEAKIKDAYHMLKRQGIVQSDPPIPVDRTLIPSPPPRPKNPVFDDEEKSKLLAKLLKSKNPDDLQEANKLIKSMVKEDEARIQKVTKRLHTLEEVNNNVRLLSEMLLHYSQEDSSDGDRELMKELFDQCENKRRTLFKLASETEDNDNSLGDILQASDNLSRVINSYKTIIEGQVINGEVATLTLPDSEGNSQCSNQGTLIDLAELDTTNSLSSVLAPAPTPPSSGIPILPPPPQASGPPRSRSSSQAEATLGPSSTSNALSWLDEELLCLGLADPAPNVPPKESAGNSQWHLLQREQSDLDFFSPRPGTAACGASDAPLLQPSAPSSSSSQAPLPPPFPAPVVPASVPAPSAGSSLFSTGVAPALAPKVEPAVPGHHGLALGNSALHHLDALDQLLEEAKVTSGLVKPTTSPLIPTTTPARPLLPFSTGPGSPLFQPLSFQSQGSPPKGPELSLASIHVPLESIKPSSALPVTAYDKNGFRILFHFAKECPPGRPDVLVVVVSMLNTAPLPVKSIVLQAAVPKSMKVKLQPPSGTELSPFSPIQPPAAITQVMLLANPLKEKVRLRYKLTFALGEQLSTEVGEVDQFPPVEQWGNL

SEQ ID NO: 48151 - protein, 690 aa, Homo sapiens
MAEAEGESLESWLNKATNPSNRQEDWEYIIGFCDQINKELEGPQIAVRLLAHKIQSPQEWEALQALTYLGDRVSEKVKTKVIELLYSWTMALPEEAKIKDAYHMLKRQGIVQSDPPIPVDRTLIPSPPPRPKNPVFDDEEKSKLLAKLLKSKNPDDLQEANKLIKSMVKEDEARIQKVTKRLHTLEEVNNNVRLLSEMLLHYSQEDSSDGDRELMKELFDQCENKRRTLFKLASETEDNDNSLGDILQASDNLSRVINSYKTIIEGQVINGEVATLTLPDSEGNSQCSNQGTLIDLAELDTTNSLSSVLAPAPTPPSSGIPILPPPPQASGPPRSRSSSQAEATLGPSSTSNALSWLDEELLCLGLADPAPNVPPKESAGNSQWHLLQREQSDLDFFSPRPGTAACGASDAPLLQPSAPSSSSSQAPLPPPFPAPVVPASVPAPSAGSSLFSTGVAPALAPKVEPAVPGHHGLALGNSALHHLDALDQLLEEAKVTSGLVKPTTSPLIPTTTPARPLLPFSTGPGSPLFQPLSFQSQGSPPKGPELSLASIHVPLESIKPSSALPVTAYDKNGFRILFHFAKECPPGRPDVLVVVVSMLNTAPLPVKSIVLQAAVPKSMKVKLQPPSGTELSPFSPIQPPAAITQVMLLANPLKEKVRLRYKLTFALGEQLSTEVGEVDQFPPVEQWGNL

SEQ ID NO: 48152 - protein, 651 aa, Homo sapiens; identical to SEQ ID NO: 48130

SEQ ID NO: 48153 - protein, 153 aa, Homo sapiens
MAEAEGESLESWLNKATNPSNRQEDWEYIIGFCDQINKELEGPQIAVRLLAHKIQSPQEWEALQALTVLEACMKNCGRRFHNEVGKFRFLNELIKVVSPKYLGDRVSEKVKTKVIELLYSWTMALPEEAKIKDAYHMLKRQAFSQAAEKQKPR

SEQ ID NO: 48154 - protein, 601 aa, Homo sapiens
MALPEEAKIKDAYHMLKRQGIVQSDPPIPVDRTLIPSPPPRPKNPVFDDEEKSKLLAKLLKSKNPDDLQEANKLIKSMVKEDEARIQKVTKRLHTLEEVNNNVRLLSEMLLHYSQEDSSDGDRELMKELFDQCENKRRTLFKLASETEDNDNSLGDILQASDNLSRVINSYKTIIEGQVINGEVATLTLPDSEGNSQCSNQGTLIDLAELDTTNSLSSVLAPAPTPPSSGIPILPPPPQASGPPRSRSSSQAEATLGPSSTSNALSWLDEELLCLGLADPAPNVPPKESAGNSQWHLLQREQSDLDFFSPRPGTAACGASDAPLLQPSAPSSSSSQAPLPPPFPAPVVPASVPAPSAGSSLFSTGVAPALAPKVEPAVPGHHGLALGNSALHHLDALDQLLEEAKVTSGLVKPTTSPLIPTTTPARPLLPFSTGPGSPLFQPLSFQSQGSPPKGPELSLASIHVPLESIKPSSALPVTAYDKNGFRILFHFAKECPPGRPDVLVVVVSMLNTAPLPVKSIVLQAAVPKSMKVKLQPPSGTELSPFSPIQPPAAITQVMLLANPLKEKVRLRYKLTFALGEQLSTEVGEVDQFPPVEQWGNL

SEQ ID NO: 48155 - protein, 1498 aa, Homo sapiens
MDGASAEQDGLQEDRSHSGPSSLPEAPLKPPGPLVPPDQQDKVQCAEVNRASTEGESPDGPGQGGLCQNGPTPPFPDPPSSLDPTTSPVGPDASPGVAGFHDNLRKSQGTSAEGSVRKEALQSLRLSLPMQETQLCSTDSPLPLEKEEQVRLQARKWLEEQLKQYRVKRQQERSSQPATKTRLFSTLDPELMLNPENLPRASTLAMTKEYSFLRTSVPRGPKVGSLGLPAHPREKKTSKSSKIRSLADYRTEDSNAGNSGGNVPAPDSTKGSLKQNRSSAASVVSEISLSPDTDDRLENTSLAGDSVSEVDGNDSDSSSYSSASTRGTYGILSKTVGTQDTPYMVNGQEIPADTLGQFPSIKDVLQAAAAEHQDQGQEVNGEVRSRRDSICSSVSLESSAAETQEEMLQVLKEKMRLEGQLEALSLEASQALKEKAELQAQLAALSTKLQAQVECSHSSQQRQDSLSSEVDTLKQSCWDLERAMTDLQNMLEAKNASLASSNNDLQVAEEQYQRLMAKVEDMQRSMLSKDNTVHDLRQQMTALQSQLQQVQLERTTLTSKLKASQAEISSLQSVRQWYQQQLALAQEARVRLQGEMAHIQVGQMTQAGLLEHLKLENVSLSQQLTETQHRSMKEKGRIAAQLQGIEADMLDQEAAFMQIQEAKTMVEEDLQRRLEEFEGERERLQRMADSAASLEQQLEQVKLTLLQRDQQLEALQQEHLDLMKQLTLTQEALQSREQSLDALQTHYDELQARLGELQGEAASREDTICLLQNEKIILEAALQAAKSGKEELDRGARRLEEGTEETSETLEKLREELAIKSGQVEHLQQETAALKKQMQKIKEQFLQQKVMVEAYRRDATSKDQLISELKATRKRLDSELKELRQELMQVHGEKRTAEAELSRLHREVAQVRQHMADLEGHLQSAQKERDEMETHLQSLQFDKEQMVAVTEANEALKKQIEELQQEARKAITEQKQKMRRLGSDLTSAQKEMKTKHKAYENAVGILSRRLQEALAAKEAADAELGQLRAQGGSSDSSLALHERIQALEAELQAVSHSKTLLEKELQEVIALTSQELEESREKVLELEDELQESRGFRKKIKRLEESNKKLALELEHEKGKLTGLGQSNAALREHNSILETALAKREADLVQLNLQVQAVLQRKEEEDRQMKHLVQALQASLEKEKEKVNSLKEQVAAAKVEAGHNRRHFKAASLELSEVKKELQAKEHLVQKLQAEADDLQIREGKHSQEIAQFQAELAEARAQLQLLQKQLDEQLSKQPVGNQEMENLKWEVDQKEREIQSLKQQLDLTEQQGRKELEGLQQLLQNVKSELEMAQEDLSMTQKDKFMLQAKVSELKNNMKTLLQQNQQLKLDLRRGAAKTRKEPKGEASSSNPATPIKIPDCPVPASLLEELLRPPPAVSKEPLKNLNSCLQQLKQEMDSLQRQMEEHALTVHESLSSWTPLEPATASPVPPGGHAGPRGDPQRHSQSRASKEGPGE

SEQ ID NO: 48156 - protein, 1498 aa, Homo sapiens; identical to SEQ ID NO: 48155

SEQ ID NO: 48157 - protein, 1390 aa, Homo sapiens
MDGASAEQDGLQEDRSHSGPSSLPEAPLKPPGPLVPPDQQDKVQCAEVNRASTEGESPDGPGQGGLCQNGPTPPFPDPPSSLDPTTSPVGPDASPGVAGFHDNLRKSQGTSAEGSVRKEALQSLRLSLPMQETQLCSTDSPLPLEKEEQVRLQARKWLEEQLKQYRVKRQQERSSQPATKTRLFSTLDPELMLNPENLPRASTLAMTKEYSFLRTSVPRGPKVGSLGLPAHPREKKTSKSSKIRSLADYRTEDSNAGNSGGNVPAPDSTKGSLKQNRSSAASVVSEISLSPDTDDRLENTSLAGDSVSEVDGNDSDSSSYSSASTRGTYGILSKTVGTQDTPYMVNGQEIPADTLGQFPSIKDVLQAAAAEHQDQGQEVNGEVRSRRDSICSSVSLESSAAETQEEMLQVLKEKMRLEGQLEALSLEASQALKEKAELQAQLAALSTKLQAQVECSHSSQQRQDSLSSEVDTLKQSCWDLERAMTDLQNMLEAKNASLASSNNDLQVAEEQYQRLMAKVEDMQRSMLSKDNTVHDLRQQMTALQSQLQQVQLERTTLTSKLKASQAEISSLQSVRQWYQQQLALAQEARVRLQGEMAHIQVGQMTQAGLLEHLKLENVSLSQQLTETQHRSMKEKGRIAAQLQGIEADMLDQEAAFMQIQEAKTMVEEDLQRRLEEFEGERERLQRMADSAASLEQQLEQVKLTLLQRDQQLEALQQEHLDLMKQLTLTQEALQSREQSLDALQTHYDELQARLGELQGEAASREDTICLLQNEKIILEAALQAAKSGKEELDRGARRLEEGTEETSETLEKLREELAIKSGQVEHLQQETAALKKQMQKIKEQFLQQKVMVEAYRRDATSKDQLISELKATRKRLDSELKELRQELMQVHGEKRTAEAELSRLHREVAQVRQHMADLEGHLQSAQKERDEMETHLQSLQFDKEQMVAVTEANEALKKQIEELQQEARKAITEQKQKMRRLGSDLTSAQKEMKTKHKAYENAVGILSRRLQEALAAKEAADAELGQLRAQGGSSDSSLALHERIQALEAELQAVSHSKTLLEKELQEVIALTSQELEESREKVLELEDELQESRGFRKKIKRLEESNKKLALELEHEKGKLTGLGQSNAALREHNSILETALAKREADLVQLNLQVQAVLQRKEEEDRQMKHLVQALQASLEKEKEKVNSLKEQVAAAKVEAGHNRRHFKAASLELSEVKKELQAKEHLVQKLQAEADDLQIREGKHSQEIAQFQAELAEARAQLQLLQKQLDEQLSKQPVGNQEMENLKWEVDQKEREIQSLKQQLDLTEQQGRKELEGLQQLLQNVKSELEMAQEDLSMTQKDKFMLQAKVSELKNNMKTLLQQNQQLKLDLRRGAAKTVLRPASLPG

SEQ ID NO: 48158 - protein, 1134 aa, Homo sapiens
MDGASAEQDGLQEDRSHSGPSSLPEAPLKPPGPLVPPDQQDKVQCAEVNRASTEGESPDGPGQGGLCQNGPTPPFPDPPSSLDPTTSPVGPDASPGVAGFHDNLRKSQGTSAEGSVRKEALQSLRLSLPMQETQLCSTDSPLPLEKEEQVRLQARKWLEEQLKQYRVKRQQERSSQPATKTRLFSTLDPELMLNPENLPRASTLAMTKEYSFLRTSVPRGPKVGSLGLPAHPREKKTSKSSKIRSLADYRTEDSNAGNSGGNVPAPDSTKGSLKQNRSSAASVVSEISLSPDTDDRLENTSLAGDSVSEVDGNDSDSSSYSSASTRGTYGILSKTVGTQDTPYMVNGQEIPADTLGQFPSIKDVLQAAAAEHQDQGQEVNGEVRSRRDSICSSVSLESSAAETQEEMLQVLKEKMRLEGQLEALSLEASQALKEKAELQAQLAALSTKLQAQVECSHSSQQRQDSLSSEVDTLKQSCWDLERAMTDLQNMLEAKNASLASSNNDLQVAEEQYQRLMAKVEDMQRSMLSKDNTVHDLRQQMTALQSQLQQVQLERTTLTSKLKASQAEISSLQSVRQWYQQQLALAQEARVRLQGEMAHIQVGQMTQAGLLEHLKLENVSLSQQLTETQHRSMKEKGRIAAQLQGIEADMLDQEAAFMQIQEAKTMVEEDLQRRLEEFEGERERLQRMADSAASLEQQLEQVKLTLLQRDQQLEALQQEHLDLMKQLTLTQEALQSREQSLDALQTHYDELQARLGELQGEAASREDTICLLQNEKIILEAALQAAKSGKEELDRGARRLEEGTEETSETLEKLREELAIKSGQVEHLQQETAALKKQMQKIKEQFLQQKVMVEAYRRDATSKDQLISELKATRKRLDSELKELRQELMQVHGEKRTAEAELSRLHREVAQVRQHMADLEGHLQSAQKERDEMETHLQSLQFDKEQMVAVTEANEALKKQIEELQQEARKAITEQKQKMRRLGSDLTSAQKEMKTKHKAYENAVGILSRRLQEALAAKEAADAELGQLRAQGGSSDSSLALHERIQALEAELQAVSHSKTLLEKELQEVIALTSQELEESREKVLELEDEVRPGHLLWRQRGAGHVSPGHAATRETRRTKLHRVPSVATFGVATF

SEQ ID NO: 48159 - protein, 2230 aa, Homo sapiens
MFKKLKQKISEEQQQLQQALAPAQASSNSSTPTRMRSRTSSFTEQLDEGTPNRESGDTQSFAQKLQLRVPSVESLFRSPIKESLFRSSSKESLVRTSSRESLNRLDLDSSTASFDPPSDMDSEAEDLVGNSDSLNKEQLIQRLRRMERSLSSYRGKYSELVTAYQMLQREKKKLQGILSQSQDKSLRRIAELREELQMDQQAKKHLQEEFDASLEEKDQYISVLQTQVSLLKQRLRNGPMNVDVLKPLPQLEPQAEVFTKEENPESDGEPVVEDGTSVKTLETLQQRVKRQENLLKRCKETIQSHKEQCTLLTSEKEALQEQLDERLQELEKIKDLHMAEKTKLITQLRDAKNLIEQLEQDKGMVIAETKRQMHETLEMKEEEIAQLRSRIKQMTTQGEELREQKEKSERAAFEELEKALSTAQKTEEARRKLKAEMDEQIKTIEKTSEEERISLQQELSRVKQEVVDVMKKSSEEQIAKLQKLHEKELARKEQELTKKLQTREREFQEQMKVALEKSQSEYLKISQEKEQQESLALEELELQKKAILTESENKLRDLQQEAETYRTRILELESSLEKSLQENKNQSKDLAVHLEAEKNKHNKEITVMVEKHKTELESLKHQQDALWTEKLQVLKQQYQTEMEKLREKCEQEKETLLKDKEIIFQAHIEEMNEKTLEKLDVKQTELESLSSELSEVLKARHKLEEELSVLKDQTDKMKQELEAKMDEQKNHHQQQVDSIIKEHEVSIQRTEKALKDQINQLELLLKERDKHLKEHQAHVENLEADIKRSEGELQQASAKLDVFQSYQSATHEQTKAYEEQLAQLQQKLLDLETERILLTKQVAEVEAQKKDVCTELDAHKIQVQDLMQQLEKQNSEMEQKVKSLTQVYESKLEDGNKEQEQTKQILVEKENMILQMREGQKKEIEILTQKLSAKEDSIHILNEEYETKFKNQEKKMEKVKQKAKEMQETLKKKLLDQEAKLKKELENTALELSQKEKQFNAKMLEMAQANSAGISDAVSRLETNQKEQIESLTEVHRRELNDVISIWEKKLNQQAEELQEIHEIQLQEKEQEVAELKQKILLFGCEKEEMNKEITWLKEEGVKQDTTLNELQEQLKQKSAHVNSLAQDETKLKAHLEKLEVDLNKSLKENTFLQEQLVELKMLAEEDKRKVSELTSKLKTTDEEFQSLKSSHEKSNKSLEDKSLEFKKLSEELAIQLDICCKKTEALLEAKTNELINISSSKTNAILSRISHCQHRTTKVKEALLIKTCTVSELEAQLRQLTEEQNTLNISFQQATHQLEEKENQIKSMKADIESLVTEKEALQKEGGNQQQAASEKESCITQLKKELSENINAVTLMKEELKEKKVEISSLSKQLTDLNVQLQNSISLSEKEAAISSLRKQYDEEKCELLDQVQDLSFKVDTLSKEKISALEQVDDWSNKFSEWKKKAQSRFTQHQNTVKELQIQLELKSKEAYEKDEQINLLKEELDQQNKRFDCLKGEMEDDKSKMEKKESNLETELKSQTARIMELEDHITQKTIEIESLNEVLKNYNQQKDIEHKELVQKLQHFQELGEEKDNRVKEAEEKILTLENQVYSMKAELETKKKELEHVNLSVKSKEEELKALEDRLESESAAKLAELKRKAEQKIAAIKKQLLSQMEEKEEQYKKGTESHLSELNTKLQEREREVHILEEKLKSVESSQSETLIVPRSAKNVAAYTEQEEADSQGCVQKTYEEKISVLQRNLTEKEKLLQRVGQEKEETVSSHFEMRCQYQERLIKLEHAEAKQHEDQSMIGHLQEELEEKNKKYSLIVAQHVEKEGGKNNIQAKQNLENVFDDVQKTLQEKELTCQILEQKIKELDSCLVRQKEVHRVEMEELTSKYEKLQALQQMDGRNKPTELLEENTEEKSKSHLVQPKLLSNMEAQHNDLEFKLAGAEREKQKLGKEIVRLQKDLRMLRKEHQQELEILKKEYDQEREEKIKQEQEDLELKHNSTLKQLMREFNTQLAQKEQELEMTIKETINKAQEVEAELLESHQEETNQLLKKIAEKDDDLKRTAKRYEEILDAREEEMTAKVRDLQTQLEELQKKYQQKLEQEENPGNDNVTIMELQTQLAQKTTLISDSKLKEQEFREQIHNLEDRLKKYEKNVYATTVGTPYKGGNLYHTDVSLFGEPTEFEYLRKVLFEYMMGRETKTMAKVITTVLKFPDDQTQKILEREDARLMFTSPRSGIF

SEQ ID NO: 48160 - protein, 2243 aa, Homo sapiens
MFKKLKQKISEEQQQLQQALAPAQASSNSSTPTRMRSRTSSFTEQLDEGTPNRENASTHASKSPDSVNGSEPSIPQSGDTQSFAQKLQLRVPSVESLFRSPIKESLFRSSSKESLVRTSSRESLNRLDLDSSTASFDPPSDMDSEAEDLVGNSDSLNKEQLIQRLRRMERSLSSYRGKYSELVTAYQMLQREKKKLQGILSQSQDKSLRRIAELREELQMDQQAKKHLQEEFDASLEEKDQYISVLQTQVSLLKQRLRNGPMNVDVLKPLPQLEPQAEVFTKEENPESDGEPVVEDGTSVKTLETLQQRVKRQENLLKRCKETIQSHKEQCTLLTSEKEALQEQLDERLQELEKIKDLHMAEKTKLITQLRDAKNLIEQLEQDKGMVIAETKRQMHETLEMKEEEIAQLRSRIKQMTTQGEELREQKEKSERAAFEELEKALSTAQKTEEARRKLKAEMDEQIKTIEKTSEEERISLQQELSRVKQEVVDVMKKSSEEQIAKLQKLHEKELARKEQELTKKLQTREREFQEQMKVALEKSQSEYLKISQEKEQQESLALEELELQKKAILTESENKLRDLQQEAETYRTRILELESSLEKSLQENKNQSKDLAVHLEAEKNKHNKEITVMVEKHKTELESLKHQQDALWTEKLQVLKQQYQTEMEKLREKCEQEKETLLKDKEIIFQAHIEEMNEKTLEKLDVKQTELESLSSELSEVLKARHKLEEELSVLKDQTDKMKQELEAKMDEQKNHHQQQVDSIIKEHEVSIQRTEKALKDQINQLELLLKERDKHLKEHQAHVENLEADIKRSEGELQQASAKLDVFQSYQSATHEQTKAYEEQLAQLQQKLLDLETERILLTKQVAEVEAQKKDVCTELDAHKIQVQDLMQQLEKQNSEMEQKVKSLTQVYESKLEDGNKEQEQTKQILVEKENMILQMREGQKKEIEILTQKLSAKEDSIHILNEEYETKFKNQEKKMEKVKQKAKEMQETLKKKLLDQEAKLKKELENTALELSQKEKQFNAKMLEMAQANSAGISDAVSRLETNQKEQIESLTEVHRRELNDVISIWEKKLNQQAEELQEIHEIQLQEKEQEVAELKQKILLFGCEKEEMNKEITWLKEEGVKQDTTLNELQEQLKQKSAHVNSLAQDETKLKAHLEKLEVDLNKSLKENTFLQEQLVELKMLAEEDKRKVSELTSKLKTTDEEFQSLKSSHEKSNKSLEDKSLEFKKLSEELAIQLDICCKKTEALLEAKTNELINISSSKTNAILSRISHCQHRTTKVKEALLIKTCTVSELEAQLRQLTEEQNTLNISFQQATHQLEEKENQIKSMKADIESLVTEKEALQKEGGNQQQAASEKESCITQLKKELSENINAVTLMKEELKEKKVEISSLSKQLTDLNVQLQNSISLSEKEAAISSLRKQYDEEKCELLDQVQDLSFKVDTLSKEKISALEQVDDWSNKFSEWKKKAQSRFTQHQNTVKELQIQLELKSKEAYEKDEQINLLKEELDQQNKRFDCLKGEMEDDKSKMEKKESNLETELKSQTARIMELEDHITQKTIEIESLNEVLKNYNQQKDIEHKELVQKLQHFQELGEEKDNRVKEAEEKILTLENQVYSMKAELETKKKELEHVNLSVKSKEEELKALEDRLESESAAKLAELKRKAEQKIAAIKKQLLSQMEEKEEQYKKGTESHLSELNTKLQEREREVHILEEKLKSVESSQSETLIVPRSAKNVAAYTEQEEADSQGCVQKTYEEKISVLQRNLTEKEKLLQRVGQEKEETVSSHFEMRCQYQERLIKLEHAEAKQHEDQSMIGHLQEELEEKNKKYSLIVAQHVEKEGGKNNIQAKQNLENVFDDVQKTLQEKELTCQILEQKIKELDSCLVRQKEVHRVEMEELTSKYEKLQALQQMDGRNKPTELLEENTEEKSKSHLVQPKLLSNMEAQHNDLEFKLAGAEREKQKLGKEIVRLQKDLRMLRKEHQQELEILKKEYDQEREEKIKQEQEDLELKHNSTLKQLMREFNTQLAQKEQELEMTIKETINKAQEVEAELLESHQEETNQLLKKIAEKDDDLKRTAKRYEEILDAREEEMTAKVRDLQTQLEELQKKYQQKLEQEENPGNDNTQLAQKTTLISDSKLKEQEFREQIHNLEDRLKKYEKNVYATTVGTPYKGGNLYHTDVSLFGEPTEFEYLRKVLFEYMMGRETKTMAKVITTVLKFPDDQTQKILEREDARLMSWLRSSS

SEQ ID NO: 48161 - protein, 731 aa, Homo sapiens
MSWFVDLAGKAEDLLNRVDQGAATALSRKDNASNIYSKNTDYTELHQQNTDLIYQTGPKSTYISSAADNIRNQKATILAGTANVKVGSRTPVEASHPVENASVPRPSSHFVRRKKSEPDDELLFDFLNSSQKEPTGRVEIRKEKGKTPVFQSSQTSSVSSVNPSVTTIKTIEENSFGSQTHEAASNSDSSHEGQEESSKENVSSNAACPDHTPTPNDDGKSHELSNLRLENQLLRNEVQSLNQEMASLLQRSKETQEELNKARARVEKWNADHSKSDRMTRGLRAQVDDLTEAVAAKDSQLAVLKVRLQEADQLLSTRTEALEALQSEKSRIMQDQSEGNSLQNQALQTFQERLHEADATLKREQESYKQMQSEFAARLNKVEMERQNLAEAITLAERKYSDEKKRVDELQQQVKLYKLNLESSKQELIDYKQKATRILQSKEKLINSLKEGSGFEGLDSSTASSMELEELRHEKEMQREEIQKLMGQIHQLRSELQDMEAQQVNEAESAREQLQDLHDQIAGQKASKQELETELERLKQEFHYIEEDLYRTKNTLQSRIKDRDEEIQKLRNQLTNKTLSNSSQSELENRLHQLTETLIQKQTMLESLSTEKNSLVFQLERLEQQMNSASGSSSNGSSINMSGIDNGEGTRLRNVPVLFNDTETNLAGMYGKVRKAASSIDQFSIRLGIFLRRYPIARVFVIIYMALLHLWVMIVLLTYTPEMHHDQPYGK

SEQ ID NO: 48162 - protein, 691 aa, Homo sapiens
MSWFVDLAGKAEDLLNRVDQGAATALSRKDNASNIYSKNTDYTELHQQNTDLIYQTGPKSTYISSAADNIRNQKATILAGTANVKVGSRTPVEASHPVENASVPRPSSHFVRRKKSEPDDELLFDFLNSSQKEPTGRVEIRKEKGKTPVFQSSQTSSVSSVNPSVTTIKTIEENSFGSQTHEAASNSDSSHEGQEESSKENVSSNAACPDHTPTPNDDGKSHELSNLRLENQLLRNEVQSLNQEMASLLQRSKETQEELNKARARVEKWNADHSKSDRMTRGLRAQVDDLTEAVAAKDSQLAVLKVRLQEADQLLSTRTEALEALQSEKSRIMQDQSEGNSLQNQALQTFQERLHEADATLKREQESYKQMQSEFAARLNKVEMERQNLAEAITLAERKYSDEKKRVDELQQQVKLYKLNLESSKQELIDYKQKATRILQSKEKLINSLKEGSGFEGLDSSTASSMELEELRHEKEMQREEIQKLMGQIHQLRSELQDMEAQQVNEAESAREQLQDLHDQIAGQKASKQELETELERLKQEFHYIEEDLYRTKNTLQSRIKDRDEEIQKLRNQLTNKTLSNSSQSELENRLHQLTETLIQKQTMLESLSTEKNSLVFQLERLEQQMNSASGSSSNGSSINMSGIDNGEGTRLRNVPVLFNDTETNLAGMYGKVRKAASSIDQFRLCFTSGS

SEQ ID NO: 48163 - protein, 640 aa, Homo sapiens
MSWFVDLAGKAEDLLNRVDQGAATALSRKDNASNIYSKNTDYTELHQQNTDLIYQTGPKSTYISSAADNIRNQKATIKTIEENSFGSQTHEAASNSDSSHEGQEESSKENVSSNAACPDHTPTPNDDGKSHELSNLRLENQLLRNEVQSLNQEMASLLQRSKETQEELNKARARVEKWNADHSKSDRMTRGLRAQVDDLTEAVAAKDSQLAVLKVRLQEADQLLSTRTEALEALQSEKSRIMQDQSEGNSLQNQALQTFQERLHEADATLKREQESYKQMQSEFAARLNKVEMERQNLAEAITLAERKYSDEKKRVDELQQQVKLYKLNLESSKQELIDYKQKATRILQSKEKLINSLKEGSGFEGLDSSTASSMELEELRHEKEMQREEIQKLMGQIHQLRSELQDMEAQQVNEAESAREQLQDLHDQIAGQKASKQELETELERLKQEFHYIEEDLYRTKNTLQSRIKDRDEEIQKLRNQLTNKTLSNSSQSELENRLHQLTETLIQKQTMLESLSTEKNSLVFQLERLEQQMNSASGSSSNGSSINMSGIDNGEGTRLRNVPVLFNDTETNLAGMYGKVRKAASSIDQFSIRLGIFLRRYPIARVFVIIYMALLHLWVMIVLLTYTPEMHHDQPYGK

SEQ ID NO: 48164 - protein, 167 aa, Homo sapiens
MATEVHNLQELRRSASLATKVFIQRDYSDGTICQFQTKFPPELDSRIERQLFEETVKTLNGFYAEAEKIGGSSYLEGCLACATAYFIFLCMETHYEKVLKKISRYIQEQNEKIFAPRGLLLTDPVERGMRVIEISIYEDRCSSGSSSSGSSSGSGSSSGGGGGAGAR

SEQ ID NO: 48165 - protein, 603 aa, Homo sapiens
MAEETGQSKLAAAKKKFKEYWQRNRPGVPAAAKRNTKANGSSPETAASGGCHSSEASSSASSSLHARQSPCQEQAAVLNSRSIKISRLNDTIKSLKQQKKQVEHQLEEEKKANNEKQKAERELEGQIQRLNTEKKKLNTDLYHMKHSLRYFEEESKDLAGRLQRSSQRIGELEWSLCAVAATQKKKPDGFSSRSKALLKRQLEQSIREQILLKGHVTQLKESLKEVQLERDQYAEQIKGERAQWQQRMRKMSQEVCTLKEEKKHDTHRVEELERSLSRLKNQMAEPLPPDAPAVSSEVELQDLRKELERVAGELQAQVENNQCISLLNRGQKERLREQEERLQEQQERLREREKRLQQLAEPQSDLEELKHENKSALQLEQQVKELQEKLGQVMETLTSAEKEPEAAVPASGTGGESSGLMDLLEEKADLREHVEKLELGFIQYRRERCHQKVHRLLTEPGDSAKDASPGGGHHQAGPGQGGEEGEAAGAAGDGVAACGSYSEGHGKFLAAARNPAAEPSPGAPAPQELGAADKHGDLCEASLTNSVEPAQGEAREGSSQDNPTAQPVLQLLGEMQDHQEHPGLGSNCCVPCFCWAWLPRRRR

SEQ ID NO: 48166 - protein, 494 aa, Homo sapiens
EKKANNEKQKAERELEGQIQRLNTEKKKLNTDLYHMKHSLRYFEEESKDLAGRLQRSSQRIGELEWSLCAVAATQKKKPDGFSSRSKALLKRQLEQSIREQILLKGHVTQLKESLKEVQLERDQYAEQIKGERAQWQQRMRKMSQEVCTLKEEKKHDTHRVEELERSLSRLKNQMAEPLPPDAPAVSSEVELQDLRKELERVAGELQAQVENNQCISLLNRGQKERLREQEERLQEQQERLREREKRLQQLAEPQSDLEELHENKSALQLEQQVKELQEKLGQVMETLTSAEKEPEAAVPASGTGGESSGLMDLLEEKADLREHVEKLELGFIQYRRERCHQKVHRLLTEPGDSAKDASPGGGHHQAGPGQGGEEGEAAGAAGDGVAACGSYSEGHGKFLAAARNPAAEPSPGAPAPQELGAADKHGDLCEASLTNSVEPAQGEAREGSSQDNPTAQPVLQLLGEMQDHQEHPGLGSNCCVPCFCWAWLPRRRR

SEQ ID NO: 48167 - protein, 603 aa, Homo sapiens; identical to SEQ ID NO: 48165

SEQ ID NO: 48168 - protein, 633 aa, Homo sapiens
MLPVDGEERKSEGSDTEGDRTSPCAGPTSSATLKDLEVGGSGWRCSDPAGQPSNLLPQRGLGAPLPAETAHTQPSPNDRSLYLSPKSSSASSSLHARQSPCQEQAAVLNSRSIKISRLNDTIKSLKQQKKQVEHQLEEEKKANNEKQKAERELEGQIQRLNTEKKKLNTDLYHMKHSLRYFEEESKDLAGRLQRSSQRIGELEWSLCAVAATQKKKPDGFSSRSKALLKRQLEQSIREQILLKGHVTQLKESLKEVQLERDQYAEQIKGERAQWQQRMRKMSQEVCTLKEEKKHDTHRVEELERSLSRLKNQMAEPLPPDAPAVSSEVELQDLRKELERVAGELQAQVENNQCISLLNRGQKERLREQEERLQEQQERLREREKRLQQLAEPQSDLEELKHENKSALQLEQQVKELQEKLGQVMETLTSAEKEPEAAVPASGTGGESSGLMDLLEEKADLREHVEKLELGFIQYRRERCHQKVHRLLTEPGDSAKDASPGGGHHQAGPGQGGEEGEAAGAAGDGVAACGSYSEGHGKFLAAARNPAAEPSPGAPAPQELGAADKHGDLCEASLTNSVEPAQGEAREGSSQDNPTAQPVLQLLGEMQDHQEHPGLGSNCCVPCFCWAWLPRRRR

SEQ ID NO: 48169 - protein, 3259 aa, Homo sapiens
MLSRLSGLANVVLHELSGDDDTDQNMRAPLDPELHQESDMEFNNTTQEDVQERLAYAEQLVVELKDIIRQKDVQLQQKDEALQEERKAADNKIKKLKLHAKAKLTSLNKYIEEMKAQGGTVLPTEPQSEEQLSKHDKSSTEEEMEIEKIKHKLQEKEELISTLQAQLTQAQAEQPAQSSTEMEEFVMMKQQLQEKEEFISTLQAQLSQTQAEQAAQQVVREKDARFETQVRLHEDELLQLVTQADVETEMQQKLRVLQRKLEEHEESLVGRAQVVDLLQQELTAAEQRNQILSQQLQQMEAEHNTLRNTVETEREESKILLEKMELEVAERKLSFHNLQEEMHHLLEQFEQAGQAQAELESRYSALEQKHKAEMEEKTSHILSLQKTGQELQSACDALKDQNSKLLQDKNEQAVQSAQTIQQLEDQLQQKSKEISQFLNRLPLQQHETASQTSFPDVYNEGTQAVTEENIASLQKRVVELENEKGALLLSSIELEELKAENEKLSSQITLLEAQNRTGEADREVSEISIVDIANKRSSSAEESGQDVLENTFSQKHKELSVLLLEMKEAQEEIAFLKLQLQGKRAEEADHEVLDQKEMKQMEGEGIAPIKMKVFLEDTGQDFPLMPNEESSLPAVEKEQASTEHQSRTSEEISLNDAGVELKSTKQDGDKSLSAVPDIGQCHQDELERLKSQILELELNFHKAQEIYEKNLDEKAKEISNLNQLIEEFKKNADNNSSAFTALSEERDQLLSQVKELSMVTELRAQVKQLEMNLAEAERQRRLDYESQTAHDNLLTEQIHSLSIEAKSKDVKIEVLQNELDDVQLQFSEQSTLIRSLQSQLQNKESEVLEGAERVRHISSKVEELSQALSQKELEITKMDQLLLEKKRDVETLQQTIEEKDQQVTEISFSMTEKMVQLNEEKFSLGVEIKTLKEQLNLLSRAEEAKKEQVEEDNEVSSGLKQNYDEMSPAGQISKEELQHEFDLLKKENEQRKRKLQAALINRKELLQRVSRLEEELANLKDESKKEIPLSETERGEVEEDKENKEYSEKCVTSKCQEIEIYLKQTISEKEVELQHIRKDLEEKLAAEEQFQALVKQMNQTLQDKTNQIDLLQAEISENQAIIQKLITSNTDASDGDSVALVKETVVISPPCTGSSEHWKPELEEKILALEKEKEQLQKKLQEALTSRKAILKKAQEKERHLREELKQQKDDYNRLQEQFDEQSKENENIGDQLRQLQIQVRESIDGKLPSTDQQESCSSTPGLEEPLFKATEQHHTQPVLESNLCPDWPSHSEDASALQGGTSVAQIKAQLKEIEAEKVELELKVSSTTSELTKKSEEVFQLQEQINKQGLEIESLKTVSHEAEVHAESLQQKLESSQLQIAGLEHLRELQPKLDELQKLISKKEEDVSYLSGQLSEKEAALTKIQTEIIEQEDLIKALHTQLEMQAKEHDERIKQLQVELCEMKQKPEEIGEESRAKQQIQRKLQAALISRKEALKENKSLQEELSLARGTIERLTKSLADVESQVSAQNKEKDTVLGRLALLQEERDKLITEMDRSLLENQSLSSSCESLKLALEGLTEDKEKLVKEIESLKSSKIAESTEWQEKHKELQKEYEILLQSYENVSNEAERIQHVVEAVRQEKQELYGKLRSTEANKKETEKQLQEAEQEMEEMKEKMRKFAKSKQQKILELEEENDRLRAEVHPAGDTAKECMETLLSSNASMKEELERVKMEYETLSKKFQSLMSEKDSLSEEVQDLKHQIEGNVSKQANLEATEKHDNQTNVTEEGTQSIPGETEEQDSLSMSTRPTCSESVPSAKSANPAVSKDFSSHDEINNYLQQIDQLKERIAGLEEEKQKNKEFSQTLENEKNTLLSQISTKDGELKMLQEEVTKMNLLNQQIQEELSRVTKLKETAEEEKDDLEERLMNQLAELNGSIGNYCQDVTDAQIKNELLESEMKNLKKCVSELEEEKQQLVKEKTKVESEIRKEYLEKIQGAQKEPGNKSHAKELQELLKEKQQEVKQLQKDCIRYQEKISALERTVKALEFVQTESQKDLEITKENLAQAVEHRKKAQAELASFKVLLDDTQSEAARVLADNLKLKKELQSNKESVKSQMKQKDEDLERRLEQAEEKHLKEKKNMQEKLDALRREKVHLEETIGEIQVTLNKKDKEVQQLQENLDSTVTQLAAFTKSMSSLQDDRDRVIDEAKKWERKFSDAIQSKEEEIRLKEDNCSVLKDQLRQMSIHMEELKINISRLEHDKQIWESKAQTEVQLQQKVCDTLQGENKELLSQLEETRHLYHSSQNELAKLESELKSLKDQLTDLSNSLEKCKEQKGNLEGIIRQQEADIQNSKFSYEQLETDLQASRELTSRLHEEINMKEQKIISLLSGKEEAIQVAIAELRQQHDKEIKELENLLSQEEEENIVLEEENKKAVDKTNQLMETLKTIKKENIQQKAQLDSFVKSMSSLQNDRDRIVGDYQQLEERHLSIILEKDQLIQEAAAENNKLKEEIRGLRSHMDDLNSENAKLDAELIQYREDLNQVITIKDSQQKQLLEVQLQQNKELENKYAKLEEKLKESEEANEDLRRSFNALQEEKQDLSKEIESLKVSISQLTRQVTALQEEGTLGLYHAQLKVKEEEVHRLSALFSSSQKRIAELEEELVCVQKEAAKKVGEIEDKLKKELKHLHHDAGIMRNETETAEERVAELARDLVEMEQKLLMVTKENKGLTAQIQSFGRSMSSLQNSRDHANEELDELKRKYDASLKELAQLKEQGLLNRERDALLSETAFSMNSTEENSLSHLEKLNQQLLSKDEQLLHLSSQLEDSYNQVQSFSKAMASLQNERDHLWNELEKFRKSEEGKQRSAAQPSTSPAEVQSLKKAMSSLQNDRDRLLKELKNLQQQYLQINQEITELHPLKAQLQEYQDKTKAFQIMQEELRQENLSWQHELHQLRMEKSSWEIHERRMKEQYLMAISDKDQQLSHLQNLIRELRSSSSQTQPLKVQYQRQASPETSASPDGSQNLVYETELLRTQLNDSLKEIHQKELRIQQLNSNFSQLLEEKNTLSIQLCDTSQSLRENQQHYGDLLNHCAVLEKQVQELQAGPLNIDVAPGAPQEKNGVHRKSDPEELREPQQSFSEAQQQLCNTRQEVNELRKLLEEERDQRVAAENALSVAEEQIRRLEHSEWDSSRTPIIGSCGTQEQALLIDLTSNSCRRTRSGVGWKRVLRSLCHSRTRVPLLAAIYFLMIHVLLILCFTGHL

SEQ ID NO: 48170 - protein, 972 aa, Homo sapiens
MKAQGGTVLPTEPQSEEQLSKHDKSSTEEEMEIEKIKHKLQEKEELISTLQAQLTQAQAEQPAQKLRVLQRKLEEHEESLVGRAQVVDLLQQELTAAEQRNQILSQQLQQMEAEHNTLRNTVETEREESKILLEKMELEVAERKLSFHNLQEEMHHLLEQFEQAGQAQAELESRYSALEQKHKAEMEEKTSHILSLQKTGQELQSACDALKDQNSKLLQDKNEQAVQSAQTIQQLEDQLQQKSKEISQFLNRLPLQQHETASQTSFPDVYNEGTQAVTEENIASLQKRVVELENEKGALLLSSIELEELKAENEKLSSQITLLEAQNRTGEADREVSEISIVDIANKRSSSAEESGQDVLENTFSQKHKELSVLLLEMKEAQEEIAFLKLQLQGKRAEEADHEVLDQKEMKQMEGEGIAPIKMKVFLEDTGQDFPLMPNEESSLPAVEKEQASTEHQSRTSEEISLNDAGVELKSTKQDGDKSLSAVPDIGQCHQDELERLKSQILELELNFHKAQEIYEKNLDEKAKEISNLNQLIEEFKKNADNNSSAFTALSEERDQLLSQVKELSMVTELRAQVKQLEMNLAEAERQRRLDYESQTAHDNLLTEQIHSLSIEAKSKDVKIEVLQNELDDVQLQFSEQSTLIRSLQSQLQNKESEVLEGAERVRHISSKVEELSQALSQKELEITKMDQLLLEKKRDVETLQQTIEEKDQQVTEISFSMTEKMVQLNEEKFSLGVEIKTLKEQLNLLSRAEEAKKEQVEEDNEVSSGLKQNYDEMSPAGQISKEELQHEFDLLKKENEQRKRKLQAALINRKELLQRVSRLEEELANLKDESKKEIPLSETERGEVEEDKENKEYSEKCVTSKCQEIEIYLKQTISEKEVELQHIRKDLEEKLAAEEQFQALVKQMNQTLQDKTNQIDLLQAEISENQAIIQKLITSNTDASDGDSVALVKETVVISPPCTGSSEHWKP

SEQ ID NO: 48171 - protein, 41 aa, Homo sapiens
MLSRLSGLANVVLHELSGDDDTDQNMRAPLDPELHQESDME

SEQ ID NO: 48172 - protein, 1640 aa, Homo sapiens
MLSRLSGLANVVLHELSGDDDTDQNMRAPLDPELHQESDMEFNNTTQEDVQERLAYAEQLVVELKDIIRQKDVQLQQKDEALQEERKAADNKIKKLKLHAKAKLTSLNKYIEEMKAQGGTVLPTEPQSEEQLSKHDKSSTEEEMEIEKIKHKLQEKEELISTLQAQLTQAQAEQPAQSSTEMEEFVMMKQQLQEKEEFISTLQAQLSQTQAEQAAQKLRVLQRKLEEHEESLVGRAQVVDLLQQELTAAEQRNQILSQQLQQMEAEHNTLRNTVETEREESKILLEKMELEVAERKLSFHNLQEEMHHLLEQFEQAGQAQAELESRYSALEQKHKAEMEEKTSHILSLQKTGQELQSACDALKDQNSKLLQDKNEQAVQSAQTIQQLEDQLQQKSKEISQFLNRLPLQQHETASQTSFPDVYNEGTQAVTEENIASLQKRVVELENEKGALLLSSIELEELKAENEKLSSQITLLEAQNRTGEADREVSEISIVDIANKRSSSAEESGQDVLENTFSQKHKELSVLLLEMKEAQEEIAFLKLQLQGKRAEEADHEVLDQKEMKQMEGEGIAPIKMKVFLEDTGQDFPLMPNEESSLPAVEKEQASTEHQSRTSEEISLNDAGVELKSTKQDGDKSLSAVPDIGQCHQDELERLKSQILELELNFHKAQEIYEKNLDEKAKEISNLNQLIEEFKKNADNNSSAFTALSEERDQLLSQVKELSMVTELRAQVKQLEMNLAEAERQRRLDYESQTAHDNLLTEQIHSLSIEAKSKDVKIEVLQNELDDVQLQFSEQSTLIRSLQSQLQNKESEVLEGAERVRHISSKVEELSQALSQKELEITKMDQLLLEKKRDVETLQQTIEEKDQQVTEISFSMTEKMVQLNEEKFSLGVEIKTLKEQLNLLSRAEEAKKEQVEEDNEVSSGLKQNYDEMSPAGQISKEELQHEFDLLKKENEQRKRKLQAALINRKELLQRVSRLEEELANLKDESKKEIPLSETERGEVEEDKENKEYSEKCVTSKCQEIEIYLKQTISEKEVELQHIRKDLEEKLAAEEQFQALVKQMNQTLQDKTNQIDLLQAEISENQAIIQKLITSNTDASDGDSVALVKETVVISPPCTGSSEHWKPELEEKILALEKEKEQLQKKLQEALTSRKAILKKAQEKERHLREELKQQKDDYNRLQEQFDEQSKENENIGDQLRQLQIQVRESIDGKLPSTDQQESCSSTPGLEEPLFKATEQHHTQPVLESNLCPDWPSHSEDASALQGGTSVAQIKAQLKEIEAEKVELELKVSSTTSELTKKSEEVFQLQEQINKQGLEIESLKTVSHEAEVHAESLQQKLESSQLQIAGLEHLRELQPKLDELQKLISKKEEDVSYLSGQLSEKEAALTKIQTEIIEQEDLIKALHTQLEMQAKEHDERIKQLQVELCEMKQKPEEIGEESRAKQQIQRKLQAALISRKEALKENKSLQEELSLARGTIERLTKSLADVESQVSAQNKEKDTVLGRLALLQEERDKLITEMDRSLLENQSLSSSCESLKLALEGLTEDKEKLVKEIESLKSSKIAESTEWQEKHKELQKEYEILLQSYENVSNEAERIQHVVEAVRQEKQELYGKLRSTEANKKETEKQLQEAEQEMEEMKE

SEQ ID NO: 48173 - protein, 3269 aa, Homo sapiens
MLSRLSGLANVVLHELSGDDDTDQNMRAPLDPELHQESDMEFNNTTQEDVQERLAYAEQLVVELKDIIRQKDVQLQQKDEALQEERKAADNKIKKLKLHAKAKLTSLNKYIEEMKAQGGTVLPTEPQSEEQLSKHDKSSTEEEMEIEKIKHKLQEKEELISTLQAQLTQAQAEQPAQSSTEMEEFVMMKQQLQEKEEFISTLQAQLSQTQAEQAAQLSSMQQVVREKDARFETQVRLHEDELLQLVTQADVETEMQQKLRVLQRKLEEHEESLVGRAQVVDLLQQELTAAEQRNQILSQQLQQMEAEHNTLRNTVETEREESKILLEKMELEVAERKLSFHNLQEEMHHLLEQFEQAGQAQAELESRYSALEQKHKAEMEEKTSHILSLQKTGQELQSACDALKDQNSKLLQDKNEQAVQSAQTIQQLEDQLQQKSKEISQFLNRLPLQQHETASQTSFPDVYNEGTQAVTEENIASLQKRVVELENEKGALLLSSIELEELKAENEKLSSQITLLEAQNRTGEADREVSEISIVDIANKRSSSAEESGQDVLENTFSQKHKELSVLLLEMKEAQEEIAFLKLQLQGKRAEEADHEVLDQKEMKQMEGEGIAPIKMKVFLEDTGQDFPLMPNEESSLPAVEKEQASTEHQSRTSEEISLNDAGVELKSTKQDGDKSLSAVPDIGQCHQDELERLKSQILELELNFHKAQEIYEKNLDEKAKEISNLNQLIEEFKKNADNNSSAFTALSEERDQLLSQVKELSMVTELRAQVKQLEMNLAEAERQRRLDYESQTAHDNLLTEQIHSLSIEAKSKDVKIEVLQNELDDVQLQFSEQSTLIRSLQSQLQNKESEVLEGAERVRHISSKVEELSQALSQKELEITKMDQLLLEKKRDVETLQQTIEEKDQQVTEISFSMTEKMVQLNEEKFSLGVEIKTLKEQLNLLSRAEEAKKEQVEEDNEVSSGLKQNYDEMSPAGQISKEELQHEFDLLKKENEQRKRKLQAALINRKELLQRVSRLEEELANLKDESKKEIPLSETERGEVEEDKENKEYSEKCVTSKCQEIEIYLKQTISEKEVELQHIRKDLEEKLAAEEQFQALVKQMNQTLQDKTNQIDLLQAEISENQAIIQKLITSNTDASDGDSVALVKETVVISPPCTGSSEHWKPELEEKILALEKEKEQLQKKLQEALTSRKAILKKAQEKERHLREELKQQKDDYNRLQEQFDEQSKENENIGDQLRQLQIQVRESIDGKLPSTDQQESCSSTPGLEEPLFKATEQHHTQPVLESNLCPDWPSHSEDASALQGGTSVAQIKAQLKEIEAEKVELELKVSSTTSELTKKSEEVFQLQEQINKQGLEIESLKTVSHEAEVHAESLQQKLESSQLQIAGLEHLRELQPKLDELQKLISKKEEDVSYLSGQLSEKEAALTKIQTEIIEQEDLIKALHTQLEMQAKEHDERIKQLQVELCEMKQKPEEIGEESRAKQQIQRKLQAALISRKEALKENKSLQEELSLARGTIERLTKSLADVESQVSAQNKEKDTVLGRLALLQEERDKLITEMDRSLLENQSLSSSCESLKLALEGLTEDKEKLVKEIESLKSSKIAESTEWQEKHKELQKEYEILLQSYENVSNEAERIQHVVEAVRQEKQELYGKLRSTEANKKETEKQLQEAEQEMEEMKEKMRKFAKSKQQKILELEEENDRLRAEVHPAGDTAKECMETLLSSNASMKEELERVKMEYETLSKKFQSLMSEKDSLSEEVQDLKHQIEGNVSKQANLEATEKHDNQTNVTEEGTQSIPGETEEQDSLSMSTRPTCSESVPSAKSANPAVSKDFSSHDEINNYLQQIDQLKERIAGLEEEKQKNKEFSQTLENEKNTLLSQISTKDGELKMLQEEVTKMNLLNQQIQEELSRVTKLKETAEEEKDDLEERLMNQLAELNGSIGNYCQDVTDAQIKNELLESEMKNLKKCVSELEEEKQQLVKEKTKVESEIRKEYLEKIQGAQKEPGNKSHAKELQELLKEKQQEVKQLQKDCIRYQEKISALERTVKALEFVQTESQKDLEITKENLAQAVEHRKKAQAELASFKVLLDDTQSEAARVLADNLKLKKELQSNKESVKSQMKQKDEDLERRLEQAEEKHLKEKKNMQEKLDALRREKVHLEETIGEIQVTLNKKDKEVQQLQENLDSTVTQLAAFTKSMSSLQDDRDRVIDEAKKWERKFSDAIQSKEEEIRLKEDNCSVLKDQLRQMSIHMEELKINISRLEHDKQIWESKAQTEVQLQQKVCDTLQGENKELLSQLEETRHLYHSSQNELAKLESELKSLKDQLTDLSNSLEKCKEQKGNLEGIIRQQEADIQNSKFSYEQLETDLQASRELTSRLHEEINMKEQKIISLLSGKEEAIQVAIAELRQQHDKEIKELENLLSQEEEENIVLEEENKKAVDKTNQLMETLKTIKKENIQQKAQLDSFVKSMSSLQNDRDRIVGDYQQLEERHLSIILEKDQLIQEAAAENNKLKEEIRGLRSHMDDLNSENAKLDAELIQYREDLNQVITIKDSQQKQLLEVQLQQNKELENKYAKLEEKLKESEEANEDLRRSFNALQEEKQDLSKEIESLKVSISQLTRQVTALQEEGTLGLYHAQLKVKEEEVHRLSALFSSSQKRIAELEEELVCVQKEAAKKVGEIEDKLKKELKHLHHDAGIMRNETETAEERVAELARDLVEMEQKLLMVTKENKGLTAQIQSFGRSMSSLQNSRDHANEELDELKRKYDASLKELAQLKEQGLLNRERDALLSETAFSMNSTEENSLSHLEKLNQQLLSKDEQLLHLSSQLEDSYNQVQSFSKAMASLQNERDHLWNELEKFRKSEEGKQRSAAQPSTSPAEVQSLKKAMSSLQNDRDRLLKELKNLQQQYLQINQEITELHPLKAQLQEYQDKTKAFQIMQEELRQENLSWQHELHQLRMEKSSWEIHERRMKEQYLMAISDKDQQLSHLQNLIRELRSSSSQTQPLKVQYQRQASPETSASPDGSQNLVYETELLRTQLNDSLKEIHQKELRIQQLNSNFSQLLEEKNTLSIQLCDTSQSLRENQQHYGDLLNHCAVLEKQVQELQAVSKEKGPLNIDVAPGAPQEKNGVHRKSDPEELREPQQSFSEAQQQLCNTRQEVNELRKLLEEERDQRVAAENALSVAEEQIRRLEHSEWDSSRTPIIGSCGTQEQALLIDLTSNSCRRTRSGVGWKRVLRSLCHSRTRVPLLAAIYFLMIHVLLILCFTGHL

SEQ ID NO: 48174 - protein, 246 aa, Homo sapiens
MSWAAVLAVAAARFGHFWGCRWPGPMAQGWAGFSEEELRRLKQTKDPFEPQRRLPAKKSRQQLQREKALVEQSQKLGLQDGSTSLLPEQLLSAPKQRVNVQKPPFSSPTLPSHFTLTSPVGDGQPQGIESQPKELGLENSHDGHNNVEILPPKPDCKLEKKKVELQEKSRWEVLQQEQRLMEEKNKRKKALLAKAIAERSKRTQAETMKLKRIQKELQALDDMVSADIGILRNRIDQASLDYSYAR

SEQ ID NO: 48175 - protein, 394 aa, Homo sapiens
MSWAAVLAVAAARFGHFWGCRWPGPMAQGWAGFSEEELRRLKQTKDPFEPQRRLPAKKSRQQLQREKALVEQSQKLGLQDGSTSLLPEQLLSAPKQRVNVQKPPFSSPTLPSHFTLTSPVGDGQPQGIESQPKELGLENSHDGHNNVEILPPKPDCKLEKKKVELQEKSRWEVLQQEQRLMEEKNKRKKALLAKAIAERSKRTQAETMKLKRIQKELQALDDMVSADIGILRNRIDQASLDYSYARKRFDRAEAEYIAAKLDIQRKTEIKEQLTEHLCTIIQQNELRKAKKLEELMQQLDVEADEETLELEVEVERLLHEQEVESRRPVVRLERPFQPAEESVTLEFAKENRKCQEQAVSPKVDDQCGNSSSIPFLSPNCPNQEGNDISAALAT

SEQ ID NO: 48176 - protein, 286 aa, Homo sapiens
MPLDATWNITVQWLAVDIACRTLMFLKLMATYSAAFLPVVIGLDRQAAVLNPLGSRSGVRKLLGAAWGLSFLLAFPQLFLFHTVHUAGPVPFTQCVTKGSFKAQWQETTYNLFTFCCLFLLPLTAMAICYSRIVLSVSRPQTRKGSHAPAGEFALPRSFDNCPRVRLRALRLALLILLTFILCWTPYYLLGMWYWFSPTMLTEVPPSLSHILFLLGLLNAPLDPLLYGAFTLGCRRGHQELSIDSSKEGSGRMLQEEIHAFRQLEVQKTVTSRRAGETKGISITSI

SEQ ID NO: 48177 - protein, 292 aa, Homo sapiens
MSAGNGTPWDATWNITVQWLAVDIACRTLMFLKLMATYSAAFLPVVIGLDRQAAVLNPLGSRSGVRKLLGAAWGLSFLLAFPQLFLFHTVHUAGPVPFTQCVTKGSFKAQWQETTYNLFTFCCLFLLPLTAMAICYSRIVLSVSRPQTRKGSHAPAGEFALPRSFDNCPRVRLRALRLALLILLTFILCWTPYYLLGMWYWFSPTMLTEVPPSLSHILFLLGLLNAPLDPLLYGAFTLGCRRGHQELSIDSSKEGSGRMLQEEIHAFRQLEVQKTVTSRRAGETKGISITSI

SEQ ID NO: 48178 - protein, 120 aa, Homo sapiens
MASSRRGLLLLLLLTAHLGPSEAQHWSHGWYPGGKRALSSAQDPQNALRPPGRALDTAAGSPVQTAHGLPSDALAPLDDSMPWEGRTTAQWSLHRKRHLARTLLTAAREPRPAPPSSNKV

SEQ ID NO: 48179 - protein, 113 aa, Homo sapiens
MASSRRGLLLLLLLTAHLGPSEAQHWSHGWYPGGKRALSSAQDPQNALRPPAGSPVQTAHGLPSDALAPLDDSMPWEGRTTAQWSLHRKRHLARTLLTAAREPRPAPPSSNKV

SEQ ID NO: 48180 - protein, 112 aa, Homo sapiens
MASSRRGLLLLLLLTAHLGPSEAQHWSHGWYPGGKRALSSAQDPQNALRPPGSPVQTAHGLPSDALAPLDDSMPWEGRTTAQWSLHRKRHLARTLLTAAREPRPAPPSSNKV

SEQ ID NO: 48181 - protein, 112 aa, Homo sapiens; identical to SEQ ID NO: 48180

SEQ ID NO: 48182 - protein, 113 aa, Homo sapiens; identical to SEQ ID NO: 48179

SEQ ID NO: 48183 - protein, 328 aa, Homo sapiens
MANSASPEQNQNHCSAINNSIPLMQGNLPTLTLSGKIRVTVTFFLFLLSATFNASFLLKLQKWTQKKEKGKKLSRMKLLLKHLTLANLLETLIVMPLDGMWNITVQWYAGELLCKVLSYLKLFSMYAPAFMMVVISLDRSLAITRPLALKSNSKVGQSMVGLAWILSSVFAGPQLYIFRMIHLADSSGQTKVFSQCVTHCSFSQWWHQAFYNFFTFSCLFIIPLFIMLICNAKIIFTLTRVLHQDPHELQLNQSKNNIPRARLKTLKMTVAFATSFTVCWTPYYVLGIWYWFDPEMLNRLSDPVNHFFFLFAFLNPCFDPLIYGYFSL

SEQ ID NO: 48184 - protein, 249 aa, Homo sapiens
MANSASPEQNQNHCSAINNSIPLMQGNLPTLTLSGKIRVTVTFFLFLLSATFNASFLLKLQKWTQKKEKGKKLSRMKLLLKHLTLANLLETLIVMPLDGMWNITVQWYAGELLCKVLSYLKLFSMYAPAFMMVVISLDRSLAITRPLALKSNSKVGQSMVGLAWILSSVFAGPQLPLHHPSFHHADLQCKNHLHPDTGPSSGPPRTTTESVQEQYTKSTAEDSKNDGCICHFIYCLLDSLLCPRNLVLV

SEQ ID NO: 48185 - protein, 684 aa, Homo sapiens
MEENLISMREDHSFHVRYRMEASCLELALEGERLCKSGDCRAGVSFFEAAVQVGTEDLKTLSAIYSQLGNAYFYLHDYAKALEYHHHDLTLARTIGDQLGEAKASGNLGNTLKVLGNFDEAIVCCQRHLDISRELNDKVGEARALYNLGNVYHAKGKSFGCPGPQDVGEFPEEVRDALQAAVDFYEENLSLVTALGDRAAQGRAFGNLGNTHYLLGNFRDAVIAHEQRLLIAKEFGDKAAERRAYSNLGNAYIFLGEFETASEYYKKTLLLARQLKDRAVEAQSCYSLGNTYTLLQDYEKAIDYHLKHLAIAQELNDRIGEGRACWSLGNAYTALGNHDQAMHFAEKHLEISREVGDKSGELTARLNLSDLQMVLGLSYSTNNSIMSENTEIDSSLNGVRPKLGRRHSMENMELMKLTPEKVQNWNSEILAKQKPLIAKPSAKLLFVNRLKGKKYKTNSSTKVLQDASNSIDHRIPNSQRKISADTIGDEGFFDLLSRFQSNRMDDQRCCLQEKNCHTASTTTSSTPPKMMLKTSSVPVVSPNTDEFLDLLASSQSRRLDDQRASFSNLPGLRLTQNSQSVLSHLMTNDNKEADEDFFDILVKCQGSRLDDQRCAPPPATTKGPTVPDEDFFSLILRSQGKRMDEQRVLLQRDQNRDTDFGLKDFLQNNALLEFKNSGKKSADH

SEQ ID NO: 48186 - protein, 684 aa, Homo sapiens; identical to SEQ ID NO: 48185

SEQ ID NO: 48187 - protein, 75 aa, Homo sapiens
MEENLISMREDHSFHVRYRMEASCLELALEGERLCKSGDCRAGVSFFEAAVQVGTEDLKTLSAIYSQLGNAYFYL

SEQ ID NO: 48188 - protein, 213 aa, Homo sapiens
MEENLISMREDHSFHVRYRMEASCLELALEGERLCKSGDCRAGVSFFEAAVQVGTEDLKTLSAIYSQLGNAYFYLHDYAKALEYHHHDLTLARTIGDQLGEAKASGNLGNTLKVLGNFDEAIVCCQRHLDISRELNDKVGEARALYNLGNVYHAKGKSFGCPGPQDVGEFPEEVRDALQAAVDFYEENLSLVTALGDRAAQGRAFGNLGNTHY

SEQ ID NO: 48189 - protein, 52 aa, Homo sapiens
MEENLISMREDHSFHVRYRMEASCLELALEGERLCKSGDCRAGVSFFEAAVQ

SEQ ID NO: 48190 - protein, 429 aa, Homo sapiens
MASLWESPQQCIILSPLSGWWFSIGISILTSSALVLKPQMLKGELQTRPSQRPSRKAFRRNNFEYTLEASKSLRQKPGDSTMTYLNKGQFYPITLKEVSSSEGIHHPISKVRSVIMVVFAEDKSREDQLRHWKYWHSRQHTAKQRCIDIADYKESFNTISNIEEIAYNAISFTWDINDEAKVFISVNCLSTDFSSQKGVKGLPLNIQVDTYSYNNRSNKPVHRAYCQIKVFCDKGAERKIRDEERKQSKRKVSDVKVPLLPSHKRMDITVFKPFIDLDTQPVLFIPDVHFANLQRGTHVLPIASEELEGEGSVLKRGPYGTEDDFAVPPSTKLARIEEPKRVLLYVRKESEEVFDALMLKTPSLKGLMEAISDKYDVPHDKIGKIFKKCKKGILVNMDDNIVKHYSNEDTFQLQIEEAGGSYKLTLTEI

SEQ ID NO: 48191 - protein, 618 aa, Homo sapiens
MTQEYDNKRPVLVLQNEALYPQRRSYTSEDEAWKSFLENPLTAATKAMMSINGDEDSAAALGLLYDYYKVPRERRSSTAKPEVEHPEPDHSKRNSIPIVTEQPLISAGENRVQVLKNVPFNIVLPHGNQLGIDKRGHLTAPDTTVTVSIATMPTHSIKTETQPHGFAVGIPPAVYHPEPTERVVVFDRNLNTDQFSSGAQAPNAQRRTPDSTFSETFKEGVQEVFFPSDLSLRMPGMNSEDYVFDSVSGNNFEYTLEASKSLRQKPGDSTMTYLNKGQFYPITLKEVSSSEGIHHPISKVRSVIMVVFAEDKSREDQLRHWKYWHSRQHTAKQRCIDIADYKESFNTISNIEEIAYNAISFTWDINDEAKVFISVNCLSTDFSSQKGVKGLPLNIQVDTYSYNNRSNKPVHRAYCQIKVFCDKGAERKIRDEERKQSKRKVSDVKVPLLPSHKRMDITVFKPFIDLDTQPVLFIPDVHFANLQRGTHVLPIASEELEGEGSVLKRGPYGTEDDFAVPPSTKLARIEEPKRVLLYVRKESEEVFDALMLKTPSLKGLMEAISDKYDVPHDKIGKIFKKCKKGILVNMDDNIVKHYSNEDTFQLQIEEAGGSYKLTLTEI

SEQ ID NO: 48192 - protein, 618 aa, Homo sapiens
LPKEVENKRPVLVLQNEALYPQRRSYTSEDEAWKSFLENPLTAATKAMMSINGDEDSAAALGLLYDYYKVPRERRSSTAKPEVEHPEPDHSKRNSIPIVTEQPLISAGENRVQVLKNVPFNIVLPHGNQLGIDKRGHLTAPDTTVTVSIATMPTHSIKTETQPHGFAVGIPPAVYHPEPTERVVVFDRNLNTDQFSSGAQAPNAQRRTPDSTFSETFKEGVQEVFFPSDLSLRMPGMNSEDYVFDSVSGNNFEYTLEASKSLRQKPGDSTMTYLNKGQFYPITLKEVSSSEGIHHPISKVRSVIMVVFAEDKSREDQLRHWKYWHSRQHTAKQRCIDIADYKESFNTISNIEEIAYNAISFTWDINDEAKVFISVNCLSTDFSSQKGVKGLPLNIQVDTYSYNNRSNKPVHRAYCQIKVFCDKGAERKIRDEERKQSKRKVSDVKVPLLPSHKRMDITVFKPFIDLDTQPVLFIPDVHFANLQRGTHVLPIASEELEGEGSVLKRGPYGTEDDFAVPPSTKLARIEEPKRVLLYVRKESEEVFDALMLKTPSLKGLMEAISDKYDVPHDKIGKIFKKCKKGILVNMDDNIVKHYSNEDTFQLQIEEAGGSYKLTLTEI

SEQ ID NO: 48193 - protein, 625 aa, Homo sapiens
MSQESDNNKRLVALVPMPSDPPFNTRRAYTSEDEAWKSYLENPLTAATKAMMSINGDEDSAAALGLLYDYYKVPRDKRLLSVSKASDSQEDQEKRNCLGTSEAQSNLSGGENRVQVLKTVPVNLSLNQDHLENSKREQYSISFPESSAIIPVSGITVVKAEDFTPVFMAPPVHYPRGDGEEQRVVIFEQTQYDVPSLATHSAYLKDDQRSTPDSTYSESFKDAATEKFRSASVGAEEYMYDQTSSGTFQYTLEATKSLRQKQGEGPMTYLNKGQFYAITLSETGDNKCFRHPISKVRSVVMVVFSEDKNRDEQLKYWKYWHSRQHTAKQRVLDIADYKESFNTIGNIEEIAYNAVSFTWDVNEEAKIFITVNCLSTDFSSQKGVKGLPLMIQIDTYSYNNRSNKPIHRAYCQIKVFCDKGAERKIRDEERKQNRKKGKGQASQTQCNSSSDGKLAAIPLQKKSDITYFKTMPDLHSQPVLFIPDVHFANLQRTGQVYYNTDDEREGGSVLVKRMFRPMEEEFGPVPSKQMKEEGTKRVLLYVRKETDDVFDALMLKSPTVKGLMEAISEKYGLPVEKIAKLYKKSKKGILVNMDDNIIEHYSNEDTFILNMESMVEGFKVTLMEI

SEQ ID NO: 48194 - protein, 609 aa, Homo sapiens
MPSDPPFNTRRAYTSEDEAWKSYLENPLTAATKAMMSINGDEDSAAALGLLYDYYKVPRDKRLLSVSKASDSQEDQEKRNCLGTSEAQSNLSGGENRVQVLKTVPVNLSLNQDHLENSKREQYSISFPESSAIIPVSGITVVKAEDFTPVFMAPPVHYPRGDGEEQRVVIFEQTQYDVPSLATHSAYLKDDQRSTPDSTYSESFKDAATEKFRSASVGAEEYMYDQTSSGTFQYTLEATKSLRQKQGEGPMTYLNKGQFYAITLSETGDNKCFRHPISKVRSVVMVVFSEDKNRDEQLKYWKYWHSRQHTAKQRVLDIADYKESFNTIGNIEEIAYNAVSFTWDVNEEAKIFITVNCLSTDFSSQKGVKGLPLMIQIDTYSYNNRSNKPIHRAYCQIKVFCDKGAERKIRDEERKQNRKKGKGQASQTQCNSSSDGKLAAIPLQKKSDITYFKTMPDLHSQPVLFIPDVHFANLQRTGQVYYNTDDEREGGSVLVKRMFRPMEEEFGPVPSKQMKEEGTKRVLLYVRKETDDVFDALMLKSPTVKGLMEAISEKYGLPVEKIAKLYKKSKKGILVNMDDNIIEHYSNEDTFILNMESMVEGFKVTLMEI

SEQ ID NO: 48195 - protein, 625 aa, Homo sapiens
MGKDGRSNKRLVALVPMPSDPPFNTRRAYTSEDEAWKSYLENPLTAATKAMMSINGDEDSAAALGLLYDYYKVPRDKRLLSVSKASDSQEDQEKRNCLGTSEAQSNLSGGENRVQVLKTVPVNLSLNQDHLENSKREQYSISFPESSAIIPVSGITVVKAEDFTPVFMAPPVHYPRGDGEEQRVVIFEQTQYDVPSLATHSAYLKDDQRSTPDSTYSESFKDAATEKFRSASVGAEEYMYDQTSSGTFQYTLEATKSLRQKQGEGPMTYLNKGQFYAITLSETGDNKCFRHPISKVRSVVMVVFSEDKNRDEQLKYWKYWHSRQHTAKQRVLDIADYKESFNTIGNIEEIAYNAVSFTWDVNEEAKIFITVNCLSTDFSSQKGVKGLPLMIQIDTYSYNNRSNKPIHRAYCQIKVFCDKGAERKIRDEERKQNRKKGKGQASQTQCNSSSDGKLAAIPLQKKSDITYFKTMPDLHSQPVLFIPDVHFANLQRTGQVYYNTDDEREGGSVLVKRMFRPMEEEFGPVPSKQMKEEGTKRVLLYVRKETDDVFDALMLKSPTVKGLMEAISEKYGLPVEKIAKLYKKSKKGILVNMDDNIIEHYSNEDTFILNMESMVEGFKVTLMEI

SEQ ID NO: 48196 - protein, 6 aa, Homo sapiens
MSQESD

SEQ ID NO: 48197 - protein, 578 aa, Homo sapiens
MLRRLDKIRFRGHKRDDFLDLAESPNASDTECSDEIPLKVPRTSPRDSEELRDPAGPGTLIMATGVQDFNRTEFDRLNEIKGHLEIALLEKHFLQEELRKLREETNAEMLRQELDRERQRRMELEQKVQEVLKARTEEQMAQQPPKGQAQASNGAERRSQGLSSRLQKWFYERFGEYVEDFRFQPEENTVETEEPLSARRLTENMRRLKRGAKPVTNFVKNLSALSDWYSVYTSAIAFTVYMNAVWHGWAIPLFLFLAILRLSLNYLIARGWRIQWSIVPEVSEPVEPPKEDLTVSEKFQLVLDVAQKAQNLFGKMADILEKIKNLFMWVQPEITQKLYVALWAAFLASCFFPYRLVGLAVGLYAGIKFFLIDFIFKRCPRLRAKYDTPYIIWRSLPTDPQLKERSSAAVSRRLQTTSSRSYVPSAPAGLGKEEDAGRFHSTKKGNFHEIFNLTENERPLAVCENGWRCCLINRDRKMPTDYIRNGVLYVTENYLCFESSKSGSSKRNKVIKLVDITDIQKYKVLSVLPGSGMGIAVSTPSTQKPLVFGAMVHRDEAFETILSQYIKITSAAASGGDS

SEQ ID NO: 48198 - protein, 578 aa, Homo sapiens; identical to SEQ ID NO: 48197

SEQ ID NO: 48199 - protein, 33 aa, Homo sapiens
MLRRLDKIRFRGHKRDDFLDLAESPNASDTECS

SEQ ID NO: 48200 - protein, 593 aa, Homo sapiens
MWTLVSWVALTAGLVAGTRCPDGQFCPVACCLDPGGASYSCCRPLLDKWPTTLSRHLGGPCQVDAHCSAGHSCIFTVSGTSSCCPFPEAVACGDGHHCCPRGFHCSADGRSCFQRSGNNSVGAIQCPDSQFECPDFSTCCVMVDGSWGCCPMPQASCCEDRVHCCPHGAFCDLVHTRCITPTGTHPLAKKLPAQRTNRAVALSSSVMCPDARSRCPDGSTCCELPSGKYGCCPMPNATCCSDHLHCCPQDTVCDLIQSKCLSKENATTDLLTKLPAHTVGDVKCDMEVSCPDGYTCCRLQSGAWGCCPFTQAVCCEDHIHCCPAGFTCDTQKGTCEQGPHQVPWMEKAPAHLSLPDPQALKRDVPCDNVSSCPSSDTCCQLTSGEWGCCPIPEAVCCSDHQHCCPQGYTCVAEGQCQRGSEIVAGLEKMPARRASLSHPRDIGCDQHTSCPVGQTCCPSLGGSWACCQLPHAVCCEDRQHCCPAGYTCNVKARSCEKEVVSAQPATFLARSPHVGVKDVECGEGHFCHDNQTCCRDNRQGWACCPYRQGVCCADRRHCCPAGFRCAARGTKCLRREAPRWDAPLRDPALRQLL

SEQ ID NO: 48201 - protein, 438 aa, Homo sapiens
MWTLVSWVALTAGLVAGTRCPDGQFCPVACCLDPGGASYSCCRPLLDKWPTTLSRHLGGPCQVDAHCSAGHSCIFTVSGTSSCCPFPEAVACGDGHHCCPRGFHCSADGRSCFQRSGNNSVGAIQCPDSQFECPDFSTCCVMVDGSWGCCPMPQASCCEDRVHCCPHGAFCDLVHTRCITPTGTHPLAKKLPAQRTNRAVALSSSVMCPDARSRCPDGSTCCELPSGKYGCCPMPNATCCSDHLHCCPQDTVCDLIQSKCLSKENATTDLLTKLPAHTVGDVKCDMEVSCPDGYTCCRLQSGAWGCCPFTQAVCCEDHIHCCPAGFTCDTQKGTCEQGPHQVPWMEKAPAHLSLPDPQALKRDVPCDNVSSCPSSDTCCRDNRQGWACCPYRQGVCCADRRHCCPAGFRCAARGTKCLRREAPRWDAPLRDPALRQLL

SEQ ID NO: 48202 - protein, 413 aa, Homo sapiens
MAITAAHGASTAVQTGDPASKDQVTTPWVPSSALIVSSNARTSPRAVLWSMAPGGAAPCPRLPAVKTGCTAVCDLIQSKCLSKENATTDLLTKLPAHTVGDVKCDMEVSCPDGYTCCRLQSGAWGCCPFTQAVCCEDHIHCCPAGFTCDTQKGTCEQGPHQVPWMEKAPAHLSLPDPQALKRDVPCDNVSSCPSSDTCCQLTSGEWGCCPIPEAVCCSDHQHCCPQGYTCVAEGQCQRGSEIVAGLEKMPARRASLSHPRDIGCDQHTSCPVGQTCCPSLGGSWACCQLPHAVCCEDRQHCCPAGYTCNVKARSCEKEVVSAQPATFLARSPHVGVKDVECGEGHFCHDNQTCCRDNRQGWACCPYRQGVCCADRRHCCPAGFRCAARGTKCLRREAPRWDAPLRDPALRQLL

SEQ ID NO: 48203 - protein, 262 aa, Homo sapiens
MRNSYRFLASSLSVVVSLLLIPEDVCEKIIGGNEVTPHSRPYMVLLSLDRKTICAGALIAKDWVLTAAHCNLNKRSQVILGAHSITREEPTKQIMLVKKEFPYPCYDPATREGDLKLLQLMEKAKINKYVTILHLPKKGDDVKPGTMCQVAGWGRTHNSASWSDTLREVNITIIDRKVCNDRNHYNFNPVIGMNMVCAGSLRGGRDSCNGDSGSPLLCEGVFRGVTSFGLENKCGDPRGPGVYILLSKKHLNWIIMTIKGAV

SEQ ID NO: 48204 - protein, 247 aa, Homo sapiens
MQPILLLLAFLLLPRADAGEIIGGHEAKPHSRPYMAYLMIWDQKSLKRCGGFLIRDDFVLTAAHCWGSSINVTLGAHNIKEQEPTQQFIPVKRPIPHPAYNPKNFSNDIMLLQLERKAKRTRAVQPLRLPSNKAQVKPGQTCSVAGWGQTAPLGKHSHTLQEVKMTVQEDRKCESDLRHYYDSTIELCVGDPEIKKTSFKGDSGGPLVCNKVAQGIVSYGRNNGMPPRACTKVSSFVHWIKKTMKRY

SEQ ID NO: 48205 - protein, 152 aa, Homo sapiens
MQPILLLLAFLLLPRADQLERKAKRTRAVQPLRLPSNKAQVKPGQTCSVAGWGQTAPLGKHSHTLQEVKMTVQEDRKCESDLRHYYDSTIELCVGDPEIKKTSFKGDSGGPLVCNKVAQGIVSYGRNNGMPPRACTKVSSFVHWIKKTMKRY

SEQ ID NO: 48206 - protein, 202 aa, Homo sapiens
MQPILLLLAFLLLPRADAGEIIGGHEAKPHSRPYMAYLMIWDQKSLKRCGGFLIRDDFVLTAAHCWGRLERKAKRTRAVQPLRLPSNKAQVKPGQTCSVAGWGQTAPLGKHSHTLQEVKMTVQEDRKCESDLRHYYDSTIELCVGDPEIKKTSFKGDSGGPLVCNKVAQGIVSYGRNNGMPPRACTKVSSFVHWIKKTMKRY

SEQ ID NO: 48207 - protein, 281 aa, Homo sapiens
MKSLSLLHLFPLPRAKREQGGNNSSSNQGSLPEKMQPILLLLAFLLLPRADAGEIIGGHEAKPHSRPYMAYLMIWDQKSLKRCGGFLIRDDFVLTAAHCWGSSINVTLGAHNIKEQEPTQQFIPVKRPIPHPAYNPKNFSNDIMLLQLERKAKRTRAVQPLRLPSNKAQVKPGQTCSVAGWGQTAPLGKHSHTLQEVKMTVQEDRKCESDLRHYYDSTIELCVGDPEIKKTSFKGDSGGPLVCNKVAQGIVSYGRNNGMPPRACTKVSSFVHWIKKTMKRY

SEQ ID NO: 48208 - protein, 235 aa, Homo sapiens
MQTFPSGEIIGGHEAKPHSRPYMAYLMIWDQKSLKRCGGFLIRDDFVLTAAHCWGSSINVTLGAHNIKEQEPTQQFIPVKRPIPHPAYNPKNFSNDIMLLQLERKAKRTRAVQPLRLPSNKAQVKPGQTCSVAGWGQTAPLGKHSHTLQEVKMTVQEDRKCESDLRHYYDSTIELCVGDPEIKKTSFKGDSGGPLVCNKVAQGIVSYGRNNGMPPRACTKVSSFVHWIKKTMKRY

SEQ ID NO: 48209 - protein, 160 aa, Homo sapiens
MQPFLLLLAFLLTPGAGTEEIIGGHEAKPHSRPYMAFVQFLQEKSRKRCGGILVRKDFVLTAAHCQGSSINVTLGAHNIKEQERTQQFIPVKRPIPHPAYNPKNFSNDIMLLQGDSGGPLVCKDVAQGILSYGNKKGTPPGVYIKVSHFLPWIKRTMKRL

SEQ ID NO: 48210 - protein, 246 aa, Homo sapiens
MQPFLLLLAFLLTPGAGTEEIIGGHEAKPHSRPYMAFVQFLQEKSRKRCGGILVRKDFVLTAAHCQGSSINVTLGAHNIKEQERTQQFIPVKRPIPHPAYNPKNFSNDIMLLQLERKAKWTTAVRPLRLPSSKAQVKPGQLCSVAGWGYVSMSTLATTLQEVLLTVQKDCQCERLFHGNYSRATEICVGDPKKTQTGFKGDSGGPLVCKDVAQGILSYGNKKGTPPGVYIKVSHFLPWIKRTMKRL

SEQ ID NO: 48211 - protein, 115 aa, Homo sapiens
MQPFLLLLAFLLTPGAGTEEIIGGHEAKPHSRPYMAFVQFLQEKSRKRCGGILVRKDFVLTAAHCQGRGDSGGPLVCKDVAQGILSYGNKKGTPPGVYIKVSHFLPWIKRTMKRL

SEQ ID NO: 48212 - protein, 257 aa, Homo sapiens
MEACVSSLLVLALGALSVGSSFGTQIIGGREVIPHSRPYMASLQRNGSHLCGGVLVHPKWVLTAAHCLAQRMAQLRLVLGLHTLDSPGLTFHIKAAIQHPRYKPVPALENDLALLQLDGKVKPSRTIRPLALPSKRQVVAAGTRCSMAGWGLTHQGGRLSRVLRELDLQVLDTRMCNNSRFWNGSLSPSMVCLAADSKDQAPCKGDSGGPLVCGKGRVLARVLSFSSRVCTDIFKPPVATAVAPYVSWIRKVTGRSA

SEQ ID NO: 48213 - protein, 1035 aa, Homo sapiens
MAAETLNFGPEWLRALSGGGSVASPPPSPAMPKYKLADYRYGREEMLALYVKENKVPEELQDKEFAAVLQDEPLQPLALEPLTEEEQRNFSLSVNSVAVLRLMGKGAGPPLAGTSRGRGSTRSRGRGRGDSCFYQRSIEEGDGAFGRSPREIQRSQSWDDRGERRFEKSARRDGARCGFEEGGAGPRKEHARSDSENWRSLREEQEEEEEGSWRLGAGPRRDGDRWRSASPDGGPRSAGWREHGERRRKFEFDLRGDRGGCGEEEGRGGGGSSHLRRCRAPEGFEEDKDGLPEWCLDDEDEEMGTFDASGAFLPLKKGPKEPIPEEQELDFQGLEEEEEPSEGLEEEGPEAGGKELTPLPPQEEKSSSPSPLPTLGPLWGTNGDGDETAEKEPPAAEDDIRGIQLSPGVGSSAGPPGDLEDDEGLKHLQQEAEKLVASLQDSSLEEEQFTAAMQTQGLRHSAAATALPLSHGAARKWFYKDPQGEIQGPFTTQEMAEWFQAGYFSMSLLVKRGCDEGFQPLGEVIKMWGRVPFAPGPSPPPLLGNMDQERLKKQQELAAAALYQQLQHQQFLQLVSSRQLPQCALREKAALGDLTPPPPPPPQQQQQQLTAFLQQLQALKPPRGGDQNLLPTMSRSLSVPDSGRLWDVHTSASSQSGGEASLWDIPINSSTQGPILEQLQLQHKFQERREVELRAKREEEERKRREEKRRQQQQEEQKRRQEEEELFRRKHVRQQELLLKLLQQQQAVPVPPAPSSPPPLWAGLAKQGLSMKTLLELQLEGERQLHKQPPPREPARAQAPNHRVQLGGLGTAPLNQWVSEAGPLWGGPDKSGGGSSGLGLWEDTPKSGGSLVRGLGLKNSRSSPSLSDSYSHLSGRPIRKKTEEEEKLLKLLQGIPRPQDGFTQWCEQMLHTLSATGSLDVPMAVAILKEVESPYDVHDYIRSCLGDTLEAKEFAKQFLERRAKQKASQQRQQQQEAWLSSASLQTAFQANHSTKLGPGEGSKAKRRALMLHSDPSILGYSLHGSSGEIESVDDY

SEQ ID NO: 48214 - protein, 754 aa, Homo sapiens
SSFPSPRLPQVFHRLDDEDEEMGTFDASGAFLPLKKGPKEPIPEEQELDFQGLEEEEEPSEGLEEEGPEAGGKELTPLPPQEEKSSSPSPLPTLGPLWGTNGDGDETAEKEPPAAEDDIRGIQLSPGVGSSAGPPGDLEDDEGLKHLQQEAEKLVASLQDSSLEEEQFTAAMQTQGLRHSAAATALPLSHGAARKWFYKDPQGEIQGPFTTQEMAEWFQAGYFSMSLLVKRGCDEGFQPLGEVIKMWGRVPFAPGPSPPPLLGNMDQERLKKQQELAAAALYQQLQHQQFLQLVSSRQLPQCALREKAALGDLTPPPPPPPQQQQQQLTAFLQQLQALKPPRGGDQNLLPTMSRSLSVPDSGRLWDVHTSASSQSGGEASLWDIPINSSTQGPILEQLQLQHKFQERREVELRAKREEEERKRREEKRRQQQQEEQKRRQEEEELFRRKHVRQQELLLKLLQQQQAVPVPPAPSSPPPLWAGLAKQGLSMKTLLELQLEGERQLHKQPPPREPARAQAPNHRVQLGGLGTAPLNQWVSEAGPLWGGPDKSGGGSSGLGLWEDTPKSGGSLVRGLGLKNSRSSPSLSDSYSHLSGRPIRKKTEEEEKLLKLLQGIPRPQDGFTQWCEQMLHTLSATGSLDVPMAVAILKEVESPYDVHDYIRSCLGDTLEAKEFAKQFLERRAKQKASQQRQQQQEAWLSSASLQTAFQANHSTKLGPGEGSKAKRRALMLHSDPSILGYSLHGSSGEIESVDDY

SEQ ID NO: 48215 - protein, 1299 aa, Homo sapiens
MAAETQTLNFGPEWLRALSSGGSITSPPLSPALPKYKLADYRYGREEMLALFLKDNKIPSDLLDKEFLPILQEEPLPPLALVPFTEEEQRNFSMSVNSAAVLRLTGRGGGGTVVGAPRGRSSSRGRGRGRGECGFYQRSFDEVEGVFGRGGGREMHRSQSWEERGDRRFEKPGRKDVGRPNFEEGGPTSVGRKHEFIRSESENWRIFREEQNGEDEDGGWRLAGSRRDGERWRPHSPDGPRSAGWREHMERRRRFEFDFRDRDDERGYRRVRSGSGSIDDDRDSLPEWCLEDAEEEMGTFDSSGAFLSLKKVQKEPIPEEQEMDFRPVDEGEECSDSEGSHNEEAKEPDKTNKKEGEKTDRVGVEASEETPQTSSSSARPGTPSDHQSQEASQFERKDEPKTEQTEKAEEETRMENSLPAKVPSRGDEMVADVQQPLSQIPSDTASPLLILPPPVPNPSPTLRPVETPVVGAPGMGSVSTEPDDEEGLKHLEQQAEKMVAYLQDSALDDERLASKLQEHRAKGVSIPLMHEAMQKWYYKDPQGEIQGPFNNQEMAEWFQAGYFTMSLLVKRACDESFQPLGDIMKMWGRVPFSPGPAPPPHMGELDQERLTRQQELTALYQMQHLQYQQFLIQQQYAQVLAQQQKAALSSQQQQQLALLLQQFQTLKMRISDQNIIPSVTRSVSVPDTGSIWELQPTASQPTVWEGGSVWDLPLDTTTPGPALEQLQQLEKAKAAKLEQERREAEMRAKREEEERKRQEELRRQQEEILRRQQEEERKRREEEELARRKQEEALRRQREQEIALRRQREEEERQQQEEALRRLEERRREEEERRKQEELLRKQEEEAAKWAREEEEAQRRLEENRLRMEEEAARLRHEEEERKRKELEVQRQKELMRQRQQQQEALRRLQQQQQQQQLAQMKLPSSSTWGQQSNTTACQSQATLSLAEIQKLEEERERQLREEQRRQQRELMKALQQQQQQQQQKLSGWGNVSKPSGTTKSLLEIQQEEARQMQKQQQQQQQHQQPNRARNNTHSNLHTSIGNSVWGSINTGPPNQWASDLVSSIWSNADTKNSNMGFWDDAVKEVGPRNSTNKNKNNASLSKSVGVSNRQNKKVEEEEKLLKLFQGVNKAQDGFTQWCEQMLHALNTANNLDVPTFVSFLKEVESPYEVHDYIRAYLGDTSEAKEFAKQFLERRAKQKANQQRQQQQLPQQQQQQPPQQPPQQPQQQDSVWGMNHSTLHSVFQTNQSNNQQSNFEAVQSGKKKKKQKMVRADPSLLGFSVNASSERLNMGEIETLDDY

SEQ ID NO: 48216 - protein, 1321 aa, Homo sapiens
MAAETQTLNFGPEWLRALSSGGSITSPPLSPALPKYKLADYRYGREEMLALFLKDNKIPSDLLDKEFLPILQEEPLPPLALVPFTEEEQRNFSMSVNSAAVLRLTGRGGGGTVVGAPRGRSSSRGRGRGRGECGFYQRSFDEVEGVFGRGGGREMHRSQSWEERGDRRFEKPGRKDVGKKNGYYCMYSPVLLLGQPLCQGRPNFEEGGPTSVGRKHEFIRSESENWRIFREEQNGEDEDGGWRLAGSRRDGERWRPHSPDGPRSAGWREHMERRRRFEFDFRDRDDERGYRRVRSGSGSIDDDRDSLPEWCLEDAEEEMGTFDSSGAFLSLKKVQKEPIPEEQEMDFRPVDEGEECSDSEGSHNEEAKEPDKTNKKEGEKTDRVGVEASEETPQTSSSSARPGTPSDHQSQEASQFERKDEPKTEQTEKAEEETRMENSLPAKVPSRGDEMVADVQQPLSQIPSDTASPLLILPPPVPNPSPTLRPVETPVVGAPGMGSVSTEPDDEEGLKHLEQQAEKMVAYLQDSALDDERLASKLQEHRAKGVSIPLMHEAMQKWYYKDPQGEIQGPFNNQEMAEWFQAGYFTMSLLVKRACDESFQPLGDIMKMWGRVPFSPGPAPPPHMGELDQERLTRQQELTALYQMQHLQYQQFLIQQQYAQVLAQQQKAALSSQQQQQLALLLQQFQTLKMRISDQNIIPSVTRSVSVPDTGSIWELQPTASQPTVWEGGSVWDLPLDTTTPGPALEQLQQLEKAKAAKLEQERREAEMRAKREEEERKRQEELRRQQEEILRRQQEEERKRREEEELARRKQEEALRRQREQEIALRRQREEEERQQQEEALRRLEERRREEEERRKQEELLRKQEEEAAKWAREEEEAQRRLEENRLRMEEEAARLRHEEEERKRKELEVQRQKELMRQRQQQQEALRRLQQQQQQQQLAQMKLPSSSTWGQQSNTTACQSQATLSLAEIQKLEEERERQLREEQRRQQRELMKALQQQQQQQQQKLSGWGNVSKPSGTTKSLLEIQQEEARQMQKQQQQQQQHQQPNRARNNTHSNLHTSIGNSVWGSINTGPPNQWASDLVSSIWSNADTKNSNMGFWDDAVKEVGPRNSTNKNKNNASLSKSVGVSNRQNKKVEEEEKLLKLFQGVNKAQDGFTQWCEQMLHALNTANNLDVPTFVSFLKEVESPYEVHDYIRAYLGDTSEAKEFAKQFLERRAKQKANQQRQQQQLPQQQQQQPPQQPPQQPQQQDSVWGMNHSTLHSVFQTNQSNNQQSNFEAVQSGKKKKKQKMVRADPSLLGFSVNASSERLNMGEIETLDDY

SEQ ID NO: 48217 - protein, 1321 aa, Homo sapiens; identical to SEQ ID NO: 48216

SEQ ID NO: 48218 - protein, 1299 aa, Homo sapiens; identical to SEQ ID NO: 48215

SEQ ID NO: 48219 - protein, 720 aa, Homo sapiens
MAAETQTLNFGPEWLRALSSGGSITSPPLSPALPKYKLADYRYGREEMLALFLKDNKIPSDLLDKEFLPILQEEPLPPLALVPFTEEEQRNFSMSVNSAAVLRLTGRGGGGTVVGAPRGRSSSRGRGRPNFEEGGPTSVGRKHEFIRSESENWRIFREEQNGEDEDGGWRLAGSRRDGERWRPHSPGWREHMERRRRFEFDFRDRDDERGYRRVRSGSGSIDDDRDSLPEWCLEDAEEEMGTFDSSGAFLSLKKVQKEPIPEEQEMDFRPVDEGEECSDSEGSHNEEAKEPDKTNKKEGEKTDRVGVEASEETPQTSSSSARPGTPSDHQSQEASQFERKDEPKTEQTEKAEEETRMENSLPAKVPSRGDEMVADVQQPLSQIPSDTASPLLILPPPVPNPSPTLRPVETPVVGAPGMGSVSTEPDDEEGLKHLEQQAEKMVAYLQDSALDDERLASKLQEHRAKGVSIPLMHEAMQKWYYKDPQGEIQGPFNNQEMAEWFQAGYFTMSLLVKRACDESFQPLGDIMKMWGRVPFSPGPAPPPHMGELDQERLTRQQELTALYQMQHLQYQQFLIQQQYAQVLAQQQKAALSSQQQQQLALLLQQFQTLKMRISDQNIIPSVTRSVSVPDTGSIWELQPTASQPTVWEGGSVWDLPLDTTTPGPALEQLQQLEKAKAAKLEQERREAEMRAKREEEERKRQEELRRQQEEILRRQQEEER

SEQ ID NO: 48220 - protein, 93 aa, Homo sapiens
MAAETQTLNFGPEWLRALSSGGSITSPPLSPALPKYKLADYRYGREEMLALFLKDNKIPSDLLDKEFLPILQEEPLPPLALVPFTEEEQRNFS

SEQ ID NO: 48221 - protein, 100 aa, Homo sapiens
MAAETQTLNFGPEWLRALSSGGSITSPPLSPALPKYKLADYRYGREEMLALFLKDNKIPSDLLDKEFLPILQEEPLPPLALVPFTEEEQRNFSMSVNSAA

SEQ ID NO: 48222 - protein, 13 aa, Homo sapiens
MAAETQTLNFGPE

SEQ ID NO: 48223 - protein, 115 aa, Homo sapiens
MAAETQTLNFGPEWLRALSSGGSITSPPLSPALPKYKLADYRYGREEMLALFLKDNKIPSDLLDKEFLPILQEEPLPPLALVPFTEEEQRNFSMSVNSAAVLRLTGRGGGGTVVG

SEQ ID NO: 48224 - protein, 106 aa, Homo sapiens
MAAETQTLNFGPEWLRALSSGGSITSPPLSPALPKYKLADYRYGREEMLALFLKDNKIPSDLLDKEFLPILQEEPLPPLALVPFTEEEQRNFSMSVNSAAVLRLTG

SEQ ID NO: 48225 - protein, 113 aa, Homo sapiens
MAAETQTLNFGPEWLRALSSGGSITSPPLSPALPKYKLADYRYGREEMLALFLKDNKIPSDLLDKEFLPILQEEPLPPLALVPFTEEEQRNFSMSVNSAAVLRLTGRGGGGTV

SEQ ID NO: 48226 - protein, 872 aa, Homo sapiens
MTKLPDDPGRPNFEEGGPTSVGRKHEFIRSESENWRIFREEQNGEDEDGGWRLAGSRRDGERWRPHSPDGPRSAGWREHMERRRRFEFDFRDRDDERGYRRVRSGSGSIDDDRDSLPEWCLEDAEEEMGTFDSSGAFLSLKKVQKEPIPEEQEMDFRPVDEGEECSDSEGSHNEEAKEPDKTNKKEGEKTDRVGVEASEETPQTSSSSARPGTPSDHQSQEASQFERKDEPKTEQTEKAEEETRMENSLPAKVPSRGDEMVADVQQPLSQIPSDTASPLLILPPPVPNPSPTLRPVETPVVGAPGMGSVSTEPDDEEGLKHLEQQAEKMVAYLQDSALDDERLASKLQEHRAKGVSIPLMHEAMQKWYYKDPQGEIQGPFNNQEMAEWFQAGYFTMSLLVKRACDESFQPLGDIMKMWGRVPFSPGPAPPPHMGELDQERLTRQQELTALYQMQHLQYQQFLIQQQYAQVLAQQQKAALSSQQQQQLALLLQQFQTLKMRISDQNIIPSVTRSVSVPDTGSIWELQPTASQPTVWEGGSVWDLPLDTTTPGPALEQLQQLEKAKAAKLEQERREAEMRAKREEEERKRQEELRRQQEEILRRQQEEERKRREEEELARRKQEEALRRQREQEIALRRQREEEERQQQEEALRRLEERRREEEERRKQEELLRKQEEEAAKWAREEEEAQRRLEENRLRMEEEAARLRHEEEERKRKELEVQRQKELMRQRQQQQEALRRLQQQQQQQQLAQMKLPSSSTWGQQSNTTACQSQATLSLAEIQKLEEERERQLREEESSASFCFYATAKAPAEGVDESSSAAAATATAETLRLGECQQTFRYHEISSGDPAGRGQANAKAAAAAAATPATKQSS

SEQ ID NO: 48227 - protein, 787 aa, Homo sapiens
MAAETQTLNFGPEWLRALSSGGSITSPPLSPALPKYKLADYRYGREEMLALFLKDNKIPSDLLDKEFLPILQEEPLPPLALVPFTEEEQRNFSMSVNSAAVLRLTGRGGGGTVVGAPRGRSSSRGRGRGRGECGFYQRSFDEVEGVFGRGGGREMHRSQSWEERGDRRFEKPGRKDVGRPNFEEGGPTSVGRKHEFIRSESENWRIFREEQNGEDEDGGWRLAGSRRDGERWRPHSPDGPRSAGWREHMERRRRFEFDFRDRDDERGYRRVRSGSGSIDDDRDSLPEWCLEDAEEEMGTFDSSGAFLSLKKVQKEPIPEEQEMDFRPVDEGEECSDSEGSHNEEAKEPDKTNKKEGEKTDRVGVEASEETPQTSSSSARPGTPSDHQSQEASQFERKDEPKTEQTEKAEEETRMENSLPAKVPSRGDEMVADVQQPLSQIPSDTASPLLILPPPVPNPSPTLRPVETPVVGAPGMGSVSTEPDDEEGLKHLEQQAEKMVAYLQDSALDDERLASKLQEHRAKGVSIPLMHEAMQKWYYKDPQGEIQGPFNNQEMAEWFQAGYFTMSLLVKRACDESFQPLGDIMKMWGRVPFSPGPAPPPHMGELDQERLTRQQELTALYQMQHLQYQQFLIQQQYAQVLAQQQKAALSSQQQQQLALLLQQFQTLKMRISDQNIIPSVTRSVSVPDTGSIWELQPTASQPTVWEGGSVWDLPLDTTTPGPALEQLQQLEKAKAAKLEQERREAEMRAKREEEERKRQEELRRQQEEILRRQQEEERKRREVGKRDS

SEQ ID NO: 48228 - protein, 1293 aa, Homo sapiens
MAAETQTLNFGPEWLRALSSGGSITSPPLSPALPKYKLADYRYGREEMLALFLKDNKIPSDLLDKEFLPILQEEPLPPLALVPFTEEEQRNFSMSVNSAAVLRLTGRGGGGTVVGAPRGRSSSRGRGRGRGECGFYQRSFDEVEGVFGRGGGREMHRSQSWEERGDRRFEKPGRKDVGRPNFEEGGPTSVGRKHEFIRSESENWRIFREEQNGEDEDGGWRLAGSRRDGERWRPHSPGWREHMERRRRFEFDFRDRDDERGYRRVRSGSGSIDDDRDSLPEWCLEDAEEEMGTFDSSGAFLSLKKVQKEPIPEEQEMDFRPVDEGEECSDSEGSHNEEAKEPDKTNKKEGEKTDRVGVEASEETPQTSSSSARPGTPSDHQSQEASQFERKDEPKTEQTEKAEEETRMENSLPAKVPSRGDEMVADVQQPLSQIPSDTASPLLILPPPVPNPSPTLRPVETPVVGAPGMGSVSTEPDDEEGLKHLEQQAEKMVAYLQDSALDDERLASKLQEHRAKGVSIPLMHEAMQKWYYKDPQGEIQGPFNNQEMAEWFQAGYFTMSLLVKRACDESFQPLGDIMKMWGRVPFSPGPAPPPHMGELDQERLTRQQELTALYQMQHLQYQQFLIQQQYAQVLAQQQKAALSSQQQQQLALLLQQFQTLKMRISDQNIIPSVTRSVSVPDTGSIWELQPTASQPTVWEGGSVWDLPLDTTTPGPALEQLQQLEKAKAAKLEQERREAEMRAKREEEERKRQEELRRQQEEILRRQQEEERKRREEEELARRKQEEALRRQREQEIALRRQREEEERQQQEEALRRLEERRREEEERRKQEELLRKQEEEAAKWAREEEEAQRRLEENRLRMEEEAARLRHEEEERKRKELEVQRQKELMRQRQQQQEALRRLQQQQQQQQLAQMKLPSSSTWGQQSNTTACQSQATLSLAEIQKLEEERERQLREEQRRQQRELMKALQQQQQQQQQKLSGWGNVSKPSGTTKSLLEIQQEEARQMQKQQQQQQQHQQPNRARNNTHSNLHTSIGNSVWGSINTGPPNQWASDLVSSIWSNADTKNSNMGFWDDAVKEVGPRNSTNKNKNNASLSKSVGVSNRQNKKVEEEEKLLKLFQGVNKAQDGFTQWCEQMLHALNTANNLDVPTFVSFLKEVESPYEVHDYIRAYLGDTSEAKEFAKQFLERRAKQKANQQRQQQQLPQQQQQQPPQQPPQQPQQQDSVWGMNHSTLHSVFQTNQSNNQQSNFEAVQSGKKKKKQKMVRADPSLLGFSVNASSERLNMGEIETLDDY

SEQ ID NO: 48229 - protein, 1320 aa, Homo sapiens
MAAETQTLNFGPEWLRALSSGGSITSPPLSPALPKYKLADYRYGREEMLALFLKDNKIPSDLLDKEFLPILQEEPLPPLALVPFTEEEQRNFSMSVNSAAVLRLTGRGGGGTVVGAPRGRSSSRGRGRGRGECGFYQRSFDEVEGVFGRGGGREMHRSQSWEERGDRRFEKPGRKDVGKKNGYYCMYSPVLLLGQPLCQGRPNFEEGGPTSVGRKHEFIRSESENWRIFREEQNGEDEDGGWRLAGSRRDGERWRPHSPDGPRSAGWREHMERRRRFEFDFRDRDDERGYRRVRSGSGSIDDDRDSLPEWCLEDAEEEMGTFDSSGAFLSLKKVQKEPIPEEQEMDFRPVDEGEECSDSEGSHNEEAKEPDKTNKKEGEKTDRVGVASEETPQTSSSSARPGTPSDHQSQEASQFERKDEPKTEQTEKAEEETRMENSLPAKVPSRGDEMVADVQQPLSQIPSDTASPLLILPPPVPNPSPTLRPVETPVVGAPGMGSVSTEPDDEEGLKHLEQQAEKMVAYLQDSALDDERLASKLQEHRAKGVSIPLMHEAMQKWYYKDPQGEIQGPFNNQEMAEWFQAGYFTMSLLVKRACDESFQPLGDIMKMWGRVPFSPGPAPPPHMGELDQERLTRQQELTALYQMQHLQYQQFLIQQQYAQVLAQQQKAALSSQQQQQLALLLQQFQTLKMRISDQNIIPSVTRSVSVPDTGSIWELQPTASQPTVWEGGSVWDLPLDTTTPGPALEQLQQLEKAKAAKLEQERREAEMRAKREEEERKRQEELRRQQEEILRRQQEEERKRREEEELARRKQEEALRRQREQEIALRRQREEEERQQQEEALRRLEERRREEEERRKQEELLRKQEEEAAKWAREEEEAQRRLEENRLRMEEEAARLRHEEEERKRKELEVQRQKELMRQRQQQQEALRRLQQQQQQQQLAQMKLPSSSTWGQQSNTTACQSQATLSLAEIQKLEEERERQLREEQRRQQRELMKALQQQQQQQQQKLSGWGNVSKPSGTTKSLLEIQQEEARQMQKQQQQQQQHQQPNRARNNTHSNLHTSIGNSVWGSINTGPPNQWASDLVSSIWSNADTKNSNMGFWDDAVKEVGPRNSTNKNKNNASLSKSVGVSNRQNKKVEEEEKLLKLFQGVNKAQDGFTQWCEQMLHALNTANNLDVPTFVSFLKEVESPYEVHDYIRAYLGDTSEAKEFAKQFLERRAKQKANQQRQQQQLPQQQQQQPPQQPPQQPQQQDSVWGMNHSTLHSVFQTNQSNNQQSNFEAVQSGKKKKKQKMVRADPSLLGFSVNASSERLNMGEIETLDDY

SEQ ID NO: 48230 - protein, 694 aa, Homo sapiens
MSGGEVVCSGWLRKSPPEKKLKRYAWKRRWFVLRSGRLTGDPDVLEYYKNDHAKKPIRIIDLNLCQQVDAGLTFNKKEFENSYIFDINTIDRIFYLVADSEEEMNKWVRCICDICGFNPTEEDPVKPPGSSLQAPADLPLAINTAPPSTQADSSSATLPPPYQLINVPPHLETLGIQEDPQDYLLLINCQSKKPEPTRTHADSAKSTSSETDCNDNVPSHKNPASSQSKHGMNGFFQQQMIYDSPPSRAPSASVDSSLYNLPRSYSHDVLPKVSPSSTEADGELYVFNTPSGTSSVETQMRHVSISYDIPPTPGNTYQIPRTFPEGTLGQTSKLDTIPDIPPPRPPKPHPAHDRSPVETCSIPRTASDTDSSYCIPTAGMSPSRSNTISTVDLNKLRKDASSQDCYDIPRAFPSDRSSSLEGFHNHFKVKNVLTVGSVSSEELDENYVPMNPNSPPRQHSSSFTEPIQEANYVPMTPGTFDFSSFGMQVPPPAHMGFRSSPKTPPRRPVPVADCEPPPVDRNLKPDRKVKPAPLEIKPLPEWEELQAPVRSPITRSFARDSSRFPMSPRPDSVHSTTSSSDSHDSEENYVPMNPNLSSEDPNLFGSNSLDGGSSPMIKPKGDKQVEYLDLDLDSGKSTPPRKQKSSGSGSSVADERVDYVVVDQQKTLALKSTREAWTDGRQSTESETPAKSVK

SEQ ID NO: 48231 - protein, 724 aa, Homo sapiens
MSGGEVVCSGWLRKSPPEKKLKRYAWKRRWFVLRSGRLTGDPDVLEYYKNDHAKKPIRIIDLNLCQQVDAGLTFNKKEFENSYIFDINTIDRIFYLVADSEEEMNKWVRCICDICGFNPTEEDPVKPPGSSLQAPADLPLAINTAPPSTQADSSSATLPPPYQLINVPPHLETLGIQEDPQDYLLLINCQSKKPEPTRTHADSAKSTSSETDCNDNVPSHKNPASSQSKHGMNGFFQQQMIYDSPPSRAPSASVDSSLYNLPRSYSHDVLPKVSPSSTEADGELYVFNTPSGTSSVETQMRHVSISYDIPPTPGNTYQIPRTFPEGTLGQTSKLDTIPDIPPPRPPKPHPAHDRSPVETCSIPRTASDTDSSYCIPTAGMSPSRSNTISTVDLNKLRKDASSQDCYDIPRAFPSDRSSSLEGFHNHFKVKNVLTVGSVSSEELDENYVPMNPNSPPRQHSSSFTEPIQEANYVPMTPGTFDFSSFGMQVPPPAHMGFRSSPKTPPRRPVPVADCEPPPVDRNLKPDRKGQSPKILRLKPHGLERTDSQTIGDFATRRKVKPAPLEIKPLPEWEELQAPVRSPITRSFARDSSRFPMSPRPDSVHSTTSSSDSHDSEENYVPMNPNLSSEDPNLFGSNSLDGGSSPMIKPKGDKQVEYLDLDLDSGKSTPPRKQKSSGSGSSVADERVDYVVVDQQKTLALKSTREAWTDGRQSTESETPAKSVK

SEQ ID NO: 48232 - protein, 591 aa, Homo sapiens
MNKWVRCICDICGFNPTEEDPVKPPGSSLQAPADLPLAINTAPPSTQADSSSATLPPPYQLINVPPHLETLGIQEDPQDYLLLINCQSKKPEPTRTHADSAKSTSSETDCNDNVPSHKNPASSQSKHGMNGFFQQQMIYDSPPSRAPSASVDSSLYNLPRSYSHDVLPKVSPSSTEADGELYVFNTPSGTSSVETQMRHVSISYDIPPTPGNTYQIPRTFPEGTLGQTSKLDTIPDIPPPRPPKPHPAHDRSPVETCSIPRTASDTDSSYCIPTAGMSPSRSNTISTVDLNKLRKDASSQDCYDIPRAFPSDRSSSLEGFHNHFKVKNVLTVGSVSSEELDENYVPMNPNSPPRQHSSSFTEPIQEANYVPMTPGTFDFSSFGMQVPPPAHMGFRSSPKTPPRRPVPVADCEPPPVDRNLKPDRKVKPAPLEIKPLPEWEELQAPVRSPITRSFARDSSRFPMSPRPDSVHSTTSSSDSHDSEENYVPMNPNLSSEDPNLFGSNSLDGGSSPMIKPKGDKQVEYLDLDLDSGKSTPPRKQKSSGSGSSVADERVDYVVVDQQKTLALKSTREAWTDGRQSTESETPAKSVK

SEQ ID NO: 48233 - protein, 638 aa, Homo sapiens
MSGDPDVLEYYKNDHSKKPLRIINLNFCEQVDAGLTFNKKELQDSFVFDIKTSERTFYLVAETEEDMNKWVQSICQICGFNQAEESTDSLRNVSSAGHGPRSSPAELSSSSQHLLRERKSSAPSHSSQPTLFTFEPPVSNHMQPTLSTSAPQEYLYLHQCISRRAENARSASFSQGTRASFLMRSDTAVQKLAQGNGHCVNGISGQVHGFYSLPKPSRHNTEFRDSTYDLPRSLASHGHTKGSLTGSETDNEDVYTFKTPSNTLCREFGDLLVDNMDVPATPLSAYQIPRTFTLDKNHNAMTVATPGDSAIAPPPRPPKPSQAETPRWGSPQQRPPISENSRSVAATIPRRNTLPAMDNSRLHRASSCETYEYPQRGGESAGRSAESMSDGVGSFLPGKMIVGRSDSTNSEDNYVPMNPGSSTLLAMERAGDNSQSVYIPMSPGAHHFDSLGYPSTTLPVHRGPSRGSEIQPPPVNRNLKPDRKAKPTPLDLRNNTVIDELPFKSPITKSWSRANHTFNSSSSQYCRPISTQSITSTDSGDSEENYVPMQNPVSASPVPSGTNSPAPKKSTGSVDYLALDFQPSSPSPHRKPSTSSVTSDEKVDYVQVDKEKTQALQNTMQEWTDVRQSSEPSKGAKL

SEQ ID NO: 48234 - protein, 676 aa, Homo sapiens
MSGGGDVVCTGWLRKSPPEKKLRRYAWKKRWFILRSGRMSGDPDVLEYYKNDHSKKPLRIINLNFCEQVDAGLTFNKKELQDSFVFDIKTSERTFYLVAETEEDMNKWVQSICQICGFNQAEESTDSLRNVSSAGHGPRSSPAELSSSSQHLLRERKSSAPSHSSQPTLFTFEPPVSNHMQPTLSTSAPQEYLYLHQCISRRAENARSASFSQGTRASFLMRSDTAVQKLAQGNGHCVNGISGQVHGFYSLPKPSRHNTEFRDSTYDLPRSLASHGHTKGSLTGSETDNEDVYTFKTPSNTLCREFGDLLVDNMDVPATPLSAYQIPRTFTLDKNHNAMTVATPGDSAIAPPPRPPKPSQAETPRWGSPQQRPPISENSRSVAATIPRRNTLPAMDNSRLHRASSCETYEYPQRGGESAGRSAESMSDGVGSFLPGKMIVGRSDSTNSEDNYVPMNPGSSTLLAMERAGDNSQSVYIPMSPGAHHFDSLGYPSTTLPVHRGPSRGSEIQPPPVNRNLKPDRKAKPTPLDLRNNTVIDELPFKSPITKSWSRANHTFNSSSSQYCRPISTQSITSTDSGDSEENYVPMQNPVSASPVPSGTNSPAPKKSTGSVDYLALDFQPSSPSPHRKPSTSSVTSDEKVDYVQVDKEKTQALQNTMQEWTDVRQSSEPSKGAKL

SEQ ID NO: 48235 - protein, 131 aa, Homo sapiens
MSGDPDVLEYYKNDHSKKPLRIINLNFCEQVDAGLTFNKKELQDSFVFDIKTSERTFYLVAETEEDMNKWVQSICQICGFNQAEESTDSLRNVSSAGHGPRSSPAELSSSSQHLLRERKSSAPSHSSQPTL

SEQ ID NO: 48236 - protein, 102 aa, Homo sapiens
MSGDPDVLEYYKNDHSKKPLRIINLNFCEQVDAGLTFNKKELQDSFVFDIKTSERTFYLVAETEEDMNKWVQSICQICGFNQAEESTDSLRNVSSAGHGPRS

SEQ ID NO: 48237 - protein, 330 aa, Homo sapiens
MEAVAKFDFTASGEDELSFHTGDVLKILSNQEEWFKAELGSQEGYVPKNFIDIQFPKWFHEGLSRHQAENLLMGKEVGFFIIRASQSSPGDFSISVRHEDDVQHFKVMRDNKGNYFLWTEKFPSLNKLVDYYRTNSISRQKQIFLRDRTREDQGHRGNSLDRRSQGGPHLSGAVGEEIRPSMNRKLSDHPPTLPLQQHQHQPQPPQYAPAPQQLQQPPQQRYLQHHHFHQERRGGSLDINDGHCGTGLGSEMNAALMHRRHTDPVQLQAAGRVRWARALYDFEALEDDELGFHSGEVVEVLDSSNPSWWTGRLHNKLGLFPANYVAPMTR

SEQ ID NO: 48238 - protein, 217 aa, Homo sapiens
MVSRRPLSTPGRELTHGQGGWLLHHPGQPELPRGLLHLCQGHRGNSLDRRSQGGPHLSGAVGEEIRPSMNRKLSDHPPTLPLQQHQHQPQPPQYAPAPQQLQQPPQQRYLQHHHFHQERRGGSLDINDGHCGTGLGSEMNAALMHRRHTDPVQLQAAGRVRWARALYDFEALEDDELGFHSGEVVEVLDSSNPSWWTGRLHNKLGLFPANYVAPMTR

SEQ ID NO: 48239 - protein, 330 aa, Homo sapiens; identical to SEQ ID NO: 48237

SEQ ID NO: 48240 - protein, 97 aa, Homo sapiens
MEAVAKFDFTASGEDELSFHTGDVLKILSNQEEWFKAELGSQEGYVPKNFIDIQFPKWFHEGLSRHQAENLLMGKEVGFFIIRASQSSPGDFSISVR

SEQ ID NO: 48241 - protein, 264 aa, Homo sapiens
MLEFVSLLARKDSNNSVSKPRHKLNPFSSKRHEDDVQHFKVMRDNKGNYFLWTEKFPSLNKLVDYYRTNSISRQKQIFLRDRTREDQGHRGNSLDRRSQGGPHLSGAVGEEIRPSMNRKLSDHPPTLPLQQHQHQPQPPQYAPAPQQLQQPPQQRYLQHHHFHQERRGGSLDINDGHCGTGLGSEMNAALMHRRHTDPVQLQAAGRVRWARALYDFEALEDDELGFHSGEVVEVLDSSNPSWWTGRLHNKLGLFPANYVAPMTR

SEQ ID NO: 48242 - protein, 278 aa, Homo sapiens
MEAVAKFDFTASGEDELSFHTGDVLKILSNQEEWFKAELGSQEGYVPKNFIDIQFPKHEDDVQHFKVMRDNKGNYFLWTEKFPSLNKLVDYYRTNSISRQKQIFLRDRTREDQGHRGNSLDRRSQGGPHLSGAVGEEIRPSMNRKLSDHPPTLPLQQHQHQPQPPQYAPAPQQLQQPPQQRYLQHHHFHQERRGGSLDINDGHCGTGLGSEMNAALMHRRHTDPVQLQAAGRVRWARALYDFEALEEVLDSSNPSWWTGRLHNKLGLFPANYVAPMTR

SEQ ID NO: 48243 - protein, 304 aa, Homo sapiens
MLEFVSLLARKDSNNSVSKPRHKLNPFSSKRWFHEGLSRHQAENLLMGKEVGFFIIRASQSSPGDFSISVRHEDDVQHFKVMRDNKGNYFLWTEKFPSLNKLVDYYRTNSISRQKQIFLRDRTREDQGHRGNSLDRRSQGGPHLSGAVGEEIRPSMNRKLSDHPPTLPLQQHQHQPQPPQYAPAPQQLQQPPQQRYLQHHHFHQERRGGSLDINDGHCGTGLGSEMNAALMHRRHTDPVQLQAAGRVRWARALYDFEALEDDELGFHSGEVVEVLDSSNPSWWTGRLHNKLGLFPANYVAPMTR

SEQ ID NO: 48244 - protein, 258 aa, Homo sapiens
MGKEVGFFIIRASQSSPGDFSISVRHEDDVQHFKVMRDNKGNYFLWTEKFPSLNKLVDYYRTNSISRQKQIFLRDRTREDQGHRGNSLDRRSQGGPHLSGAVGEEIRPSMNRKLSDHPPTLPLQQHQHQPQPPQYAPAPQQLQQPPQQRYLQHHHFHQERRGGSLDINDGHCGTGLGSEMNAALMHRRHTDPVQLQAAGRVRWARALYDFEALEDDELGFHSGEVVEVLDSSNPSWWTGRLHNKLGLFPANYVAPMTR

SEQ ID NO: 48245 - protein, 168 aa, Homo sapiens
MFWKLSLSLFLVAVLVKVAEARKNRPAGAIPSPYKDGSSNNSERWQHQIKEVLASSQEALVVTERKYLKSDWCKTQPLRQTVSEEGCRSRTILNRFCYGQCNSFYIPRHVKKEEESFQSCAFCKPQRVTSVLVELECPGLDPPFRLKKIQKVKQCRCMSVNLSDSDKQ

SEQ ID NO: 48246 - protein, 480 aa, Homo sapiens
MAGTRWVLGALLRGCGCNCSSCRRTGAACLPFYSAAGSIPSGVSGRRRLLLLLGAAAAAASQTRGLQTGPVPPGRLAGPPAVATSAAAAAAASYSALRASLLPQSLAAAAAVPTRSYSQESKTTYLEDLPPPPEYELAPSKLEEEVDDVFLIRAQGLPWSCTMEDVLNFFSDCRIRNGENGIHFLLNRDGKRRGDALIEMESEQDVQKALEKHRMYMGQRYVEVYEINNEDVDALMKSLQVKSSPVVNDGVVRLRGLPYSCNEKDIVDFFAGLNIVDITFVMDYRGRRKTGEAYVQFEEPEMANQALLKHREEIGNRYIEIFPSRRNEVRTHVGSYKGKKIASFPTAKYITEPEMVFEEHEVNEDIQPMTAFESEKEIELPKEVPEKLPEAADFGTTSSLHFVHMRGLPFQANAQDIINFFAPLKPVRITMEYSSSGKATGEADVHFETHEDAVAAMLKDRSHVHHRYIELFLNSCPKGK

SEQ ID NO: 48247 - protein, 318 aa, Homo sapiens
MEDVLNFFSDCRIRNGENGIHFLLNRDGKRRGDALIEMESEQDVQKALEKHRMYMGQRYVEVYEINNEDVDALMKSLQVKSSPVVNDGVVRLRGLPYSCNEKDIVDFFAGLNIVDITFVMDYRGRRKTGEAYVQFEEPEMANQALLKHREEIGNRYIEIFPSRRNEVRTHVGSYKGKKIASFPTAKYITEPEMVFEEHEVNEDIQPMTAFESEKEIELPKEVPEKLPEAADFGTTSSLHFVHMRGLPFQANAQDIINFFAPLKPVRITMEYSSSGKATGEADVHFETHEDAVAAMLKDRSHVHHRYIELFLNSCPKGK

SEQ ID NO: 48248 - protein, 453 aa, Homo sapiens
AAAVPTRSYSQVRGRREGPGARSLPGRVHAPPRPSVPPCAPRGHARGSATLAAHPPPSTLCSYWALEQGKLSQASGLLLVLFSPRVSGRLGSESKTTYLEDLPPPPEYELAPSKLEEEVDDVFLIRAQGLPWSCTMEDVLNFFSDCRIRNGENGIHFLLNRDGKRRGDALIEMESEQDVQKALEKHRMYMGQRYVEVYEINNEDVDALMKSLQVKSSPVVNDGVVRLRGLPYSCNEKDIVDFFAGLNIVDITFVMDYRGRRKTGEAYVQFEEPEMANQALLKHREEIGNRYIEIFPSRRNEVRTHVGSYKGKKIASFPTAKYITEPEMVFEEHEVNEDIQPMTAFESEKEIELPKEVPEKLPEAADFGTTSSLHFVHMRGLPFQANAQDIINFFAPLKPVRITMEYSSSGKATGEADVHFETHEDAVAAMLKDRSHVHHRYIELFLNSCPKGK

SEQ ID NO: 48249 - protein, 318 aa, Homo sapiens; identical to SEQ ID NO: 48247

SEQ ID NO: 48250 - protein, 417 aa, Homo sapiens
  VARIANT 1: note = MOD_RES - Any amino acid
XPPPSTLCSYWALEQGKLSQASGLLLVLFSPRVSGRLGSVSVAGVNVEALFPAWPMESKTTYLEDLPPPPEYELAPSKLEEEVDDVFLIRAQGLPWSCTMEDVLNFFSDCRIRNGENGIHFLLNRDGKRRGDALIEMESEQDVQKALEKHRMYMGQRYVEVYEINNEDVDALMKSLQVKSSPVVNDGVVRLRGLPYSCNEKDIVDFFAGLNIVDITFVMDYRGRRKTGEAYVQFEEPEMANQALLKHREEIGNRYIEIFPSRRNEVRTHVGSYKGKKIASFPTAKYITEPEMVFEEHEVNEDIQPMTAFESEKEIELPKEVPEKLPEAADFGTTSSLHFVHMRGLPFQANAQDIINFFAPLKPVRITMEYSSSGKATGEADVHFETHEDAVAAMLKDRSHVHHRYIELFLNSCPKGK

SEQ ID NO: 48251 - protein, 412 aa, Homo sapiens
MAGTRWVLGALLRGCGCNCSSCRRTGAACLPFYSAAGSIPAAAVPTRSYSQESKTTYLEDLPPPPEYELAPSKLEEEVDDVFLIRAQGLPWSCTMEDVLNFFSDCRIRNGENGIHFLLNRDGKRRGDALIEMESEQDVQKALEKHRMYMGQRYVEVYEINNEDVDALMKSLQVKSSPVVNDGVVRLRGLPYSCNEKDIVDFFAGLNIVDITFVMDYRGRRKTGEAYVQFEEPEMANQALLKHREEIGNRYIEIFPSRRNEVRTHVGSYKGKKIASFPTAKYITEPEMVFEEHEVNEDIQPMTAFESEKEIELPKEVPEKLPEAADFGTTSSLHFVHMRGLPFQANAQDIINFFAPLKPVRITMEYSSSGKATGEADVHFETHEDAVAAMLKDRSHVHHRYIELFLNSCPKGK

SEQ ID NO: 48252 - protein, 362 aa, Homo sapiens
MESKTTYLEDLPPPPEYELAPSKLEEEVDDVFLIRAQGLPWSCTMEDVLNFFSDCRIRNGENGIHFLLNRDGKRRGDALIEMESEQDVQKALEKHRMYMGQRYVEVYEINNEDVDALMKSLQVKSSPVVNDGVVRLRGLPYSCNEKDIVDFFAGLNIVDITFVMDYRGRRKTGEAYVQFEEPEMANQALLKHREEIGNRYIEIFPSRRNEVRTHVGSYKGKKIASFPTAKYITEPEMVFEEHEVNEDIQPMTAFESEKEIELPKEVPEKLPEAADFGTTSSLHFVHMRGLPFQANAQDIINFFAPLKPVRITMEYSSSGKATGEADVHFETHEDAVAAMLKDRSHVHHRYIELFLNSCPKGK

SEQ ID NO: 48253 - protein, 466 aa, Homo sapiens
MLRSTSTVTLLSGGAARTPGAPSRRANVCRLRLTVPPESPVPEQCEKKIERKEQLLDLSNGEPTRKLPQGVVYGVVRRSDQNQQKEMVVYGWSTSQLKEEMNYIKDVRATLEKVRKRMYGDYDEMRQKIRQLTQELSVSHAQQEYLENHIQTQSSALDRFNAMNSALASDSIGLQKTLVDVTLENSNIKDQIRNLQQTYEASMDKLREKQRQLEVAQVENQLLKMKVESSQEANAEVMREMTKKLYSQYEEKLQEEQRKHSAEKEALLEETNSFLKAIEEANKKMQAAEISLEEKDQRIGELDRLIERMEKERHQLQLQLLEHETEMSGELTDSDKERYQQLEEASASLRERIRHLDDMVHCQQKKVKQMVEEIESLKKKLQQKQLLILQLLEKISFLEGENNELQSRLDYLTETQAKTEVETREIGVGCDLLPSQTGRTREIVMPSRNYTPYTRVLELTMKKTLT

SEQ ID NO: 48254 - protein, 397 aa, Homo sapiens
MLRSTSTVTLLSGGAARTPGAPSRRANVCRLRLTVPPESPVPEQCEKKIERKEQLLDLSNGEPTRKLPQGVVYGVVRRSDQNQQKEMVVYGWSTSQLKEEMNYIKDKTLVDVTLENSNIKDQIRNLQQTYEASMDKLREKQRQLEVAQVENQLLKMKVESSQEANAEVMREMTKKLYSQYEEKLQEEQRKHSAEKEALLEETNSFLKAIEEANKKMQAAEISLEEKDQRIGELDRLIERMEKERHQLQLQLLEHETEMSGELTDSDKERYQQLEEASASLRERIRHLDDMVHCQQKKVKQMVEEIESLKKKLQQKQLLILQLLEKISFLEGENNELQSRLDYLTETQAKTEVETREIGVGCDLLPSQTGRTREIVMPSRNYTPYTRVLELTMKKTLT

SEQ ID NO: 48255 - protein, 415 aa, Homo sapiens
MLRSTSTVTLLSGGAARTPGAPSRRANVCRLRLTVPPESPVPEQCEKKIERKEQLLDLSNGEPTRKLPQGVVYGVVRRSDQNQQKEMVVYGWSTSQLKEEMNYIKDVSHAQQEYLENHIQTQSSALDRFNAMNSALASDSIGLQKTLVDVTLENSNIKDQIRNLQQTYEASMDKLREKQRQLEVAQVENQLLKMKVESSQEANAEVMREMTKKLYSQYEEKLQEEQRKHSAEKEALLEETNSFLKAIEEANKKMQAAEISLEEKDQRIGELDRLIERMEKERHQLQLQLLEHETEMSGELTDSDKERYQQLEEASASLRERIRHLDDMVHCQQKKVKQMVEENNELQSRLDYLTETQAKTEVETREIGVGCDLLPRQSRKFEKVLNEFVQLLPLPHHLLWAFGNVCWRRHFGLLQ

SEQ ID NO: 48256 - protein, 438 aa, Homo sapiens
MLRSTSTVTLLSGGAARTPGAPSRRANVCRLRLTVPPESPVPEQCEKKIERKEQLLDLSNGEPTRKLPQGVVYGVVRRSDQNQQKEMVVYGWSTSQLKEEMNYIKDVRATLEKVRKRMYGDYDEMRQKIRQLTQELSVSHAQQEYLENHIQTQSSALDRFNAMNSALASDSIGLQKTLVDVTLENSNIKDQIRNLQQTYEASMDKLREKQRQLEVAQVENQLLKMKVESSQEANAEVMREMTKKLYSQYEEKLQEEQRKHSAEKEALLEETNSFLKAIEEANKKMQAAEISLEEKDQRIGELDRLIERMEKERHQLQLQLLEHETEMSGELTDSDKERYQQLEEASASLRERIRHLDDMVHCQQKKVKQMVEENNELQSRLDYLTETQAKTEVETREIGVGCDLLPSQTGRTREIVMPSRNYTPYTRVLELTMKKTLT

SEQ ID NO: 48257 - protein, 445 aa, Homo sapiens
MLRSTSTVTLLSGGAARTPGAPSRRANVCRLRLTVPPESPVPEQCEKKIERKEQLLDLSNGEPTRKLPQGVVYGVVRRSDQNQQKEMVVYGWSTSQLKEEMNYIKDVRATLEKVRKRMYGDYDEMRQKIRQLTQELSVSHAQQEYLENHIQTQSSALDRFNAMNSALASDSIGLQKTLVDVTLENSNIKDQIRNLQQTYEASMDKLREKQRQLEVAQVENQLLKMKVESSQEANAEVMREMTKKLYSQYEEKLQEEQRKHSAEKEALLEETNSFLKAIEEANKKMQAAEISLEEKDQRIGELDRLIERMEKERHQLQLQLLEHETEMSGELTDSDKERYQQLEEASASLRERIRHLDDMVHCQQKKVKQMVEEIESLKKKLQQKQLLILQLLEKISFLEGENNELQSRLDYLTETQAKTEVETREIGVGCDLLPRRCKQSSQRKN

SEQ ID NO: 48258 - protein, 550 aa, Homo sapiens
MLRSTSTVTLLSGGAARTPGAPSRRANVCRLRLTVPPESPVPEQCEKKIERKEQLLDLSNGEPTRKLPQGVVYGVVRRSDQNQQKEMVVYGWSTSQLKEEMNYIKDVRATLEKVRKRMYGDYDEMRQKIRQLTQELSVSHAQQEYLENHIQTQSSALDRFNAMNSALASDSIGLQKTLVDVTLENSNIKDQIRNLQQTYEASMDKLREKQRQLEVAQVENQLLKMKVESSQEANAEVMREMTKKLYSQYEEKLQEEQRKHSAEKEALLEETNSFLKAIEEANKKMQAAEISLEEKDQRIGELDRLIERMEKERHQLQLQLLEHETEMSGELTDSDKERYQQLEEASASLRERIRHLDDMVHCQQKKVKQMVEEIESLKKKLQQKQLLILQLLEKISFLEGENNELQSRLDYLTETQAKTEVETREIGVGCDLLPRLPFRQNDSSSHCQKSGSPISSEERRRRDKQHLDDITAARLLPLHHMPTQLLSIEESLALQKQQKQNYEEMQAKLAAQKLAERLNIKMRSYNPEGESSGRYREVRDEDDDWSSDEF

SEQ ID NO: 48259 - protein, 435 aa, Homo sapiens
MLRSTSTVTLLSGGAARTPGAPSRRANVCRLRLTVPPESPVPEQCEKKIERKEQLLDLSNGEPTRKLPQGVVYGVVRRSDQNQQKEMVVYGWSTSQLKEEMNYIKDVSHAQQEYLENHIQTQSSALDRFNAMNSALASDSIGLQKTLVDVTLENSNIKDQIRNLQQTYEASMDKLREKQRQLEVAQVENQLLKMKVESSQEANAEVMREMTKKLYSQYEEKLQEEQRKHSAEKEALLEETNSFLKAIEEANKKMQAAEISLEEKDQRIGELDRLIERMEKERHQLQLQLLEHETEMSGELTDSDKERYQQLEEASASLRERIRHLDDMVHCQQKKVKQMVEEIESLKKKLQQKQLLILQLLEKISFLEGENNELQSRLDYLTETQAKTEVETREIGVGCDLLPSQTGRTREIVMPSRNYTPYTRVLELTMKKTLT

SEQ ID NO: 48260 - protein, 466 aa, Homo sapiens; identical to SEQ ID NO: 48253

SEQ ID NO: 48261 - protein, 438 aa, Homo sapiens; identical to SEQ ID NO: 48256

SEQ ID NO: 48262 - protein, 466 aa, Homo sapiens; identical to SEQ ID NO: 48253

SEQ ID NO: 48263 - protein, 775 aa, Homo sapiens
MEKFGMNFGGGPSKKDLLETIETQKKQLLQYQARLKDVVRAYKSLLKEKEALEASIKVLSVSHEADVGLAGVQLPGLTFPDSVDDRCSTHSEDSTGTATSLDTAASLTSTKGEFGVEDDRPARGPPPPKSEEASWSESGVSSSSGDGPFAGGEVDKRLHQLKTQLATLTSSLATVTQEKSRMEASYLADKKKMKQDLEDASNKAEEERARLEGELKGLQEQIAETKARLITQQHDRAQEQSDHALMLRELQKLLQEERTQRQDLELRLEETREALAGRAYAAEQMEGFELQTKQLTREVEELKSELQAIRDEKNQPDPRLQELQEEAARLKSHFQAQLQQEMRKTALAEDQLRQQSQVEEQRVAALENQISEVSELLGTYEKAKQKDQLAIQKLKERILQLDLENKTLALAASSRSPLDSHGEESSLDVNVLKDKMEKLKRLLQVAARKSQVTLDVEKLCDLEIMPSSEAADGEKATALYYQQELKQLKEEFERYKMRAQVVLKSKNTKDGNLGKELEAAQEQLAELKEKYISLRLSCEELEHQHQQEADDWKQELARLQQLHRQELERCQLDFRDRTLKLEEELHKQRDRALAVLTEKDLELEQLRSVALASGLPGRRSPVGGGGPGDPADTSSSDSLTQALQLAAANEPTFFLYAEQLARKEVEITSLRKQKHRLEVEVHQLQDRLLEEGERHREEVAALQSHIEKNIRDQSREGANLEYLKNIIYRFLTLPDSLGRQQTLTAILTILHFSPEEKQVIMRLPTSASWWPSGKR

SEQ ID NO: 48264 - protein, 1684 aa, Homo sapiens
MEDLVQDGVASPATPGTGKSKLETLPKEDLIKFAKKQMMLIQKAKSRCTELEKEIEELRSKPVTEGTGDIIKALTERLDALLLEKAETEQQCLSLKKENIKMKQEVEDSVTKMGDAHKELEQSHINYVKEIENLKNELMAVRSKYSEDKANLQKQLEEAMNTQLELSEQLKFQNNSEDNVKKLQEEIEKIRPGFEEQILYLQKQLDATTDEKKETVTQLQNIIEANSQHYQKNINSLQEELLQLKAIHQEEVKELMCQIEASAKEHEAEINKLNELKENLVKQCEASEKNIQKKYECELENLRKATSNANQDNQICSILLQENTFVEQVVNEKVKHLEDTLKELESQHSILKDEVTYMNNLKLKLEMDAQHIKDEFFHEREDLEFKINELLLAKEEQGCVIEKLKSELAGLNKQFCYTVEQHNREVQSLKEQHQKEISELNETFLSDSEKEKLTLMFEIQGLKEQCENLQQEKQEAILNYESLREIMEILQTELGESAGKISQEFESMKQQQASDVHELQQKLRTAFTEKDALLETVNRLQGENEKLLSQQELVPELENTIKNLQEKNGVYLLSLSQRDTMLKELEGKINSLTEEKDDFINKLKNSHEEMDNFHKKCEREERLILELGKKVEQTIQYNSELEQKVNELTGGLEETLKEKDQNDQKLEKLMVQMKVLSEDKEVLSAEVKSLYEENNKLSSEKKQLSRDLEVFLSQKEDVILKEHITQLEKKLQLMVEEQDNLNKLLENEQVQKLFVKTQLYGFLKEMGSEVSEDSEEKDVVNVLQAVGESLAKINEEKCNLAFQRDEKVLELEKEIKCLQEESVVQCEELKSLLRDYEQEKVLLRKELEEIQSEKEALQSDLLEMKNANEKTRLENQNLLIQVEEVSQTCSKSEIHNEKEKCFIKEHENLKPLLEQKELRDRRAELILLKDSLAKSPSVKNDPLSSVKELEEKIENLEKECKEKEEKINKIKLVAVKAKKELDSSRKETQTVKEELESLRSEKDQLSASMRDLIQGAESYKNLLLEYEKQSEQLDVEKERANNFEHRIEDLTRQLRNSTLQCETINSDNEDLLARIETLQSNAKLLEVQILEVQRAKAMVDKELEAEKLQKEQKIKEHATTVNELEELQVQLQKQKKQLQKTMQELELVKKDAQQTTLMNMEIADYERLMKELNQKLTNKNNKIEDLEQEIKIQKQKQETLQEEITSLQSSVQQYEEKNTKIKQLLVKTKKELADSKQAETDHLILQASLKGELEASQQQVEVYKIQLAEITSEKHKIHEHLKTSAEQHQRTLSAYQQRVTALQEECRAAKAEQATVTSEFESYKVRVHNVLKQQKNKSMSQAETEGAKQEREHLEMLIDQLKIKLQDSQNNLQINVSELQTLQSEHDTLLERHNKMLQETVSKEAELREKLCSIQSENMMMKSEHTQTVSQLTSQNEVLRNSFRDQVRHLQEEHRKTVETLQQQLSKMEAQLFQLKNEPTTRSPVSSQQSLKNLRERRNTDLPLLDMHTVTREEGEGMETTDTESVSSASTYTQSLEQLLNSPETKLEPPLWHAEFTKEELVQKLSSTTKSADHLNGLLRETEATNAILMEQIKLLKSEIRRLERNQEREKSAANLEYLKNVLLQFIFLKPGSERERLLPVINTMLQLSPEEKGKLAAVAQGEEENASRSSGWASYLHSWSGLR

SEQ ID NO: 48265 - protein, 683 aa, Homo sapiens
MCQIEASAKEHEAEINKLNELKENLVKQCEASEKNIQKKYECELENLRKATSNANQDNQICSILLQENTFVEQVVNEKVKHLEDTLKELESQHSILKDEVTYMNNLKLKLEMDAQHIKDEFFHEREDLEFKINELLLAKEEQGCVIEKLKSELAGLNKQFCYTVEQHNREVQSLKEQHQKEISELNETFLSDSEKEKLTLMFEIQGLKEQCENLQQEKQEAILNYESLREIMEILQTELGESAGKISQEFESMKQQQASDVHELQQKLRTAFTEKDALLETVNRLQGENEKLLSQQELVPELENTIKNLQEKNGVYLLSLSQRDTMLKELEGKINSLTEEKDDFINKLKNSHEEMDNFHKKCEREERLILELGKKVEQTIQYNSELEQKVNELTGGLEETLKEKDQNDQKLEKLMVQMKVLSEDKEVLSAEVKSLYEETINSVQKKQLSRDLEVFLSQKEDVILKEHITQLEKKLQLMVEEQDNLNKLLENEQVQKLFVKTQLYGFLKEMGSEVSEDSEEKDVVNVLQAVGESLAKINEEKCNLAFQRDEKVLELEKEIKCLQEESVVQCEELKSLLRDYEQEKVLLRKELEEIQSEKEALQSDLLEMKNANEKTRLENQNLLIQVEEVSQTCSKSEIHNEKEKCFIKEHENLKPLLEQKELRDRRAELILLKDSLAKSPSKK

SEQ ID NO: 48266 - protein, 448 aa, Homo sapiens
MEDLVQDGVASPATPGTGKSKLETLPKEDLIKFAKKQMMLIQKAKSRCTELEKEIEELRSKPVTEGTGDIIKALTERLDALLLEKAETEQQCLSLKKENIKMKQEVEDSVTKMGDAHKELEQSHINYVKEIENLKNELMAVRSKYSEDKANLQKQLEEAMNTQLELSEQLKFQNNSEDNVKKLQEEIEKIRPGFEEQILYLQKQLDATTDEKKETVTQLQNIIEANSQHYQKNINSLQEELLQLKAIHQEEVKELMCQIEASAKEHEAEINKLNELKENLVKQCEASEKNIQKKYECELENLRKATSNANQDNQICSILLQENTFVEQVVNEKVKHLEDTLKELESQHSILKDEVTYMNNLKLKLEMDAQHIKDEFFHEREDLEFKINELLLAKEEQGCVIEKLKSELAGLNKQFCYTVEQHNREVQSLKEQHQKEISELNETFLSDS

SEQ ID NO: 48267 - protein, 625 aa, Homo sapiens
MAQALSEEEFQRMQAQLLELRTNNYQLSDELRKNGVELTSLRQKVAYLDKEFSKAQKALSKSKKAQEVEVLLSENEMLQAKLHSQEEDFRLQNSTLMAEFSKERYGKEAGKFSAVSEGQGDPPGGPAPTVLAPMPLAEVELKWEMEKEEKRLLWEQLQGLESSKQAETSRLQEELAKLSEKLKKKQESFCRLQTEKETLFNDSRNKIEELQQRKEADHKAQLARTQKLQQELEAANQSLAELRDQRQGERLEHAAALRALQDQVSIQSADAQEQVEGLLAENNALRTSLAALEQIQTAKTQELNMLREQTTGLAAELQQQQAEYEDLMGQKDDLNSQLQESLRANSRLLEQLQEIGQEKEQLTQELQEARKSAEKRKAMLDELAMETLQEKSQHKEELGAVRLRHEKEVLGVRARYERELRELHEDKKRQEEELRGQIREEKARTRELETLQQTVEELQAQVHSMDGAKGWFERRLKEAEGKEEELQDVRDQLEQAQEERDCHLKTISSLKQEVKDTVDGQRILEKKGSAALKDLKRQLHLERKRADKLQERLQDILTNSKSRSGLEELVLSEMNSPSRTQTGDSSSISSFSYREILREKESSAVPARVRGKEEPTAPASLNPKI

SEQ ID NO: 48268 - protein, 810 aa, Homo sapiens [sequence omitted]

SEQ ID NO: 48269 - protein, 841 aa, Homo sapiens
MAQALSEEEFQRMQAQLLELRTNNYQLSDELRKNGVELTSLRQKVAYLDKEFSKAQKALSKSKKAQEVEVLLSENEMLQAKLHSQEEDFRLQNSTLMAEFSKLCSQMEQLEQENQQLKEGAAGAGVAQAGPLVDGELLRLQAENTALQKNVAALQERYGKEAGKFSAVSEGQGDPPGGPAPTVLAPMPLAEVELKWEMEKEEKRLLWEQLQGLESSKQAETSRLQEELAKLSEKLKKKQESFCRLQTEKETLFNDSRNKIEELQQRKEADHKAQLARTQKLQQELEAANQSLAELRDQRQGERLEHAAALRALQDQVSIQSADAQEQVEGLLAENNALRTSLAALEQIQTAKTQELNMLREQTTGLAAELQQQQAEYEDLMGQKDDLNSQLQESLRANSRLLEQLQEIGQEKEQLTQELQEARKSAEKRKAMLDELAMETLQEKSQHKEELGAVRLRHEKEVLGVRARYERELRELHEDKKRQEEELRGQIREEKARTRELETLQQTVEELQAQVHSMDGAKGWFERRLKEAEESLQQQQQEQEEALKQCREQHAAELKGKEEELQDVRDQLEQAQEERDCHLKTISSLKQEVKDTVDGQRILEKKGSAALKDLKRQLHLERKRADKLQERLQDILTNSKSRSGLEELVLSEMNSPSRTQTGDSSSISSFSYREILREKESSAVPARSLSSSPQAQPPRPAELSDEEVAELFQRLAETQQEKWMLEEKVKHLEVSSASMAEDLCRKSAIIETYVMDSRIDVSVAAGHTDRSGLGSVLRDLVKPGDENLREMNKKLQNMLEEQLTKNMHLHKDMEVLSQEIVRLSKECVGPPDPDLEPGETS

SEQ ID NO: 48270 - protein, 796 aa, Homo sapiens [sequence omitted]

SEQ ID NO: 48271 - protein, 810 aa, Homo sapiens
MAQALSEEEFQRMQAQLLELRTNNYQLSDELRKNGVELTSLRQKVAYLDKEFSKAQKSPGPCLPLQEVEVLLSENEMLQAKLHSQEEDFRLQNSTLMAEFSKLCSQMEQLEQENQQLKEGAAGAGVAQAGPLVDGELLRLQAENTALQKNVAALQERYGKEAGKFSAVSEGQGDPPGGPAPTVLAPMPLAEVELKWEMEKEEKRLLWEQLQGLESSKQAETSRLQEELAKLSEKLKKKQESFCRLQTEKETLFNDSRNKIEELQQRKEADHKAQLARTQKLQQELEAANQSLAELRDQRQGERLEHAAALRALQDQIQTAKTQELNMLREQTTGLAAELQQQQAEYEDLMGQKDDLNSQLQESLRANSRLLEQLQEIGQEKEQLTQELQEARKSAEKRKAMLDELAMETLQEKSQHKEELGAVRLRHEKEVLGVRARYERELRELHEDKKRQEEELRGQIREEKARTRELETLQQTVEELQAQVHSMDGAKGWFERRLKEAEESLQQQQQEQEEALKQCREQHAAELKGKEEELQDVRDQLEQAQEERDCHLKTISSLKQEVKDTVDGQRILEKKGSAALKDLKRQLHLERKRADKLQERLQDILTNSKSRSGLEELVLSEMNSPSRTQTGDSSSISSFSYREILREKESSAVPARSLSSSPQAQPPRPAELSDEEVAELFQRLAETQQEKWMLEEKVKHLEVSSASMAEDLCRKSAIIETYVMDSRIDVSVAAGHTDRSGLGSVLRDLVKPGDENLREMNKKLQNMLEEQLTKNMHLHKDMEVLSQEIVRLSKECVGPPDPDLEPGETS

SEQ ID NO: 48272 - protein, 474 aa, Homo sapiens
MKRVLVLLLAVAFGHALERGRDYEKNKVCKEFSHLGKEDFTSLSLVLYSRKFPSGTFEQVSQLVKEVVSLTEACCAEGADPDCYDTRTSALSAKSCESNSPFPVHPGTAECCTKEGLERKLCMAALKHQPQEFPTYVEPTNDEICEAFRKDPKEYANQFMWEYSTNYGQAPLSLLVSYTKSYLSMVGSCCTSASPTVCFLKERLQLKHLSLLTTLSNRVCSQYAAYGEKKSRLSNLIKLAQKVPTADLEDVLPLAEDITNILSKCCESASEDCMAKELPEHTVKLCDNLSTKNSKFEDCCQEKTAMDVFVCTYFMPAAQLPELPDVELPTNKDVCDPGNTKVMDKYTFELSRRTHLPEVFLSKVLEPTLKSLGECCDVEDSTTCFNAKGPLLKKELSSFIDKGQELCADYSENTFTEYKKKLAERLKAKLPDATPTELAKLVNKHSDFASNCCSINSPPLYCDSEIDAELKNIL

SEQ ID NO: 48273 - protein, 145 aa, Homo sapiens
MKRVLVLLLAVAFGHALERGRDYEKNKVCKEFSHLGKEDFTSLSLVLYSRKFPSGTFEQVSQLVKEVVSLTEACCAEGADPDCYDTRTSALSAKSCESNSPFPVHPGTAECCTKEGLERKLCMAALKHQPQEFPTYVEPTNDEIC

SEQ ID NO: 48274 - protein, 493 aa, Homo sapiens
MLWSWSEERGGAARLSGRKMKRVLVLLLAVAFGHALERGRDYEKNKVCKEFSHLGKEDFTSLSLVLYSRKFPSGTFEQVSQLVKEVVSLTEACCAEGADPDCYDTRTSALSAKSCESNSPFPVHPGTAECCTKEGLERKLCMAALKHQPQEFPTYVEPTNDEICEAFRKDPKEYANQFMWEYSTNYGQAPLSLLVSYTKSYLSMVGSCCTSASPTVCFLKERLQLKHLSLLTTLSNRVCSQYAAYGEKKSRLSNLIKLAQKVPTADLEDVLPLAEDITNILSKCCESASEDCMAKELPEHTVKLCDNLSTKNSKFEDCCQEKTAMDVFVCTYFMPAAQLPELPDVELPTNKDVCDPGNTKVMDKYTFELSRRTHLPEVFLSKVLEPTLKSLGECCDVEDSTTCFNAKGPLLKKELSSFIDKGQELCADYSENTFTEYKKKLAERLKAKLPDATPTELAKLVNKHSDFASNCCSINSPPLYCDSEIDAELKNIL

SEQ ID NO: 48275 - protein, 222 aa, Homo sapiens
MAASVRQARSLLGVAATLAPGSRGYRARPPPRRRPGPRWPDPEDLLTPRWQLGPRYAAKQFARYGAASGVVPGSLWPSPEQLRELEAEEREWYPSLATMQESLRVKQLAEEQKRREREQHIAECMAKMPQMIVNWQQQQRENWEKAQADKERRARLQAEAQELLGYQVDPRSARFQELLQDLEKKERKRLKEEKQKRKKEARAAALAAAVAQDPAASGAPSS

SEQ ID NO: 48276 - protein, 345 aa, Homo sapiens
MVAALLGGGGEARGGTVPGAWLCLMALLQLLGSAPRGSGLAHGRRLICWQALLQCQGEPECSYAYNQYAEACAPVLAQHGGGDAPGAAAAAFPASAASFSSRWRCPSHCISALIQLNHTRRGPALEDCDCAQDENCKSTKRAIEPCLPRTSGGGAGGPGAGGVMGCTEARRRCDRDSRCNLALSRYLTYCGKVFNGLRCTDECRTVIEDMLAMPKAALLNDCVCDGLERPICESVKENMARLCFGAELGNGPGSSGSDGGLDDYYDEDYDDEQRTGGAGGEQPLDDDDGVPHPPRPGSGAAASGGRGDLPYGPGRRSSGGGGRLAPRGAWTPLASILLLLLGPLF

SEQ ID NO: 48277 - protein, 313 aa, Homo sapiens
MCTALSPKVRSGPGLSDMHQYSQWLASRHEANLLPMKEDLALWLTNLLGKEITAETFMEKLDNGALLCQLAETMQEKFKESMDANKPTKNLPLKKIPCKTSAPSGSFFARDNTANFLSWCRDLGVDETCLFESEGLVLHKQPREVCLCLLELGRIAARYGVEPPGLIKLEKEIEQEETLSAPSPSPSPSSKSSGKKSTGNLLDDAVKRISEDPPCKCPNKFCVERLSQGRYRVGEKILFIRMLHNKHVMVRVGGGWETFAGYLLKHDPCRMLQISRVDGKTSPIQSKSPTLKDMNPDNYLVVSASYKAKKEIK

SEQ ID NO: 48278 - protein, 313 aa, Homo sapiens; identical to SEQ ID NO: 48277

SEQ ID NO: 48279 - protein, 313 aa, Homo sapiens; identical to SEQ ID NO: 48277

SEQ ID NO: 48280 - protein, 181 aa, Homo sapiens
MCTALSPKVRSGPGLSDMHQYSQWLASRHEANLLPMKEDLALWLTNLLGKEITAETFMEKLDNGALLCQLAETMQEKFKESMDANKPTKNLPLKKIPCKTSAPSGSFFARDNTANFLSWCRDLGVDETCLFESEGLVLHKQPREVCLCLLELGRIAARYGVEPPGLIKLEKEIEQEETLSA

SEQ ID NO: 48281 - protein, 205 aa, Homo sapiens
MCTALSPKVRSGPGLSDMHQYSQWLASRHEANLLPMKEDLALWLTNLLGKEITAETFMEKLDNGALLCQLAETMQEKFKESMDANKPTKNLPLKKIPCKTSAPSGSFFARDNTANFLSWCRDLGVDETCLFESEGLVLHKQPREVCLCLLELGRIAARYGVEPPGLIKLEKEIEQEETLSAPSPSPSPSSKSSGKKSTGNLLDDA

SEQ ID NO: 48282 - protein, 136 aa, Homo sapiens
MCTALSPKVRSGPGLSDMHQYSQWLASRHEANLLPMKEDLALWLTNLLGKEITAETFMEKLDNGALLCQLAETMQEKFKESMDANKPTKNLPLKKIPCKTSAPSGSFFARDNTANFLSWCRDLGVDETCLFESEGL

SEQ ID NO: 48283 - protein, 155 aa, Homo sapiens
MCTALSPKVRSGPGLSDMHQYSQWLASRHEANLLPMKEDLALWLTNLLGKEITAETFMEKLDNGALLCQLAETMQEKFKESMDANKPTKNLPLKKIPCKTSAPSGSFFARDNTANFLSWCRDLGVDETCLFESEGLVLHKQPREVCLCLLELGRI

SEQ ID NO: 48284 - protein, 680 aa, Homo sapiens
MADPVAGIAGSAAKSVRPFRSSEAYVEAMKEDLAEWLNALYGLGLPGGGDGFLTGLATGTTLCQHANAVTEAARALAAARPARGVAFQAHSVVPGSFMARDNVATFIGWCRVELGVPEVLMFETEDLVLRKNEKSVVLCLLEVARRGARLGLLAPRLVQFEQEIERELRAAPPAPNAPAAGEDTTETAPAPGTPARGPRMTPSDLRNLDELVREILGRCTCPDQFPMIKVSEGKYRVGDSSLLIFVRVLRSHVMVRVGGGWDTLEHYLDKHDPCRCSSTAHRPPQPRVCTFSPQRVSPTTSPRPASPVPGSERRGSRPEMTPVSLRSTKEGPETPPRPRDQLPPHPRSRRYSGDSDSSASSAQSGPLGTRSDDTGTGPRRERPSRRLTTGTPASPRRPPLRSQSRDRLDRGRPRGAPGGRGAQLSVPSPARRARSQSREEQAVLLVRRDRDGQHSWVPRGRGSGGSGRSTPQTPRARSPAAPRLSRVSSPSPELGTTPASIFRTPLQLDPQQEQQLFRRLEEEFLANARALEAVASVTPTGPAPDPARAPDPPAPDSAYCSSSSSSSSLSVLGGKCGQPGDSGRTANGLPGPRSQALSSSSDEGSPCPGMGGPLDAPGSPLACTEPSRTWARGRMDTQPDRKPSRIPTPRGPRRPSGPAELGTWHALHSVTPRAEPDSWM

SEQ ID NO: 48285 - protein, 337 aa, Homo sapiens
MADPVAGIAGSAAKSVRPFRSSEAYVEAMKEDLAEWLNALYGLGLPGGGDGFLTGLATGTTLCQHANAVTEAARALAAARPARGVAFQAHSVVPGSFMARDNVATFIGWCRVELGVPEVLMFETEDLVLRKNEKSVVLCLLEVARRGARLGLLAPRLVQFEQEIERELRAAPPAPNAPAAGEDTTETAPAPGTPARGPRMTPSDLRNLDELVREILGRCTCPDQFPMIKVSEGKYRVGDSSLLIFVRVLRSHVMVRVGGGWDTLEHYLDKHDPCRCSSTAHRPPQPRVCTFSPQRVSPTTSPRPASPVPGSERRGSRPEMTPVSLRSTKEGPETPPR

SEQ ID NO: 48286 - protein, 329 aa, Homo sapiens
MADPVAGIAGSAAKSVRPFRSSEAYVEAMKEDLAEWLNALYGLGLPGGGDGFLTGLATGTTLCQHANAVTEAARALAAARPARGVAFQAHSVVPGSFMARDNVATFIGWCRVELGVPEVLMFETEDLVLRKNEKSVVLCLLEVARRGARLGLLAPRLVQFEQEIERELRAAPPAPNAPAAGEDTTETAPAPGTPARGPRMTPSDLRNLDELVREILGRCTCPDQFPMIKVSEGKYRVGDSSLLIFVRVLRSHVMVRVGGGWDTLEHYLDKHDPCRCSSTGPGISCPPIPAPAATPGTVTPQPPPPRAAPLVPAVMTQALAPGGSDPAGG

SEQ ID NO: 48287 - protein, 537 aa, Homo sapiens
MADPVAGIAGSAAKSVRPFRSSEAYVEAMKEDLAEWLNALYGLGLPGGGDGFLTGLATGTTLCQHANAVTEAARALAAARPARGVAFQAHSVVPGSFMARDNVATFIGWCRVELGVPEVLMFETEDLVLRKNEKSVVLCLLEVARRGARLGLLAPRLVQFEQEIERELRAAPPAPNAPAAGEDTTETAPAPGTPARGPRMTPSDLRNLDELVREILGRCTCPDQFPMIKVSEGKYRVGDSSLLIFVRVLRSHVMVRVGGGWDTLEHYLDKHDPCRCSSTAHRPPQPRVCTFSPQRVSPTTSPRPASPVPGSERRGSRPEMTPVSLRSTKEGPETPPRPRDQLPPHPRSRRYSGDSDSSASSAQSGPLGTRSDDTGTGPRRERPSRRLTTGTPASPRRPPACAASPETGWIAAGPGGPQEAGEPSCRSPALPGGPGARAARSRLCCLCAGIETGSTHGCQGAGAVGARAGAPPRLPVPAALQHPGFPGSPAPVQSWAPHRPASSAHPCSSTRSRSSSCSGAWKRSSWPMPGPLRLLLA

SEQ ID NO: 48288 - protein, 537 aa, Homo sapiens; identical to SEQ ID NO: 48287

SEQ ID NO: 48289 - protein, 537 aa, Homo sapiens; identical to SEQ ID NO: 48287

SEQ ID NO: 48290 - protein, 138 aa, Homo sapiens
MADPVAGIAGSAAKSVRPFRSSEAYVEAMKEDLAEWLNALYGLGLPGGGDGFLTGLATGTTLCQHANAVTEAARALAAARPARGVAFQAHSVVPGSFMARDNVATFIGWCRVELGVPEVLMFETEDLVLRKNEKSVVL

SEQ ID NO: 48291 - protein, 143 aa, Homo sapiens
MADPVAGIAGSAAKSVRPFRSSEAYVEAMKEDLAEWLNALYGLGLPGGGDGFLTGLATGTTLCQHANAVTEAARALAAARPARGVAFQAHSVVPGSFMARDNVATFIGWCRVELGVPEVLMFETEDLVLRKNEKSVVLCLLEV

SEQ ID NO: 48292 - protein, 537 aa, Homo sapiens; identical to SEQ ID NO: 48287

SEQ ID NO: 48293 - protein, 678 aa, Homo sapiens
MAPSLSPGPAALRRAPQLLLLLLAAECALAALLPAREATQFLRPRQRRAFQVFEEAKQGHLERECVEELCSREEAREVFENDPETDYFYPRYLDCINKYGSPYTKNSGFATCVQNLPDQCTPNPCDRKGTQACQDLMGNFFCLCKAGWGGRLCDKDVNECSQENGGCLQICHNKPGSFHCSCHSGFELSSDGRTCQDIDECADSEACGEARCKNLPGSYSCLCDEGFAYSSQEKACRDVDECLQGRCEQVCVNSPGSYTCHCDGRGGLKLSQDMDTCEDILPCVPFSVAKSVKSLYLGRMFSGTPVIRLRFKRLQPTRLVAEFDFRTFDPEGILLFAGGHQDSTWIVLALRAGRLELQLRYNGVGRVTSSGPVINHGMWQTISVEELARNLVIKVNRDAVMKIAVAGDLFQPERGLYHLNLTVGGIPFHEKDLVQPINPRLDGCMRSWNWLNGEDTTIQETVKVNTRMQCFSVTERGSFYPGSGFAFYSLDYMRTPLDVGTESTWEVEVVAHIRPAADTGVLFALWAPDLRAVPLSVALVDYHSTKKLKKQLVVLAVEHTALALMEIKVCDGQEHVVTVSLRDGEATLEVDGTRGQSEVSAAQLQERLAVLERHLRSPVLTFAGGLPDVPVTSAPVTAFYRGCMTLEVNRRLLDLDEAAYKHSDITAHSCPPVEPAAA

SEQ ID NO: 48294 - protein, 624 aa, Homo sapiens
MCMCQASPPPAALAGCLLSSCVQPAREHGGAFSKAEWLSNCINKYGSPYTKNSGFATCVQNLPDQCTPNPCDRKGTQACQDLMGNFFCLCKAGWGGRLCDKDVNECSQENGGCLQICHNKPGSFHCSCHSGFELSSDGRTCQDIDECADSEACGEARCKNLPGSYSCLCDEGFAYSSQEKACRDVDECLQGRCEQVCVNSPGSYTCHCDGRGGLKLSQDMDTCEDILPCVPFSVAKSVKSLYLGRMFSGTPVIRLRFKRLQPTRLVAEFDFRTFDPEGILLFAGGHQDSTWIVLALRAGRLELQLRYNGVGRVTSSGPVINHGMWQTISVEELARNLVIKVNRDAVMKIAVAGDLFQPERGLYHLNLTVGGIPFHEKDLVQPINPRLDGCMRSWNWLNGEDTTIQETVKVNTRMQCFSVTERGSFYPGSGFAFYSLDYMRTPLDVGTESTWEVEVVAHIRPAADTGVLFALWAPDLRAVPLSVALVDYHSTKKLKKQLVVLAVEHTALALMEIKVCDGQEHVVTVSLRDGEATLEVDGTRGQSEVSAAQLQERLAVLERHLRSPVLTFAGGLPDVPVTSAPVTAFYRGCMTLEVNRRLLDLDEAAYKHSDITAHSCPPVEPAAA

SEQ ID NO: 48295 - protein, 721 aa, Homo sapiens
MAPSLSPGPAALRRAPQLLLLLLAAECALAALLPAREATQFLRPRQRRAFQVFEEAKQGHLERECVEELCSREEAREVFENDPETDYFYPRYLDCINKYGSPYTKNSGFATCVQNLPDQCTPNPCDRKGTQACQDLMGNFFCLCKAGWGGRLCDKDVNECSQENGGCLQICHNKPGSFHCSCHSGFELSSDGRTCQDIDECADSEACGEARCKNLPGSYSCLCDEGFAYSSQEKACRDVDECLQGRCEQVCVNSPGSYTCHCDGRGGLKLSQDMDTCELEAGWPLPRHRRDSGPAARPGRGAQGSRSEGHIPDRRGPRPWQDILPCVPFSVAKSVKSLYLGRMFSGTPVIRLRFKRLQPTRLVAEFDFRTFDPEGILLFAGGHQDSTWIVLALRAGRLELQLRYNGVGRVTSSGPVINHGMWQTISVEELARNLVIKVNRDAVMKIAVAGDLFQPERGLYHLNLTVGGIPFHEKDLVQPINPRLDGCMRSWNWLNGEDTTIQETVKVNTRMQCFSVTERGSFYPGSGFAFYSLDYMRTPLDVGTESTWEVEVVAHIRPAADTGVLFALWAPDLRAVPLSVALVDYHSTKKLKKQLVVLAVEHTALALMEIKVCDGQEHVVTVSLRDGEATLEVDGTRGQSEVSAAQLQERLAVLERHLRSPVLTFAGGLPDVPVTSAPVTAFYRGCMTLEVNRRLLDLDEAAYKHSDITAHSCPPVEPAAA

SEQ ID NO: 48296 - protein, 379 aa, Homo sapiens
MFSGTPVIRLRFKRLQPTRLVAEFDFRTFDPEGILLFAGGHQDSTWIVLALRAGRLELQLRYNGVGRVTSSGPVINHGMWQTISVEELARNLVIKVNRDAVMKIAVAGDLFQPERGLYHLNLTVGGIPFHEKDLVQPINPRLDGCMRSWNWLNGEDTTIQETVKVNTRMQCFSVTERGSFYPGSGFAFYSLDYMRTPLDVGTESTWEVEVVAHIRPAADTGVLFALWAPDLRAVPLSVALVDYHSTKKLKKQLVVLAVEHTALALMEIKVCDGQEHVVTVSLRDGEATLEVDGTRGQSEVSAAQLQERLAVLERHLRSPVLTFAGGLPDVPVTSAPVTAFYRGCMTLEVNRRLLDLDEAAYKHSDITAHSCPPVEPAAA

SEQ ID NO: 48297 - protein, 405 aa, Homo sapiens
MDTCEDILPCVPFSVAKSVKSLYLGRMFSGTPVIRLRFKRLQPTRLVAEFDFRTFDPEGILLFAGGHQDSTWIVLALRAGRLELQLRYNGVGRVTSSGPVINHGMWQTISVEELARNLVIKVNRDAVMKIAVAGDLFQPERGLYHLNLTVGGIPFHEKDLVQPINPRLDGCMRSWNWLNGEDTTIQETVKVNTRMQCFSVTERGSFYPGSGFAFYSLDYMRTPLDVGTESTWEVEVVAHIRPAADTGVLFALWAPDLRAVPLSVALVDYHSTKKLKKQLVVLAVEHTALALMEIKVCDGQEHVVTVSLRDGEATLEVDGTRGQSEVSAAQLQERLAVLERHLRSPVLTFAGGLPDVPVTSAPVTAFYRGCMTLEVNRRLLDLDEAAYKHSDITAHSCPPVEPAAA

SEQ ID NO: 48298 - protein, 476 aa, Homo sapiens
MSGARCRTLYPFSGERHGQGLRFAAGELITLLQVPDGGWWEGEKEDGLRGWFPASYVQLLEKPGMVPPPPGEESQTVILPPGWQSYLSPQGRRYYVNTTTNETTWERPSSSPGIPASPGSHRSSLPPTVNGYHASGTPAHPPETAHMSVRKSTGDSQNLGSSSPSKKQSKENTITINCVTFPHPDTMPEQQLLKPTEWSYCDYFWADKKDPQGNGTVAGFELLLQKQLKGKQMQKEMSEFIRERIKIEEDYAKNLAKLSQNSLASQEEGSLGEAWAQVKKSLADEAEVHLKFSAKLHSEVEKPLMNFRENFKKDMKKCDHHIADLRKQLASRYASVEKARKALTERQRDLEMKTQQLEIKLSNKTEEDIKKARRKSTQAGDDLMRCVDLYNQAQSKWFEEMVTTTLELERLEVERVEMIRQHLCQYTQLRHETDMFNQSTVEPVDQLLRKVDPAKDRELWVREHKTGNIRPVDMEI

SEQ ID NO: 48299 - protein, 416 aa, Homo sapiens
MKPGMVPPPPGEESQTVILPPGWQSYLSPQGRRYYVNTTTNETTWERPSSSPGIPASPGSHRSSLPPTVNGYHASGTPAHPPETAHMSVRKSTGDSQNLGSSSPSKKQSKENTITINCVTFPHPDTMPEQQLLKPTEWSYCDYFWADKKDPQGNGTVAGFELLLQKQLKGKQMQKEMSEFIRERIKIEEDYAKNLAKLSQNSLASQEEGSLGEAWAQVKKSLADEAEVHLKFSAKLHSEVEKPLMNFRENFKKDMKKCDHHIADLRKQLASRYASVEKARKALTERQRDLEMKTQQLEIKLSNKTEEDIKKARRKSTQAGDDLMRCVDLYNQAQSKWFEEMVTTTLELERLEVERVEMIRQHLCQYTQLRHETDMFNQSTVEPVDQLLRKVDPAKDRELWVREHKTGNIRPVDMEI

SEQ ID NO: 48300 - protein, 336 aa, Homo sapiens
MSNMENSFDDVSCLSPQNLGSSSPSKKQSKENTITINCVTFPHPDTMPEQQLLKPTEWSYCDYFWADKKDPQGNGTVAGFELLLQKQLKGKQMQKEMSEFIRERIKIEEDYAKNLAKLSQNSLASQEEGSLGEAWAQVKKSLADEAEVHLKFSAKLHSEVEKPLMNFRENFKKDMKKCDHHIADLRKQLASRYASVEKARKALTERQRDLEMKTQQLEIKLSNKTEEDIKKARRKSTQAGDDLMRCVDLYNQAQSKWFEEMVTTTLELERLEVERVEMIRQHLCQYTQLRHETDMFNQSTVEPVDQLLRKVDPAKDRELWVREHKTGNIRPVDMEI

SEQ ID NO: 48301 - protein, 415 aa, Homo sapiens
KPGMVPPPPGEESQTVILPPGWQSYLSPQGRRYYVNTTTNETTWERPSSSPGIPASPGSHRSSLPPTVNGYHASGTPAHPPETAHMSVRKSTGDSQNLGSSSPSKKQSKENTITINCVTFPHPDTMPEQQLLKPTEWSYCDYFWADKKDPQGNGTVAGFELLLQKQLKGKQMQKEMSEFIRERIKIEEDYAKNLAKLSQNSLASQEEGSLGEAWAQVKKSLADEAEVHLKFSAKLHSEVEKPLMNFRENFKKDMKKCDHHIADLRKQLASRYASVEKARKALTERQRDLEMKTQQLEIKLSNKTEEDIKKARRKSTQAGDDLMRCVDLYNQAQSKWFEEMVTTTLELERLEVERVEMIRQHLCQYTQLRHETDMFNQSTVEPVDQLLRKVDPAKDRELWVREHKTGNIRPVDMEI

SEQ ID NO: 48302 - protein, 416 aa, Homo sapiens; identical to SEQ ID NO: 48299

SEQ ID NO: 48303 - protein, 181 aa, Homo sapiens
MVPPPPGEESQTVILPPGWQSYLSPQGRRYYVNTTTNETTWERPSSSPGIPASPGSHRSSLPPTVNGYHASGTPAHPPETAHMSVRKSTGDSQNLGSSSPSKKQSKENTITELERLEVERVEMIRQHLCQYTQLRHETDMFNQSTVEPVDQLLRKVDPAKDRELWVREHKTGNIRPVDMEI

SEQ ID NO: 48304 - protein, 290 aa, Homo sapiens
MPEQQLLKPTEWSYCDYFWADKKDPQGNGTVAGFELLLQKQLKGKQMQKEMSEFIRERIKIEEDYAKNLAKLSQNSLASQEEGSLGEAWAQVKKSLADEAEVHLKFSAKLHSEVEKPLMNFRENFKKDMKKCDHHIADLRKQLASRYASVEKARKALTERQRDLEMKTQQLEIKLSNKTEEDIKKARRKSTQAGDDLMRCVDLYNQAQSKWFEEMVTTTLELERLEVERVEMIRQHLCQYTQLRHETDMFNQSTVEPVDQLLRKVDPAKDRELWVREHKTGNIRPVDMEI

SEQ ID NO: 48305 - protein, 125 aa, Homo sapiens
MKTQQLEIKLSNKTEEDIKKARRKSTQAGDDLMRCVDLYNQAQSKWFEEMVTTTLELERLEVERVEMIRQHLCQYTQLRHETDMFNQSTVEPVDQLLRKVDPAKDRELWVREHKTGNIRPVDMEI

SEQ ID NO: 48306 - protein, 336 aa, Homo sapiens; identical to SEQ ID NO: 48300

SEQ ID NO: 48307 - protein, 478 aa, Homo sapiens
MAPKKKGKKGKAKGTPIVDGLAPEDMSKEQVEEHVSRIREELDREREERNYFQLERDKIHTFWEITRRQLEEKKAELRNKDREMEEAEERHQVEIKVYKQKVKHLLYEHQNNLTEMKAEGTVVMKLAQKEHRIQESVLRKDMRALKVELKEQELASEVVVKNLRLKHTEEITRMRNDFERQVREIEAKYDKKMKMLRDELDLRRKTELHEVEERKNGQIHTLMQRHEEAFTDIKNYYNDITLNNLALINSLKEQMEDMRKKEDHLEREMAEVSGQNKRLADPLQKAREEMSEMQKQLANYERDKQILLCTKARLKVREKELKDLQWEHEVLEQRFTKVQQERDELYRKFTAAIQEVQQKTGFKNLVLERKLQALSAAVEKKEVQFNEVLAASNLDPAALTLVSRKLEDVLESKNSTIKDLQYELAQVCKAHNDLLRTYEAKLLAFGIPLDNVGFKPLETAVIGQTLGQGPAGLVGTPT

SEQ ID NO: 48308 - protein, 453 aa, Homo sapiens
MSKEQVEEHVSRIREELDREREERNYFQLERDKIHTFWEITRRQLEEKKAELRNKDREMEEAEERHQVEIKVYKQKVKHLLYEHQNNLTEMKAEGTVVMKLAQKEHRIQESVLRKDMRALKVELKEQELASEVVVKNLRLKHTEEITRMRNDFERQVREIEAKYDKKMKMLRDELDLRRKTELHEVEERKNGQIHTLMQRHEEAFTDIKNYYNDITLNNLALINSLKEQMEDMRKKEDHLEREMAEVSGQNKRLADPLQKAREEMSEMQKQLANYERDKQILLCTKARLKVREKELKDLQWEHEVLEQRFTKVQQERDELYRKFTAAIQEVQQKTGFKNLVLERKLQALSAAVEKKEVQFNEVLAASNLDPAALTLVSRKLEDVLESKNSTIKDLQYELAQVCKAHNDLLRTYEAKLLAFGIPLDNVGFKPLETAVIGQTLGQGPAGLVGTPT

SEQ ID NO: 48309 - protein, 174 aa, Homo sapiens
MAPKKKGKKGKAKGTPIVDGLAPEDMSKEQVEEHVSRIREELDREREERNYFQLERDKIHTFWEITRRQLEEKKAELRNKDREMEEAEERHQVEIKVYKQKVKHLLYEHQNNLTEMKAEGTVVMKLAQKEHRIQESVLRKDMRALKVELKEQELASEVVVKNLRLKLRPSMIRR

SEQ ID NO: 48310 - protein, 382 aa, Homo sapiens
MVEEHVSRIREELDREREERNYFQLERDKIHTFWEITRRQLEEKKAELRNKDREMEEAEERHQVEIKVYKQKVKHLLYEHQNNLTEMKAEGTVVMKLAQKEHRIQESVLRKDMRALKVELKEQELASEVVVKNLRLKHTEEITRMRNDFERQVREIEAKYDKKMKMLRDELDLRRKTELHEVEERKNGQIHTLMQRHEEAFTDIKNYYNDITLNNLALINSLKEQMEDMRKKEDHLEREMAEVSGQNKRLADPLQKAREEMSEMQKQLANYERDKQILLCTKARLKVREKELKDLQWEHEVLEQRFTKVQQERDELYRKFTAAIQEVQQKTGFKNLVLERKLQALSAAVEKKEVQFNEVLAASNLDPAALTLVSRKLETFFC

SEQ ID NO: 48311 - protein, 238 aa, Homo sapiens
MLCCMRRTKQVEKNDDDQKIEQDGIKPEDKAHKAATKIQASFRGHITRKKLKGEKKDDVQAAEAEANKKDEAPVADGVEKKGEGTTTAEAAPATGSKPDEPGKAGETPSEEKKGEGDAATEQAAPQAPASSEEKAGSAETESATKASTDNSPSSKAEDAPAKEEPKQADVPAAVTAAAATTPAAEDAAAKATAQPPTETGESSQAEENIEAVDETKPKESARQDEGKEEEPEADQEHA

SEQ ID NO: 48312 - protein, 274 aa, Homo sapiens
MTKSCSELCHPALHFLPCLGGLRKNLQRAVRPSPYSLGFLTFWISRVEKNDDDQKIEQDGIKPEDKAHKAATKIQASFRGHITRKKLKGEKKDDVQAAEAEANKKDEAPVADGVEKKGEGTTTAEAAPATGSKPDEPGKAGETPSEEKKGEGDAATEQAAPQAPASSEEKAGSAETESATKASTDNSPSSKAEDAPAKEEPKQADVPAAVTAAAATTPAAEDAAAKATAQPPTETGESSQAEENIEAVDETKPKESARQDEGKEEEPEADQEHA

SEQ ID NO: 48313 - protein, 372 aa, Homo sapiens
MPPPQQGPCGHHLLLLLALLLPSLPLTRAPVPPGPAAALLQALGLRDEPQGAPRLRPVPPVMWRLFRRRDPQETRSGSRRTSPGVTLQPCHVEELGVAGNIVRHIPDRGAPTRASEPASAAGHCPEWTVVFDLSAVEPAERPSRARLELRFAAAAAAAPEGGWELSVAQAGQGAGADPGPVLLRQLVPALGPPVRAELLGAAWARNASWPRSLRLALALRPRAPAACARLAEASLLLVTLDPRLCHPLARPRRDAEPVLGGGPGGACRARRLYVSFREVGWHRWVIAPRGFLANYCQGQCALPVALSGSGGPPALNHAVLRALMHAAAPGAADLPCCVPARLSPISVLFFDNSDNVVLRQYEDMVVDECGCR

SEQ ID NO: 48314 - protein, 407 aa, Homo sapiens
MVLAAPLLLGFLLLALELRPRGEAAEGPAAAAAAAAAAAAAGVGGERSSRPAPSVAPEPDGCPVCVWRQHSRELRLESIKSQILSKLRLKEAPNISREVVKQLLPKAPPLQQILDLHDFQGDALQPEDFLEEDEYHATTETVISMAQETDPAVQTDGSPLCCHFHFSPKVMFTKVLKAQLWVYLRPVPRPATVYLQILRLKPLTGEGTAGGGGGGRRHIRIRSLKIELHSRSGHWQSIDFKQVLHSWFRQPQSNWGIEINAFDPSGTDLAVTSLGPGAEGLHPFMELRVLENTKRSRRNLGLDCDEHSSESRCCRYPLTVDFEAFGWDWIIAPKRYKANYCSGQCEYMFMQKYPHTHLVQQANPRGSAGPCCTPTKMSPINMLYFNDKQQIIYGKIPGMVVDRCGCS

SEQ ID NO: 48315 - protein, 380 aa, Homo sapiens
  VARIANT 1: note = MOD_RES - Any amino acid
XAAAAAAAAAAAAAGVGGERSSRPAPSVAPEPDGCPVCVWRQHSRELRLESIKSQILSKLRLKEAPNISREVVKQLLPKAPPLQQILDLHDFQGDALQPEDFLEEDEYHATTETVISMAQETDPAVQTDGSPLCCHFHFSPKVMFTKVLKAQLWVYLRPVPRPATVYLQILRLKPLTGEGTAGGGGGGRRHIRIRSLKIELHSRSGHWQSIDFKQVLHSWFRQPQSNWGIEINAFDPSGTDLAVTSLGPGAEGLHPFMELRVLENTKRSRRNLGLDCDEHSSESRCCRYPLTVDFEAFGWDWIIAPKRYKANYCSGQCEYMFMQKYPHTHLVQQANPRGSAGPCCTPTKMSPINMLYFNDKQQIIYGKIPGMVVDRCGCS

SEQ ID NO: 48316 - protein, 308 aa, Homo sapiens
MPGQELRTVNGSQMLLVLLVLSWLPHGGALSLAEASRASFPGPSELHSEDSRFRELRKRYEDLLTRLRANQSWEDSNTDLVPAPAVRILTPEVRLGSGGHLHLRISRAALPEGLPEASRLHRALFRLSPTASRSWDVTRPLRRQLSLARPQAPALHLRLSPPPSQSDQLLAESSSARPQLELHLRPQAARGRRRARARNGDHCPLGPGRCCRLHTVRASLEDLGWADWVLSPREVQVTMCIGACPSQFRAANMHAQIKTSLHRLKPDTVPAPCCVPASYNPMVLIQKTDTGVSLQTYDDLLAKDCHCI

SEQ ID NO: 48317 - protein, 308 aa, Homo sapiens; identical to SEQ ID NO: 48316

SEQ ID NO: 48318 - protein, 429 aa, Homo sapiens
MCPGALWVALPLLSLLAGSLQGKPLQSWGRGSAGGNAHSPLGVPGGGLPEHTFNLKMFLENVKVDFLRSLNLSGVPSQDKTRVEPPQYMIDLYNRYTSDKSTTPASNIVRSFSMEDAISITATEDFPFQKHILLFNISIPRHEQITRAELRLYVSCQNHVDPSHDLKGSVVIYDVLDGTDAWDSATETKTFLVSQDIQDEGWETLEVSSAVKRWVRSDSTKSKNKLEVTVESHRKGCDTLDISVPPGSRNLPFFVVFSNDHSSGTKETRLELREMISHEQESVLKKLSKDGSTEAGESSHEEDTDGHVAAGSTLARRKRSAGAGSHCQKTSLRVNFEDIGWDSWIIAPKEYEAYECKGGCFFPLADDVTPTKHAIVQTLVHLKFPTKVGKACCVPTKLSPISVLYKDDMGVPTLKYHYEGMSVAECGCR

SEQ ID NO: 48319 - protein, 364 aa, Homo sapiens
MLRFLPDLAFSFLLILALGQAVQFQEYVFLQFLGLDKAPSPQKFQPVPYILKKIFQDREAAATTGVSRDLCYVKELGVRGNVLRFLPDQGFFLYPKKISQASSCLQKLLYFNLSAIKEREQLTLAQLGLDLGPNSYYNLGPELELALFLVQEPHVWGQTTPKPGKMFVLRSVPWPQGAVHFNLLDVAKDWNDNPRKNFGLFLEILVKEDRDSGVNFQPEDTCARLRCSLHASLLVVTLNPDQCHPSRKRRAAIPVPKLSCKNLCHRHQLFINFRDLGWHKWIIAPKGFMANYCHGECPFSLTISLNSSNYAFMQALMHAVDPEIPQAVCIPTKLSPISMLYQDNNDNVILRHYEDMVVDECGCG

SEQ ID NO: 48320 - protein, 501 aa, Homo sapiens
MRLPKLLTFLLWYLAWLDLEFICTVLGAPDLGQRPQGTRPGLAKAEAKERPPLARNVFRPGGHSYGGGATNANARAKGGTGQTGGLTQPKKDEPKKLPPRPGGPEPKPGHPPQTRQATARTVTPKGQLPGGKAPPKAGSVPSSFLLKKAREPGPPREPKEPFRPPPITPHEYMLSLYRTLSDADRKGGNSSVKLEAGLANTITSFIDKGQDDRGPVVRKQRYVFDISALEKDGLLGAELRILRKKPSDTAKPAAPGGGRAAQLKLSSCPSGRQPASLLDVRSVPGLDGSGWEVFDIWKLFRNFKNSAQLCLELEAWERGRAVDLRGLGFDRAARQVHEKALFLVFGRTKKRDLFFNEIKARSGQDDKTVYEYLFSQRRKRRAPLATRQGKRPSKNLKARCSRKALHVNFKDMGWDDWIIAPLEYEAFHCEGLCEFPLRSHLEPTNHAVIQTLMNSMDPESTPPTCCVPTRLSPISILFIDSANNVVYKQYEDMVVESCGCR

SEQ ID NO: 48321 - protein, 501 aa, Homo sapiens; identical to SEQ ID NO: 48320

SEQ ID NO: 48322 - protein, 455 aa, Homo sapiens
MDTPRVLLSAVFLISFLWDLPGFQQASISSSSSSAELGSTKGMRSRKEGKMQRAPRDSDAGREGQEPQPRPQDEPRAQQPRAQEPPGRGPRVVPHEYMLSIYRTYSIAEKLGINASFFQSSKSANTITSFVDRGLDDLSHTPLRRQKYLFDVSMLSDKEELVGAELRLFRQAPSAPWGPPAGPLHVQLFPCLSPLLLDARTLDPQGAPPAGWEVFDVWQGLRHQPWKQLCLELRAAWGELDAGEAEARARGPQQPPPPDLRSLGFGRRVRPPQERALLVVFTRSQRKNLFAEMREQLGSAEAAGPGAGAEGSWPPPSGAPDARPWLPSPGRRRRRTAFASRHGKRHGKKSRLRCSKKPLHVNFKELGWDDWIIAPLEYEAYHCEGVCDFPLRSHLEPTNHAIIQTLMNSMDPGSTPPSCCVPTKLTPISILYIDAGNNVVYKQYEDMVVESCGCR

SEQ ID NO: 48323 - protein, 353 aa, Homo sapiens
MDTPRVLLSAVFLISFLWDLPGFQQASISSSSSSAELGSTKGMRSRKEGKMQRAPRDSDAGREGQEPQPRPQDEPRAQQPRAQEPPGRGPRVVPHEYMLSIYRTYSIAEKLGINASFFQSSKSANTITSFVDRGLDDLSHTPLRRQKYLFDVSMLSDKEELVGAELRLFRQAPSAPWGPPAGPLHVQLFPCLSPLLLDARTLDPQGAPPAGWEVFDVWQGLRHQPWKQLCLELRAAWGELDAGEAEARARGPQQPPPPDLRSLGFGRRVRPPQERALLVVFTRSQRKNLFAPGVRGLSLRGCMRLPAALAPGAHQPRHHPDADELHGPRLHPAQLLRAHQIDSHQHSIHRRGQ

SEQ ID NO: 48324 - protein, 271 aa, Homo sapiens [sequence omitted]

SEQ ID NO: 48325 - protein, 450 aa, Homo sapiens
MDLSAAAALCLWLLSACRPRDGLEAAAVLRAAGAGPVRSPGGGGGGGGGGRTLAQAAGAAAVPAAAVPRARAARRAAGSGFRNGSVVPHHFMMSLYRSLAGRAPAGAAAVSASGHGRADTITGFTDQATQDESAAETGQSFLFDVSSLNDADEVVGAELRVLRRGSPESGPGSWTSPPLLLLSTCPGAARAPRLLYSRAAEPLVGQRWEAFDVADAMRRHRREPRPPRAFCLLLRAVAGPVPSPLALRRLGFGWPGGGGSAAEERAVLVVSSRTQRKESLFREIRAQARALGAALASEPLPDPGTGTASPRAVIGGRRRRRTALAGTRTAQGSGGGAGRGHGRRGRSRCSRKPLHVDFKELGWDDWIIAPLDYEAYHCEGLCDFPLRSHLEPTNHAIIQTLLNSMAPDAAPASCCVPARLSPISILYIDAANNVVYKQYEDMVVEACGCR

SEQ ID NO: 48326 - protein, 422 aa, Homo sapiens
MPRSFLVKSKKAHSYHQPRSPGPDYSLRLENVPAPSRADSTSNAGGAKAEPRDRLSPESQLTEAPDRASASPDSCEGSVCERSSEFEDFWRPPSPSASPASEKSMCPSLDEAQPFPLPFKPYSWSGLAGSDLRHLVQSYRPCGALERGAGLGLFCEPAPEPGHPAALYGPKRAAGGAGAGAPGSCSAGAGATAGPGLGLYGDFGSAAAGLYERPTAAAGLLYPERGHGLHADKGAGVKVESELLCTRLLLGGGSYKCIKCSKVFSTPHGLEVHVRRSHSGTRPFACEMCGKTFGHAVSLEQHKAVHSQERSFDCKICGKSFKRSSTLSTHLLIHSDTRPYPCQYCGKRFHQKSDMKKHTFIHTGEKPHKCQVCGKAFSQSSNLITHSRKHTGFKPFGCDLCGKGFQRKVDLRRHRETQHGLK

SEQ ID NO: 48327 - protein, 422 aa, Homo sapiens; identical to SEQ ID NO: 48326

SEQ ID NO: 48328 - protein, 422 aa, Homo sapiens; identical to SEQ ID NO: 48326

SEQ ID NO: 48329 - protein, 330 aa, Homo sapiens
MPRSFLVKSKKAHTYHQPRVQEDEPLWPPALTPVPRDQAPSNSPVLSTLFPNQCLDWTNLKREPELEQDQNLARMAPAPEGPIVLSRPQDGDSPLSDSPPFYKPSFSWDTLATTYGHSYRQAPSTMQSAFLEHSVSLYGSPLVPSTEPALDFSLRYSPGMDAYHCVKCNKVFSTPHGLEVHVRRSHSGTRPFACDICGKTFGHAVSLEQHTHVHSQERSFECRMCGKAFKRSSTLSTHLLIHSDTRPYPCQFCGKRFHQKSDMKKHTYIHTGEKPHKCQVCGKAFSQSSNLITHSRKHTGFKPFSCELCTKGFQRKVDLRRHRESQHNLK

SEQ ID NO: 48330 - protein, 330 aa, Homo sapiens; identical to SEQ ID NO: 48329

SEQ ID NO: 48331 - protein, 284 aa, Homo sapiens
MPRSFLVKSKKAHTYHQPRVQEDEPLWPPALTPVPRDQAPSNSPVLSTLFPNQCLDWTNLKREPELEQDQNLARMAPAPEGPIVLSRPQDGDSPLSDSPPFYKPSFSWDTLATTYGHSYRQAPSTMQSAFLEHSVSLYGSPLVPSTEPALDFSLRYSPGMDAYHCVKCNKERSFECRMCGKAFKRSSTLSTHLLIHSDTRPYPCQFCGKRFHQKSDMKKHTYIHTGEKPHKCQVCGKAFSQSSNLITHSRKHTGFKPFSCELCTKGFQRKVDLRRHRESQHNLK

SEQ ID NO: 48332 - protein, 284 aa, Homo sapiens; identical to SEQ ID NO: 48331

SEQ ID NO: 48333 - protein, 330 aa, Homo sapiens; identical to SEQ ID NO: 48329

SEQ ID NO: 48334 - protein, 284 aa, Homo sapiens; identical to SEQ ID NO: 48331

SEQ ID NO: 48335 - protein, 540 aa, Homo sapiens
MTTSLQDGQSAASRAAARDSPLAAQVCGAAQGRGDAHDLAPAPWLHARALLPLPDGTRGCAADRRKKKDLDVPEMPSIPNPFPELCCSPFTSVLSADLFPKANSRKKQVIKVYSEDETSRALDVPSDITARDVCQLLILKNHYIDDHSWTLFEHLPHIGVERTIEDHELVIEVLSNWGIEEENKLYFRKNYAKYEFFKNPMYFFPEHMVSFATETNGEISPTQILQMFLSSSTYPEIHGFLHAKEQGKKSWKKIYFFLRRSGLYFSTKGTSKEPRHLQFFSEFGNSDIYVSLAGKKKHGAPTNYGFCFKPNKAGGPRDLKMLCAEEEQSRTCWVTAIRLLKYGMQLYQNYMHPYQGRSGCSSQSISPMRSISENSLVAMDFSGQKSRVIENPTEALSVAVEEGLAWRKKGCLRLGTHGSPTASSQSSATNMAIHRSQPWFHHKISRDEAQRLIIQQGLVDGVFLVRDSQSNPKTFVLSMSHGQKIKHFQIIPVEDDGEMFHTLDDGHTRFTDLIQLVEFYQLNKGVLPCKLKHYCARIAL

SEQ ID NO: 48336 - protein, 453 aa, Homo sapiens
MSLSARRVTLPAITPIILQKRVIKVYSEDETSRALDVPSDITARDVCQLLILKNHYIDDHSWTLFEHLPHIGVERTIEDHELVIEVLSNWGIEEENKLYFRKNYAKYEFFKNPMYFFPEHMVSFATETNGEISPTQILQMFLSSSTYPEIHGFLHAKEQGKKSWKKIYFFLRRSGLYFSTKGTSKEPRHLQFFSEFGNSDIYVSLAGKKKHGAPTNYGFCFKPNKAGGPRDLKMLCAEEEQSRTCWVTAIRLLKYGMQLYQNYMHPYQGRSGCSSQSISPMRSISENSLVAMDFSGQKSRVIENPTEALSVAVEEGLAWRKKGCLRLGTHGSPTASSQSSATNMAIHRSQPWFHHKISRDEAQRLIIQQGLVDGVFLVRDSQSNPKTFVLSMSHGQKIKHFQIIPVEDDGEMFHTLDDGHTRFTDLIQLVEFYQLNKGVLPCKLKHYCARIAL

SEQ ID NO: 48337 - protein, 532 aa, Homo sapiens
MELDLSPPHLSSSPEDLCPAPGTPPGTPRPPDTPLPEEVKRSQPLLIPTTGRKLREEERRATSLPSIPNPFPELCSPPSQSPILGGPSSARGLLPRDASRPHVVKVYSEDGACRSVEVAAGATARHVCEMLVQRAHALSDETWGLVECHPHLALERGLEDHESVVEVQAAWPVGGDSRFVFRKNFAKYELFKSSPHSLFPEKMVSSCLDAHTGISHEDLIQNFLNAGSFPEIQGFLQLRGSGRKLWKRFFCFLRRSGLYYSTKGTSKDPRHLQYVADVNESNVYVVTQGRKLYGMPTDFGFCVKPNKLRNGHKGLRIFCSEDEQSRTCWLAAFRLFKYGVQLYKNYQQAQSRHLHPSCLGSPPLRSASDNTLVAMDFSGHAGRVIENPREALSVALEEAQAWRKKTNHRLSLPMPASGTSLSAAIHRTQLWFHGRISREESQRLIGQQGLVDGLFLVRESQRNPQGFVLSLCHLQKVKHYLILPSEEEGRLYFSMDDGQTRFTDLLQLVEFHQLNRGILPCLLRHCCTRVAL

SEQ ID NO: 48338 - protein, 447 aa, Homo sapiens
MELDLSPPHLSSSPEDLCPAPGTPPGTPRPPDTPLPEEVKRSQPLLIPTTGRKLREEERRATSLPSIPNPFPELCSPPSQSPILGGPSSARGLLPRDASRPHVVKVYSEDGACRSVEVAAGATARHVCEMLVQRAHALSDETWGLVECHPHLALERGLEDHESVVEVQAAWPVGGDSRFVFRKNFAKYELFKSSPHSLFPEKMVSSCLDAHTGISHEDLIQNFLNAGSFPEIQGFLQLRGSGRKLWKRFFCFLRRSGLYYSTKGTSKDPRHLQYVADVNESNVYVVTQGRKLYGMPTDFGFCVKPNKLRNGHKGLRIFCSEDEQSRTCWLAAFRLFKYGVQLYKNYQQAQSRHLHPSCLGSPPLRSASDNTLVAMDFSGHAGRVIENPREALSVALEEAQAWRKKTNHRLSLPMPASGTSLSAACSWSGRVSGTPRALSSLCATCRK

SEQ ID NO: 48339 - protein, 447 aa, Homo sapiens; identical to SEQ ID NO: 48338

SEQ ID NO: 48340 - protein, 532 aa, Homo sapiens; identical to SEQ ID NO: 48337

SEQ ID NO: 48341 - protein, 532 aa, Homo sapiens; identical to SEQ ID NO: 48337

SEQ ID NO: 48342 - protein, 555 aa, Homo sapiens
MGKWRPGQGHTTGSVKPLSCSDAMELDLSPPHLSSSPEDLCPAPGTPPGTPRPPDTPLPEEVKRSQPLLIPTTGRKLREEERRATSLPSIPNPFPELCSPPSQSPILGGPSSARGLLPRDASRPHVVKVYSEDGACRSVEVAAGATARHVCEMLVQRAHALSDETWGLVECHPHLALERGLEDHESVVEVQAAWPVGGDSRFVFRKNFAKYELFKSSPHSLFPEKMVSSCLDAHTGISHEDLIQNFLNAGSFPEIQGFLQLRGSGRKLWKRFFCFLRRSGLYYSTKGTSKDPRHLQYVADVNESNVYVVTQGRKLYGMPTDFGFCVKPNKLRNGHKGLRIFCSEDEQSRTCWLAAFRLFKYGVQLYKNYQQAQSRHLHPSCLGSPPLRSASDNTLVAMDFSGHAGRVIENPREALSVALEEAQAWRKKTNHRLSLPMPASGTSLSAAIHRTQLWFHGRISREESQRLIGQQGLVDGLFLVRESQRNPQGFVLSLCHLQKVKHYLILPSEEEGRLYFSMDDGQTRFTDLLQLVEFHQLNRGILPCLLRHCCTRVAL

SEQ ID NO: 48343 - protein, 205 aa, Homo sapiens
MAAPGERGRFHGGNLFFLPGGARSEMMDDLATDARGRGAGRRDAAASASTPAQAPTSDSPVAEDASRRRPCRACVDFKTWMRTQQKRDTKFREDCPPDREELGRHSWAVLHTLAAYYPDLPTPEQQQDMAQFIHLFSKFYPCEECAEDLRKRLCRNHPDTRTRACFTQWLCHLHNEVNRKLGKPDFDCSKVDERWRDGWKDGSCD

SEQ ID NO: 48344 - protein, 94 aa, Homo sapiens
MRTQQKRDTKFREDCPPDREELGRHSWAVLHTLAAYYPDLPTPEQQQDMAQFIHLFSKFYPCEECAEDLRKRLCRNHPDTRTRACFTVAVPPAQ

SEQ ID NO: 48345 - protein, 638 aa, Homo sapiens
MDLWQLLLTLALAGSSDAFSGSEATAAILSRAPWSLQSVNPGLKTNSSKEPKFTKCRSPERETFSCHWTDEVHHGTKNLGPIQLFYTRRNTQEWTQEWKECPDYVSAGENSCYFNSSFTSIWIPYCIKLTSNGGTVDEKCFSVDEIVQPDPPIALNWTLLNVSLTGIHADIQVRWEAPRNADIQKGWMVLEYELQYKEVNETKWKMMDPILTTSVPVYSLKVDKEYEVRVRSKQRNSGNYGEFSEVLYVTLPQMSQFTCEEDFYFPWLLIIIFGIFGLTVMLFVFLFSKQQRIKMLILPPVPVPKIKGIDPDLLKEGKLEEVNTILAIHDSYKPEFHSDDSWVEFIELDIDEPDEKTEESDTDRLLSSDHEKSHSNLGVKDGDSGRTSCCEPDILETDFNANDIHEGTSEVAQPQRLKGEADLLCLDQKNQNNSPYHDACPATQQPSVIQAEKNKPQPLPTEGAESTHQAAHIQLSNPSSLSNIDFYAQVSDITPAGSVVLSPGQKNKAGMSQCDMHPEMVSLCQENFLMDNAYFCEADAKKCIPVAPHIKVESHIQPSLNQEDIYITTESLTTAAGRPGTGEHVPGSEMPVPDYTSIHIVQSPQGLILNATALPLPDKEFLSSCGYVSTDQLNKIMP

SEQ ID NO: 48346 - protein, 294 aa, Homo sapiens
MDLWQLLLTLALAGSSDAFSGSEATAAILSRAPWSLQSVNPGLKTNSSKEPKFTKCRSPERETFSCHWTDEVHHGTKNLGPIQLFYTRRNTQEWTQEWKECPDYVSAGENSCYFNSSFTSIWIPYCIKLTSNGGTVDEKCFSVDEIVQPDPPIALNWTLLNVSLTGIHADIQVRWEAPRNADIQKGWMVLEYELQYKEVNETKWKMMDPILTTSVPVYSLKVDKEYEVRVRSKQRNSGNYGEFSEVLYVTLPQMSQFTCEEDFYFPWLLIIIFGIFGLTVMLFVFLFSKQQSQN

SEQ ID NO: 48347 - protein, 616 aa, Homo sapiens
MDLWQLLLTLALAGSSDAFSGSEDSSKEPKFTKCRSPERETFSCHWTDEVHHGTKNLGPIQLFYTRRNTQEWTQEWKECPDYVSAGENSCYFNSSFTSIWIPYCIKLTSNGGTVDEKCFSVDEIVQPDPPIALNWTLLNVSLTGIHADIQVRWEAPRNADIQKGWMVLEYELQYKEVNETKWKMMDPILTTSVPVYSLKVDKEYEVRVRSKQRNSGNYGEFSEVLYVTLPQMSQFTCEEDFYFPWLLIIIFGIFGLTVMLFVFLFSKQQRIKMLILPPVPVPKIKGIDPDLLKEGKLEEVNTILAIHDSYKPEFHSDDSWVEFIELDIDEPDEKTEESDTDRLLSSDHEKSHSNLGVKDGDSGRTSCCEPDILETDFNANDIHEGTSEVAQPQRLKGEADLLCLDQKNQNNSPYHDACPATQQPSVIQAEKNKPQPLPTEGAESTHQAAHIQLSNPSSLSNIDFYAQVSDITPAGSVVLSPGQKNKAGMSQCDMHPEMVSLCQENFLMDNAYFCEADAKKCIPVAPHIKVESHIQPSLNQEDIYITTESLTTAAGRPGTGEHVPGSEMPVPDYTSIHIVQSPQGLILNATALPLPDKEFLSSCGYVSTDQLNKIMP

SEQ ID NO: 48348 - protein, 451 aa, Homo sapiens
MVLEYELQYKEVNETKWKMMDPILTTSVPVYSLKVDKEYEVRVRSKQRNSGNYGEFSEVLYVTLPQMSQFTCEEDFYFPWLLIIIFGIFGLTVMLFVFLFSKQQRIKMLILPPVPVPKIKGIDPDLLKEGKLEEVNTILAIHDSYKPEFHSDDSWVEFIELDIDEPDEKTEESDTDRLLSSDHEKSHSNLGVKDGDSGRTSCCEPDILETDFNANDIHEGTSEVAQPQRLKGEADLLCLDQKNQNNSPYHDACPATQQPSVIQAEKNKPQPLPTEGAESTHQAAHIQLSNPSSLSNIDFYAQVSDITPAGSVVLSPGQKNKAGMSQCDMHPEMVSLCQENFLMDNAYFCEADAKKCIPVAPHIKVESHIQPSLNQEDIYITTESLTTAAGRPGTGEHVPGSEMPVPDYTSIHIVQSPQGLILNATALPLPDKEFLSSCGYVSTDQLNKIMP

SEQ ID NO: 48349 - protein, 108 aa, Homo sapiens
MPLWVFFFVILTLSNSSHCSPPPPLTLRMRRYADAIFTNSYRKVLGQLSARKLLQDIMSRQQGESNQERGARARLGRQVDSMWAEQKQMELESILVALLQKHSRNSQG

SEQ ID NO: 48350 - protein, 107 aa, Homo sapiens
MPLWVFFFVILTLSNSSHCSPPPPLTLRMRRYADAIFTNSYRKVLGQLSARKLLQDIMSRQQGESNQERGARARLGRQVDSMWAEQKQMELESILVALLQKHRNSQG

SEQ ID NO: 48351 - protein, 108 aa, Homo sapiens; identical to SEQ ID NO: 48349

SEQ ID NO: 48352 - protein, 423 aa, Homo sapiens
MDRRMWGAHVFCVLSPLPTVLGHMHPECDFITQLREDESACLQAAEEMPNTTLGCPATWDGLLCWPTAGSGEWVTLPCPDFFSHFSSESGAVKRDCTITGWSEPFPPYPVACPVPLELLAEEESYFSTVKIIYTVGHSISIVALFVAITILVALRRLHCPRNYVHTQLFTTFILKAGAVFLKDAALFHSDDTDHCSFSTVLCKVSVAASHFATMTNFSWLLAEAVYLNCLLASTSPSSRRAFWWLVLAGWGLPVLFTGTWVSCKLAFEDIACWDLDDTSPYWWIIKGPIVLSVGVNFGLFLNIIRILVRKLEPAQGSLHTQSQYWRLSKSTLFLIPLFGIHYIIFNFLPDNAGLGIRLPLELGLGSFQGFIVAILYCFLNQEVRTEISRKWHGHDPELLPAWRTRAKWTTPSRSAAKVLTSMC

SEQ ID NO: 48353 - protein, 68 aa, Homo sapiens
MVPGTPSPLLGRGKELWLESLACLPGAVKRDCTITGWSEPFPPYPVACPVPLELLAEEGCPCSSLARG

SEQ ID NO: 48354 - protein, 145 aa, Homo sapiens
MVPGTPSPLLGRGKELWLESLACLPGAVKRDCTITGWSEPFPPYPVACPVPLELLAEEESYFSTVKIIYTVGHSISIVALFVAITILVALRRLHCPRNYVHTQLFTTFILKAGAVFLKDAALFHSDDTDHCSFSTGCPCSSLARG

SEQ ID NO: 48355 - protein, 151 aa, Homo sapiens
MLPFSTATTLTTAASPLAARALHWHVGELQTGLRGHRVLGPGRHLPLLVDHQRAHCPLGRGELWAFSQYYPHPGEETGASSGQPPYPVSVLASLQVDTFPDPTLWNSLHHLQLPARQCWPGHPPPPGAGTGFLPGLHCCHPLLLPQPRGED

SEQ ID NO: 48356 - protein, 359 aa, Homo sapiens
MVPGTPSPLLGRGKELWLESLACLPGAVKRDCTITGWSEPFPPYPVACPVPLELLAEEESYFSTVKIIYTVGHSISIVALFVAITILVALRRLHCPRNYVHTQLFTTFILKAGAVFLKDAALFHSDDTDHCSFSTVLCKVSVAASHFATMTNFSWLLAEAVYLNCLLASTSPSSRRAFWWLVLAGWGLPVLFTGTWVSCKLAFEDIACWDLDDTSPYWWIIKGPIVLSVGVNFGLFLNIIRILVRKLEPAQGSLHTQSQYWRLSKSTLFLIPLFGIHYIIFNFLPDNAGLGIRLPLELGLGSFQGFIVAILYCFLNQEVRTEISRKWHGHDPELLPAWRTRAKWTTPSRSAAKVLTSMC

SEQ ID NO: 48357 - protein, 366 aa, Homo sapiens
MWNATPSEEPGFNLTLADLDWDASPGNDSLGDELLQLFPAPLLAGVTATCVALFVVGIAGNLLTMLVVSRFRELRTTTNLYLSSMAFSDLLIFLCMPLDLVRLWQYRPWNFGDLLCKLFQFVSESCTYATVLTITALSVERYFAICFPLRAKVVVTKGRVKLVIFVIWAVAFCSAGPIFVLVGVEHENGTDPWDTNECRPTEFAVRSGLLTVMVWVSSIFFFLPVFCLTVLYSLIGRKLWRRRRGDAVVGASLRDQNHKQTVKMLAVVVFAFILCWLPFHVGRYLFSKSFEPGSLEIAQISQYCNLVSFVLFYLSAAINPILYNIMSKKYRVAVFRLLGFEPFSQRKLSTLKDESSRAWTESSINT

SEQ ID NO: 48358 - protein, 289 aa, Homo sapiens
MWNATPSEEPGFNLTLADLDWDASPGNDSLGDELLQLFPAPLLAGVTATCVALFVVGIAGNLLTMLVVSRFRELRTTTNLYLSSMAFSDLLIFLCMPLDLVRLWQYRPWNFGDLLCKLFQFVSESCTYATVLTITALSVERYFAICFPLRAKVVVTKGRVKLVIFVIWAVAFCSAGPIFVLVGVEHENGTDPWDTNECRPTEFAVRSGLLTVMVWVSSIFFFLPVFCLTVLYSLIGRKLWRRRRGDAVVGASLRDQNHKQTVKMLGGSQRALRLSLAGPILSLCLLPSL

SEQ ID NO: 48359 - protein, 1949 aa, Homo sapiens
MGNSYAGQLKTTRFEEVLHNSIEASLRSNNLVPRPIFSQLYLEAEQQLAALEGGSRVDNEEEEEEGEGGLETNGPPNPFQLHPLPEGCCTTDGFCQAGKDLRLVSISNEPMDVPAGFLLVGVKSPSLPDHLLVCAVDKRFLPDDNGHNALLGFSGNCVGCGKKGFCYFTEFSNHINLKLTTQPKKQKHLKYYLVRNAQGTLTKGPLICWKGSEFRSRQIPASTCSSSLFPALESTAAFPSEPVPGTNPSILMGAQQAGPASDHPSLNAAMGPAVFNGKDSPKCQQLAKNNLLALPRPSALGILSNSGPPKKRHKGWSPESPSAPDGGCPQGGGNRAKYESAGMSCVPQVGLVGPASVTFPVVASGEPVSVPDNLLKICKAKPVIFKGHGNFPYLCGNLNDVVVSPLLYTCYQNSQSVSRAYEQYGASAIQPISEEMQLLLTVYYLVQLAADQVPLMEDLEQIFLRSWRESHLTEIRQYQQAPPQPFPPAPSAAAPVTSAQLPWLASLAASSCNDSVHVIECAYSLAEGLSEMFRLLVEGKLAKTNYVVIICACRSAAIDSCIAVTGKYQARILSESLLTPAEYQKEVNYELVTGKVDSLGAFFSTLCPEGDIDILLDKFHQENQGHISSSLAASSVTKAASLDVSGTPVCTSYNLEPHSIRPFQLAVAQKLLSHVCSIADSSTQNLDLGSFEKVDFLICIPPSEVTYQQTLLHVWHSGVLLELGLKKEHMTKQRVEQYVLKLDTEAQTKFKAFLQNSFQNPHTLFVLIHDHAHWDLVSSTVHNLYSQSDPSVGLVDRLLNCREVKEAPNIVTLHVTSFPYALQTQHTLISPYNEIHWPASCSNGVDLYHENKKYFGLSEFIESTLSGHSLPLLRYDSSFEAMVTALGKRFPRLHSAVIRTFVLVQHYAAALMAVSGLPQMKNYTSVETLEITQNLLNSPKQCPCGHGLMVLLRVPCSPLAVVAYERLAHVRARLALEEHFEIILGSPSSGVTVGKHFVKQLRMWQKIEDVEWRPQTYLELEGLPCILIFSGMDPHGESLPRSLRYCDLRLINSSCLVRTALEQELGLAAYFVSNEVPLEKGARNEALESDAEKLSSTDNEDEELGTEGSTSEKRSPMKRERSRSHDSASSSLSSKASGSALGGESSAQPTALPQGEHARSPQPRGPAEEGRAPGEKQRPRASQGPPSAISRHSPGPTPQPDCSLRTGQRSVQVSVTSSCSQLSSSSGSSSSSVAPAAGTWVLQASQCSLTKACRQPPIVFLPKLVYDMVVSTDSSGLPKAASLLPSPSVMWASSFRPLLSKTMTSTEQSLYYRQWTVPRPSHMDYGNRAEGRVDGFHPRRLLLSGPPQIGKTGAYLQFLSVLSRMLVRLTEVDVYDEEEININLREESDWHYLQLSDPWPDLELFKKLPFDYIIHDPKYEDASLICSHYQGIKSEDRGMSRKPEDLYVRRQTARMRLSKYAAYNTYHHCEQCHQYMGFHPRYQLYESTLHAFAFSYSMLGEEIQLHFIIPKSKEHHFVFSQPGGQLESMRLPLVTDKSHEYIKSPTFTPTTGRHEHGLFNLYHAMDGASHLHVLVVKEYEMAIYKKYWPNHIMLVLPSIFNSAGVGAAHFLIKELSYHNLELERNRQEELGIKPQDIWPFIVISDDSCVMWNVVDVNSAGERSREFSWSERNVSLKHIMQHIEAAPDIMHYALLGLRKWSSKTRASEVQEPFSRCHVHNFIILNVDLTQNVQYNQNRFLCDDVDFNLRVHSAGLLLCRFNRFSVMKKQIVVGGHRSFHITSKVSDNSAAVVPAQYICAPDSKHTFLAAPAQLLLEKFLQHHSHLFFPLSLKNHDHPVLSVDCYLNLGSQISVCYVSSRPHSLNISCSDLLFSGLLLYLCDSFVGASFLKKFHFLKGATLCVICQDRSSLRQTVVRLELEDEWQFRLRDEFQTANAREDRPLFFLTGRHI

SEQ ID NO: 48360 - protein, 409 aa, Homo sapiens
MGNSYAGQLKTTRFEEVLHNSIEASLRSNNLVPRPIFSQLYLEAEQQLAALEGGSRVDNEEEEEEGEGGLETNGPPNPFQLHPLPEGCCTTDGFCQAGKDLRLVSISNEPMDVPAGFLLVGVKSPSLPDHLLVCAVDKRFLPDDNGHNALLGFSGNCVGCGKKGFCYFTEFSNHINLKLTTQPKKQKHLKYYLVRNAQGTLTKGPLICWKGSEFRSRQIPASTCSSSLFPALESTAAFPSEPVPGTNPSILMGAQQAGPASDHPSLNAAMGPAVFNGKDSPKCQQLAKNNLLALPRPSALGILSNSGPPKKRHKGWSPESPSAPDGGCPQGGGNRAKYESAGMSCVPQVGLVGPASVTFPVVASGEPVSVPDNLLKICKAKPVIFKVFVNGATQMVALGPAEPASPRSL

SEQ ID NO: 48361 - protein, 457 aa, Homo sapiens
MGNSYAGQLKTTRFEEVLHNSIEASLRSNNLVPRPIFSQLYLEAEQQLAALEGGSRVDNEEEEEEGEGGLETNGPPNPFQLHPLPEGCCTTDGFCQAGKDLRLVSISNEPMDVPAGFLLVGVKSPSLPDHLLVCAVDKRFLPDDNGHNALLGFSGNCVGCGKKGFCYFTEFSNHINLKLTTQPKKQKHLKYYLVRNAQGTLTKGPLICWKGSEFRSRQIPASTCSSSLFPALESTAAFPSEPVPGTNPSILMGAQQAGPASDHPSLNAAMGPAVFNGKDSPKCQQLAKNNLLALPRPSALGILSNSGPPKKRHKGWSPESPSAPDGGCPQGGGNRAKYESAGMSCVPQVGLVGPASVTFPVVASGEPVSVPDNLLKICKAKPVIFKGHGNFPYLCGNLNDVVVSPLLYTCYQNSQSVSRAYEQYGASAIQPISEEMQLLLTVYYLVQLAHQIRNPDV

SEQ ID NO: 48362 - protein, 1949 aa, Homo sapiens; identical to SEQ ID NO: 48359

SEQ ID NO: 48363 - protein, 395 aa, Homo sapiens
MTLRRLRKLQQKEEAAATPDPAARTPDSEVAPAAPVPTPGPPAAAATPGPPADELYAALEDYHPAELYRALAVSGGTLPRRKGSGFRWKNLSQSPEQQRKVLTLEKEDNQTFGFEIQTYGLHHREEQRVEMVTFVCRVHESSPAQLAGLTPGDTIASVNGLNVEGIRHREIVDIIKASGNVLRLETLYGTSIRKAELEARLQYLKQTLYEKWGEYRSLMVQEQRLVHGLVVKDPSIYDTLESVRSCLYGAGLLPGSLPFGPLLAVPGRPRGGARRARGDADDAVYHTCFFGDSEPPALPPPPPPARAFGPGPAETPAVGPGPGPRAALSRSASVRCAGPGGGGGGGAPGALWTEAREQALCGPGLRKTKYRSFRRRLLKFIPGLNRSLEEEESQL

SEQ ID NO: 48364 - protein, 252 aa, Homo sapiens
MTLLPSKGGDTIASVNGLNVEGIRHREIVDIIKASGNVLRLETLYGTSIRKAELEARLQYLKQTLYEKWGEYRSLMVQEQRLVHGLVVKDPSIYDTLESVRSCLYGAGLLPGSLPFGPLLAVPGRPRGGARRARGDADDAVYHTCFFGDSEPPALPPPPPPARAFGPGPAETPAVGPGPGPRAALSRSASVRCAGPGGGGGGGAPGALWTEAREQALCGPGLRKTKYRSFRRRLLKFIPGLNRSLEEEESQL

SEQ ID NO: 48365 - protein, 252 aa, Homo sapiens; identical to SEQ ID NO: 48364

SEQ ID NO: 48366 - protein, 217 aa, Homo sapiens
MAAQCVRLARRSLPALALSLRPSPRLLCTATKQKNSGQNLEEDMGQSEQKADPPATEKTLLEEKVKLEEQLKETVEKYKRALADTENLRQRSQKLVEEAKLYGIQAFCKDLLEVADVLEKATQCVPKEEIKDDNPHLKNLYEGLVMTEVQIQKVFTKHGLLKLNPVGAKFDPYEHEALFHTPVEGKEPGTVALVSKVGYKLHGRTLRPALVGVVKEA

SEQ ID NO: 48367 - protein, 196 aa, Homo sapiens
MAAQCVRLARRSLPALALSLRPSPRLLCTATKQKNSGQNLEEDMGQSEQLKETVEKYKRALADTENLRQRSQKLVEEAKLYGIQAFCKDLLEVADVLEKATQCVPKEEIKDDNPHLKNLYEGLVMTEVQIQKVFTKHGLLKLNPVGAKFDPYEHEALFHTPVEGKEPGTVALVSKVGYKLHGRTLRPALVGVVKEA

SEQ ID NO: 48368 - protein, 959 aa, Homo sapiens
MALLGKRCDVPTNGCGPDRWNSAFTRKDEIITSLVSALDSMCSALSKLNAEVACVAVHDESAFVVGTEKGRMFLNARKELQSDFLRFCRGPPWKDPEAEHPKKVQRGEGGGRSLPRSSLEHGSDVYLLRKMVEEVFDVLYSEALGRASVVPLPYERLLREPGLLAVQGLPEGLAFRRPAEYDPKALMAILEHSHRIRFKLKRPLEDGGRDSKALVELNGVSLIPKGSRDCGLHGQAPKVPPQDLPPTATSSSMASFLYSTALPNHAIRELKQEAPSCPLAPSDLGLSRPMPEPKATGAQDFSDCCGQKPTGPGGPLIQNVHASKRILFSIVHDKSEKWDAFIKETEDINTLRECVQILFNSRYAEALGLDHMVPVPYRKIACDPEAVEIVGIPDKIPFKRPCTYGVPKLKRILEERHSIHFIIKRMFDERIFTGNKFTKDTTKLEPASPPEDTSAEVSRATVLDLAGNARSDKGSMSEDCGPGTSGELGGLRPIKIEPEDLDIIQVTVPDPSPTSEEMTDSMPGHLPSEDSGYGMEMLTDKGLSEDARPEERPVEDSHGDVIRPLRKQVELLFNTRYAKAIGISEPVKVPYSKFLMHPEELFVVGLPEGISLRRPNCFGIAKLRKILEASNSIQFVIKRPELLTEGVKEPIMDSQGTASSLGFSPPALPPERDSGDPLVDESLKRQGFQENYDARLSRIDIANTLREQVQDLFNKKYGEALGIKYPVQVPYKRIKSNPGSVIIEGLPPGIPFRKPCTFGSQNLERILAVADKIKFTVTRPFQGLIPKPDEDDANRLGEKVILREQVKELFNEKYGEALGLNRPVLVPYKLIRDSPDAVEVTGLPDDIPFRNPNTYDIHRLEKILKAREHVRMVIINQLQPFAEICNDAKVPAKDSSIPKRKRKRVSEGNSVSSSSSSSSSSSSNPDSVASANQISLVQWPMYMVDYAGLNVQLPGPLNY

SEQ ID NO: 48369 - protein, 944 aa, Homo sapiens
MALLGKRCDVPTNGCGPDRWNSAFTRKDEIITSLVSALDSMCSALSKLNAEVACVAVHDESAFVVGTEKGRMFLNARKELQSDFLRFCRGPPWKDPEAEHPKKVQRGEGGGRSLPRSSLEHGSDVYLLRKMVEEVFDVLYSEALGRASVVPLPYERLLREPGLLAVQGLPEGLAFRRPAEYDPKALMAILEHSHRIRFKLKRPLEDGGRDSKALVELNGVSLIPKGSRDCGLHGQAPKVPPQDLPPTATSSSMASFLYSTALPNHAIRELKQEAPSCPLAPSDLGLSRPMPEPKATGAQDFSDCCGQKPTGPGGPLIQNVHASKRILFSIVHDKSEKWDAFIKETEDINTLRECVQILFNSRYAEALGLDHMVPVPYRKIACDPEAVEIVGIPDKIPFKRPCTYGVPKLKRILEERHSIHFIIKRMFDERIFTGNKFTKDTTKLEPASPPEDTSAEVSRATVLDLAGNARSDKGSMSEDCGPGTSGELGGLRPIKIEPEDLDIIQVTVPDPSPTSEEMTDSMPGHLPSEDSGYGMEMLTDKGLSEDARPEERPVEDSHGDVIRPLRKQVELLFNTRYAKAIGISEPVKVPYSKFLMHPEELFVVGLPEGISLRRPNCFGIAKLRKILEASNSIQFVIKRPELLTEGVKEPIMDSQERDSGDPLVDESLKRQGFQENYDARLSRIDIANTLREQVQDLFNKKYGEALGIKYPVQVPYKRIKSNPGSVIIEGLPPGIPFRKPCTFGSQNLERILAVADKIKFTVTRPFQGLIPKPDEDDANRLGEKVILREQVKELFNEKYGEALGLNRPVLVPYKLIRDSPDAVEVTGLPDDIPFRNPNTYDIHRLEKILKAREHVRMVIINQLQPFAEICNDAKVPAKDSSIPKRKRKRVSEGNSVSSSSSSSSSSSSNPDSVASANQISLVQWPMYMVDYAGLNVQLPGPLNY

SEQ ID NO: 48370 - protein, 976 aa, Homo sapiens
MALLGKRCDVPTNGCGPDRWNSAFTRKDEIITSLVSALDSMCSALSKLNAEVACVAVHDESAFVVGTEKGRMFLNARKELQSDFLRFCLSAAQHRAATSQLEGRVVRRVLTVASRALCPTGGPPWKDPEAEHPKKVQRGEGGGRSLPRSSLEHGSDVYLLRKMVEEVFDVLYSEALGRASVVPLPYERLLREPGLLAVQGLPEGLAFRRPAEYDPKALMAILEHSHRIRFKLKRPLEDGGRDSKALVELNGVSLIPKGSRDCGLHGQAPKVPPQDLPPTATSSSMASFLYSTALPNHAIRELKQEAPSCPLAPSDLGLSRPMPEPKATGAQDFSDCCGQKPTGPGGPLIQNVHASKRILFSIVHDKSEKWDAFIKETEDINTLRECVQILFNSRYAEALGLDHMVPVPYRKIACDPEAVEIVGIPDKIPFKRPCTYGVPKLKRILEERHSIHFIIKRMFDERIFTGNKFTKDTTKLEPASPPEDTSAEVSRATVLDLAGNARSDKGSMSEDCGPGTSGELGGLRPIKIEPEDLDIIQVTVPDPSPTSEEMTDSMPGHLPSEDSGYGMEMLTDKGLSEDARPEERPVEDSHGDVIRPLRKQVELLFNTRYAKAIGISEPVKVPYSKFLMHPEELFVVGLPEGISLRRPNCFGIAKLRKILEASNSIQFVIKRPELLTEGVKEPIMDSQERDSGDPLVDESLKRQGFQENYDARLSRIDIANTLREQVQDLFNKKYGEALGIKYPVQVPYKRIKSNPGSVIIEGLPPGIPFRKPCTFGSQNLERILAVADKIKFTVTRPFQGLIPKPDEDDANRLGEKVILREQVKELFNEKYGEALGLNRPVLVPYKLIRDSPDAVEVTGLPDDIPFRNPNTYDIHRLEKILKAREHVRMVIINQLQPFAEICNDAKVPAKDSSIPKRKRKRVSEGNSVSSSSSSSSSSSSNPDSVASANQISLVQWPMYMVDYAGLNVQLPGPLNY

SEQ ID NO: 48371 - protein, 669 aa, Homo sapiens
MATERSRSAMDSPVPASMFAPEPSSPGAARAAAAAARLHGGFDSDCSEDGEALNGEPELDLTSKLVLVSPTSEQYDSLLRQMWERMDEGCGETIYVIGQGSDGTEYGLSEADMEASYATVKSMAEQIEADVILLRERQEAGGRVRDYLVRKRVGDNDFLEVRVAVVGNVDAGKSTLLGVLTHGELDNGRGFARQKLFRHKHEIESGRTSSVGNDILGFDSEGNVVNKPDSHGGSLEWTKICEKSTKVITFIDLAGHEKYLKTTVFGMTGHLPDFCMLMVGSNAGIVGMTKEHLGLALALNVPVFVVVTKIDMCPANILQETLKLLQRLLKSPGCRKIPVLVQSKDDVIVTASNFSSERMCPIFQISNVTGENLDLLKMFLNLLSPRTSYREEEPAEFQIDDTYSVPGVGTVVSGTTLRGLIKLNDTLLLGPDPLGNFLSIAVKSIHRKRMPVKEVRGGQTASFALKKIKRSSIRKGMVMVSPRLNPQASWEFEAEILVLHHPTTISPRYQAMVHCGSIRQTATILSMDKDCLRTGDKATVHFRFIKTPEYLHIDQRLVFREGRTKAVGTITKLLQTTNNSPMNSKPQQIKMQSTKKGPLTKRDEGGPSGGPAVGAPPPGDEASSVGAGQPAASSNLQPQPKPSSGGRRRGGQRHKVKSQGACVTPASGC

SEQ ID NO: 48372 - protein, 514 aa, Homo sapiens
MKWRLQEGRGEAVYQIGVEDNGLLVGLAEEEMRASLKTLHRMAEKVGADITVLREREVDYDSDMPRKITEVLVRKVPDNQQFLDLRVAVLGNVDSGKSTLLGVLTQGELDNGRGRARLNLFRHLHEIQSGRTSSISFEILGFNSKGEVVNYSDSRTAEEICESSSKMITFIDLAGHHKYLHTTIFGLTSYCPDCALLLVSANTGIAGTTREHLGLALALKVPFFIVVSKIDLCAKTTVERTVRQLERVLKQPGCHKVPMLVTSEDDAVTAAQQFAQSPNVTPIFTLSSVSGESLDLLKVFLNILPPLTNSKEQEELMQQLTEFQVDEIYTVPEVGTVVGGTLSSGICREGDQLVVGPTDDGCFLELRVCSIQRNRSACRVLRAGQAATLALGDFDRALLRKGMVMVSPEMNPTICSVFEAEIVLLFHATTFRRGFQVTVHVGNVRQTAVVEKIHAKDKLRTGEKAVVRFRFLKHPEYLKVGAKLLFREGVTKGIGHVTDVQAITAGEAQANMGF

SEQ ID NO: 48373 - protein, 602 aa, Homo sapiens
MDSRVSELFGGCCRPGGGPAVGGTLKARGAGSSSGCGGPKGKKKNGRNRGGKANNPPYLPPEAEDGNIEYKLKLVNPSQYRFEHLVTQMKWRLQEGRGEAVYQIGVEDNGLLVGLAEEEMRASLKTLHRMAEKVGADITVLREREVDYDSDMPRKITEVLVRKVPDNQQFLDLRVAVLGNVDSGKSTLLGVLTQGELDNGRGRARLNLFRHLHEIQSGRTSSISFEILGFNSKGEVVNYSDSRTAEEICESSSKMITFIDLAGHHKYLHTTIFGLTSYCPDCALLLVSANTGIAGTTREHLGLALALKVPFFIVVSKIDLCAKTTVERTVRQLERVLKQPGCHKVPMLVTSEDDAVTAAQQFAQSPNVTPIFTLSSVSGESLDLLKVFLNILPPLTNSKEQEELMQQLTEFQVDEIYTVPEVGTVVGGTLSSGICREGDQLVVGPTDDGCFLELRVCSIQRNRSACRVLRAGQAATLALGDFDRALLRKGMVMVSPEMNPTICSVFEAEIVLLFHATTFRRGFQVTVHVGNVRQTAVVEKIHAKDKLRTGEKAVVRFRFLKHPEYLKVGAKLLFREGVTKGIGHVTDVQAITAGEAQANMGF

SEQ ID NO: 48374 - protein, 244 aa, Homo sapiens
MKWRLQEGRGEAIFTLSSVSGESLDLLKVFLNILPPLTNSKEQEELMQQLTEFQVDEIYTVPEVGTVVGGTLSSGICREGDQLVVGPTDDGCFLELRVCSIQRNRSACRVLRAGQAATLALGDFDRALLRKGMVMVSPEMNPTICSVFEAEIVLLFHATTFRRGFQVTVHVGNVRQTAVVEKIHAKDKLRTGEKAVVRFRFLKHPEYLKVGAKLLFREGVTKGIGHVTDVQAITAGEAQANMGF

SEQ ID NO: 48375 - protein, 153 aa, Homo sapiens
  VARIANT 1: note = MOD_RES - Any amino acid
XGICREGDQLVVGPTDDGCFLELRVCSIQRNRSACRVLRAGQAATLALGDFDRALLRKGMVMVSPEMNPTICSVFEAEIVLLFHATTFRRGFQVTVHVGNVRQTAVVEKIHAKDKLRTGEKAVARERGVLSATCSLPTFWRGAKLGVARKGQS

SEQ ID NO: 48376 - protein, 154 aa, Homo sapiens
  VARIANT 1: note = MOD_RES - Any amino acid
XGICREGDQLVVGPTDDGCFLELRVCSIQRNRSACRVLRAGQAATLALGDFDRALLRKGMVMVSPEMNPTICSVFEAEIVLLFHATTFRRGFQVTVHVGNVRQTAVVEKIHAKVRGTWPSISPEVRKEGGLPQTGRELLDPTMGIKPHLGWVAA

SEQ ID NO: 48377 - protein, 180 aa, Homo sapiens
MQQLTEFQVDEIYTVPEVGTVVGGTLSSGICREGDQLVVGPTDDGCFLELRVCSIQRNRSACRVLRAGQAATLALGDFDRALLRKGMVMVSPEMNPTICSVFEAEIVLLFHATTFRRGFQVTVHVGNVRQTAVVEKIHAKDKLRTGEKAVARERGVLSATCSLPTFWRGAKLGVARKGQS

SEQ ID NO: 48378 - protein, 316 aa, Homo sapiens
  VARIANT 1: note = MOD_RES - Any amino acid
XQGGGAREENTSFRSRDPREEGQRLDSQAEDGNIEYKLKLVNPSQYRFEHLVTQMKWRLQEGRGEAVYQIGVEDNGLLVGLAEEEMRASLKTLHRMAEKVGADITVLREREVDYDSDMPRKITEVLVRKVPDNQQFLDLRVAVLGNVDSGKSTLLGVLTQGELDNGRGRARLNLFRHLHEIQSGRTSSISFEILGFNSKGEVVNYSDSRTAEEICESSSKMITFIDLAGHHKYLHTTIFGLTSYCPDCALLLVSANTGIAGTTREHLGLALALKVPFFIVVSKIDLCAKTTVERTVRQLERVLKQPGCHKVPMLVT

SEQ ID NO: 48379 - protein, 227 aa, Homo sapiens
MDSRVSELFGGCCRPGGGPAVGGTLKARGAGSSSGCGGPKGKKKNGRNRGGKANNPPYLPPEAEDGNIEYKYRFEHLVTQMKWRLQEGRGEAVYQIGVEDNGLLVGLAEEEMRASLKTLHRMAEKVGADITVLREREVDYDSDMPRKITEVLVRKVPDNQQFLDLRVAVLGNVDSGKSTLLGVLTQGELDNGRGRARLNLFRHLHEIQSGRTSSISFEILGFNSKGE

SEQ ID NO: 48380 - protein, 406 aa, Homo sapiens
MAPARCFSARLRTVFQGVGHWALSTWAGLKPSRLLPQRASPRLLSVGRADLAKHQELPGKKLLSEKKLKRYFVDYRRVLVCGGNGGAGASCFHSEPRKEFGGPDGGDGGNGGHVILRVDQQVKSLSSVLSRYQGFSGEDGGSKNCFGRSGAVLYIRVPVGTLVKEGGRVVADLSCVGDEYIAALGGAGGKGNRFFLANNNRAPVTCTPGQPGQQRVLHLELKTVAHAGMVGFPNAGKSSLLRAISNARPAVASYPFTTLKPHVGIVHYEGHLQIAVADIPGIIRGAHQNRGLGSAFLRHIERCRFLLFVVDLSQPEPWTQVDDLKYELEMYEKGLSARPHAIVANKIDLPEAQANLSQLRDHLGQEVIVLSALTGENLEQLLLHLKVLYDAYAEAELGQGRQPLRW

SEQ ID NO: 48381 - protein, 248 aa, Homo sapiens
MAPARCFSARLRTVFQGVGHWALSTWAGLKPSRLLPQRASPRLLSVGRADLAKHQELPGKKLLSEKKLKRYFVDYRRVLVCGGNGGAGASCFHSEPRKEFGGPDGGDGGNGGHVILRVADIPGIIRGAHQNRGLGSAFLRHIERCRFLLFVVDLSQPEPWTQVDDLKYELEMYEKGLSARPHAIVANKIDLPEAQANLSQLRDHLGQEVIVLSALTGENLEQLLLHLKVLYDAYAEAELGQGRQPLRW

SEQ ID NO: 48382 - protein, 233 aa, Homo sapiens
MAPARCFSARLRTVFQGVGHWALSTWAGLKPSRLLPQRASPRLLSVGRADLAKHQELPGKKLLSEKKLKRYFVDYRRVLVCGGNGGAGASCFHSEPRKEFGGPDGGDGGNGGHVILRVDQQVKSLSSVLSRYQGFSGEDGGSKNCFGRSGAVLYIRVPVGTLVKEGGRVVADLSCVGDEYIAALGGAGGKGNRFFLANNNRAPVTCTPGQPGQQRVLHLELKTVAHAGMVGFP

SEQ ID NO: 48383 - protein, 178 aa, Homo sapiens
MVGFPNAGKSSLLRAISNARPAVASYPFTTLKPHVGIVHYEGHLQIAVADIPGIIRGAHQNRGLGSAFLRHIERCRFLLFVVDLSQPEPWTQVDDLKYELEMYEKGLSARPHAIVANKIDLPEAQANLSQLRDHLGQEVIVLSALTGENLEQLLLHLKVLYDAYAEAELGQGRQPLRW

SEQ ID NO: 48384 - protein, 287 aa, Homo sapiens
RSNLKRDVAHLYRGVGSRYIMGSGESFMQLQQRLLREKEAKIRKALDRLRKKRHLLRRQRTRREFPVISVVGYTNCGKTTLIKALTGDAAIQPRDQLFATLDVTAHAGTLPSRMTVLYVDTIGFLSQLPHGLIESFSATLEDVAHSDLILHVRDVSHPEAELQKCSVLSTLRGLQLPAPLLDSMVEVHNKVDLVPGYSPTEPNVVPVSALRGHGLQELKAELDAAVLKATGRQILTLRVRLAGAQLSWLYKEATVQEVDVIPEDGAADVRVIISNSAYGKFRKLFPG

SEQ ID NO: 48385 - protein, 287 aa, Homo sapiens
  VARIANT 1: note = MOD_RES - Any amino acid
XSNLKRDVAHLYRGVGSRYIMGSGESFMQLQQRLLREKEAKIRKALDRLRKKRHLLRRQRTRREFPVISVVGYTNCGKTTLIKALTGDAAIQPRDQLFATLDVTAHAGTLPSRMTVLYVDTIGFLSQLPHGLIESFSATLEDVAHSDLILHVRDVSHPEAELQKCSVLSTLRGLQLPAPLLDSMVEVHNKVDLVPGYSPTEPNVVPVSALRGHGLQELKAELDAAVLKATGRQILTLRVRLAGAQLSWLYKEATVQEVDVIPEDGAADVRVIISNSAYGKFRKLFPG

SEQ ID NO: 48386 - protein, 296 aa, Homo sapiens
MTLNNVTMRQGTVGMQPQQQRWSIPADGRHLMVQKEPHQYSHRNRHSATPEDHCRRSWSSDSTDSVISSESGNTYYRVVLIGEQGVGKSTLANIFAGVHDSMDSDCEVLGEDTYERTLMVDGESATIILLDMWENKGENEWLHDHCMQVGDAYLIVYSITDRASFEKASELRIQLRRARQTEDIPIILVGNKSDLVRCREVSVSEGRACAVVFDCKFIETSAAVQHNVKELFEGIVRQVRLRRDSKEKNERRLAYQKRKESMPRKARRFWGKIVAKNNKNMAFKLKSKSCHDLSVL

SEQ ID NO: 48387 - protein, 296 aa, Homo sapiens; identical to SEQ ID NO: 48386

SEQ ID NO: 48388 - protein, 93 aa, Homo sapiens
MTLNNVTMRQGTVGMQPQQQRWSIPADGRHLMVQKEPHQYSHRNRHSATPEDHCRRSWSSDSTDSVISSESGNTYYRVVLIGEQGVGKSTLAN

SEQ ID NO: 48389 - protein, 308 aa, Homo sapiens
MVMEKPSPLLVGREFVRQYYTLLNQAPDMLHRFYGKNSSYVHGGLDSNGKPADAVYGQKEVEEPEERQQTPEVVPDDSGTFYDQAVVSNDMEEHLEEPVAEPEPDPEPEPEQEPVSEIQEEKPPRPESKPESQIPPQRPQRDQRVREQRINIPPQRGPRPIREAGEQGDIEPRRMVRHPDSHQLFIGNLPHEVDKSELKDFFQSYGNVVELRINSGGKLPNFGFVVFDDSEPVQKVLSNRPIMFRGEVRLNVEEKKTRAAREGDRRDNRLRGPGGPRGGLGGGMRGPPRGGMVQKPGFGVGRGLAPRQ

SEQ ID NO: 48390 - protein, 466 aa, Homo sapiens
MVMEKPSPLLVGREFVRQYYTLLNQAPDMLHRFYGKNSSYVHGGLDSNGKPADAVYGQKEIHRKVMSQNFTNCHTKIRHVDAHATLNDGVVVQVMGLLSNNNQALRRFMQTFVLAPEGSVANKFYVHNDIFRYQDEVFGGFVTEPQEESEEEVEEPEERQQTPEVVPDDSGTFYDQAVVSNDMEEHLEEPVAEPEPDPEPEPEQEPVSEIQEEKPEPVLEETAPEDAQKSSSPAPADIAQTVQEDLRTFSWASVTSKNLPPSGAVPVTGIPPHVVKVPASQPRPESKPESQIPPQRPQRDQRVREQRINIPPQRGPRPIREAGEQGDIEPRRMVRHPDSHQLFIGNLPHEVDKSELKDFFQSYGNVVELRINSGGKLPNFGFVVFDDSEPVQKVLSNRPIMFRGEVRLNVEEKKTRAAREGDRRDNRLRGPGGPRGGLGGGMRGPPRGGMVQKPGFGVGRGLAPRQ

SEQ ID NO: 48391 - protein, 466 aa, Homo sapiens; identical to SEQ ID NO: 48390

SEQ ID NO: 48392 - protein, 105 aa, Homo sapiens
MVMEKPSPLLVGREFVRQYYTLLNQAPDMLHRFYGKNSSYVHGGLDSNGKPADAVYGQKEIHRKVMSQNFTNCHTKIRHVDAHATLNDGVVVQVMGLLSNNNQAL

SEQ ID NO: 48393 - protein, 122 aa, Homo sapiens
MVMEKPSPLLVGREFVRQYYTLLNQAPDMLHRFYGKNSSYVHGGLDSNGKPADAVYGQKEIHRKVMSQNFTNCHTKIRHVDAHATLNDGVVVQVMGLLSNNNQALRRFMQTFVLAPESLKKK

SEQ ID NO: 48394 - protein, 117 aa, Homo sapiens
MVMEKPSPLLVGREFVRQYYTLLNQAPDMLHRFYGKNSSYVHGGLDSNGKPADAVYGQKEIHRKVMSQNFTNCHTKIRHVDAHATLNDGVVVQVMGLLSNNNQALRRFMQTFVLAPE

SEQ ID NO: 48395 - protein, 122 aa, Homo sapiens; identical to SEQ ID NO: 48393

SEQ ID NO: 48396 - protein, 106 aa, Homo sapiens
MVMEKPSPLLVGREFVRQYYTLLNQAPDMLHRFYGKNSSYVHGGLDSNGKPADAVYGQKEIHRKVMSQNFTNCHTKIRHVDAHATLNDGVVVQVMGLLSNNNQALR

SEQ ID NO: 48397 - protein, 284 aa, Homo sapiens [sequence omitted]

SEQ ID NO: 48398 - protein, 1452 aa, Homo sapiens
MVKLDIHTLAHHLKQERLYVNSEKQLIQRLNADVLKTAEKLYRTAWIAKQQRINLDRLIITSAEASPAECCQHAKILEDTQFVDGYKQLGFQETAYGEFLSRLRENPRLIASSLVAGEKLNQENTQSVIYTVFTSLYGNCIMQEDESYLLQVLRYLIEFELKESDNPRRLLRRGTCAFSILFKLFSEGLFSAKLFLTATLHEPIMQLLVEDEDHLETDPNKLIERFSPSQQEKLFGEKGSDRFRQKVQEMVESNEAKLVALVNKFIGYLKQNTYCFPHSLRWIVSQMYKTLSCVDRLEVGEVRAMCTDLLLACFICPAVVNPEQYGIISDAPINEVARFNLMQVGRLLQQLAMTGSEEGDPRTKSSLGKFDKSCVAAFLDVVIGGRAVETPPLSSVNLLEGLSRTVVYITYSQLITLVNFMKSVMSGDQLREDRMALDNLLANLPPAKPGKSSSLEMTPYNTPQLSPATTPANKKNRLPIATRSRSRTNMLMDLHMDHEGSSQETIQEVQPEEVLVISLGTGPQLTPGMMSENEVLNMQLSDGGQGDVPVDENKLHGKPDKTLRFSLCSDNLEGISEGPSNRSNSVSSLDLEGESVSELGAGPSGSNGVEALQLLEHEQATTQDNLDDKLRKFEIRDMMGLTDDRDISETVSETWSTDVLGSDFDPNIDEDRLQEIAGAAAENMLGSLLCLPGSGSVLLDPCTGSTISETTSEAWSVEVLPSDSEAPDLKQEERLQELESCSGLGSTSDDTDVREVSSRPSTPGLSVVSGISATSEDIPNKIEDLRSECSSDFGGKDSVTSPDMDEITHGASAVVRPKVHYARPSHPPPDPPILEGAVGGNEARLPNFGSHVLTPAEMEAFKQRHSYPERLVRSRSSDIVSSVRRPMSDPSWNRRPGNEERELPPAAAIGATSLVAAPHSSSSSPSKDSSRGETEERKDSDDEKSDRNRPWWRKRFVSAMPKAPIPFRKKEKQEKDKDDLGPDRFSTLTDDPSPRLSAQAQVAEDILDKYRNAIKRTSPSDGAMANYESTGDNHDRDLSSKLLYHSDKEVMGDGESAHDSPRDEALQNISADDLPDSASQAAHPQDSAFSYRDAKKKLRLALCSADSVAFPVLTHSTRNGLPDHTDPEDNEIVCFLKVQIAEAINLQDKNLMAQLQETMRCVCRFDNRTCRKLLASIAEDYRKRAPYIAYLTRCRQGLQTTQAHLERLLQRVLRDKEVANRYFTTVCVRLLLESKEKKIREFIQDFQKLTAADDKTAQVEDFLQFLYGAMAQDVIWQNASEEQLQDAQLAIERSVMNRIFKLAFYPNQDGDILRDQVLHEHIQRLSKVVTANHRALQIPEVYLREAPWPSAQSEIRTISAYKTPRDKVQCILRMCSTIMNLLSLANEDSVPGADDFVPVLVFVLIKANPPCLLSTVQYISSFYASCLSGEESYWWMQFTAAVEFIKTIDDRK

SEQ ID NO: 48399 - protein, 497 aa, Homo sapiens
MVKLDIHTLAHHLKQERLYVNSEKQLIQRLNADVLKTAEKLYRTAWIAKQQRINLDRLIITSAEASPAECCQHAKILEDTQFVDGYKQLGFQETAYGEFLSRLRENPRLIASSLVAGEKLNQENTQSVIYTVFTSLYGNCIMQEDESYLLQVLRYLIEFELKESDNPRRLLRRGTCAFSILFKLFSEGLFSAKLFLTATLHEPIMQLLVEDEDHLETDPNKLIERFSPSQQEKLFGEKGSDRFRQKVQEMVESNEAKLVALVNKFIGYLKQNTYCFPHSLRWIVSQMYKTLSCVDRLEVGEVRAMCTDLLLACFICPAVVNPEQYGIISDAPINEVARFNLMQVGRLLQQLAMTGSEEGDPRTKSSLGKFDKSCVAAFLDVVIGGRAVETPPLSSVNLLEGLSRTVVYITYSQLITLVNFMKSVMSGDQLREDRMALDNLLANLPPAKPGKSSSLEMTPYNTPQLSPATTPANKKNRLPIGKENFSYWSFLLNLIFH

SEQ ID NO: 48400 - protein, 1478 aa, Homo sapiens
MVKLDIHTLAHHLKQERLYVNSEKQLIQRLNADVLKTAEKLYRTAWIAKQQRINLDRLIITSAEASPAECCQHAKILEDTQFVDGYKQLGFQETAYGEFLSRLRENPRLIASSLVAGEKLNQENTQSVIYTVFTSLYGNCIMQEDESYLLQVLRYLIEFELKESDNPRRLLRRGTCAFSILFKLFSEGLFSAKLFLTATLHEPIMQLLVEDEDHLETDPNKLIERFSPSQQEKLFGEKGSDRFRQKVQEMVESNEAKLVALVNKFIGYLKQNTYCFPHSLRWIVSQMYKTLSCVDRLEVGEVRAMCTDLLLACFICPAVVNPEQYGIISDAPINEVARFNLMQVGRLLQQLAMTGSEEGDPRTKSSLGKFDKSCVAAFLDVVIGGRAVETPPLSSVNLLEGLSRTVVYITYSQLITLVNFMKSVMSGDQLREDRMALDNLLANLPPAKPGKSSSLEMTPYNTPQLSPATTPANKKNRLPIATRSRSRTNMLMDLHMDHEGSSQETIQEVQPEEVLVISLGTGPQLTPGMMSENEVLNMQLSDGGQGDVPVDENKLHGKPDKTLRFSLCSDNLEGISEGPSNRSNSVSSLDLEGESVSELGAGPSGSNGVEALQLLEHEQATTQDNLDDKLRKFEIRDMMGLTDDRDISETVSETWSTDVLGSDFDPNIDEDRLQEIAGAAAENMLGSLLCLPGSGSVLLDPCTGSTISETTSEAWSVEVLPSDSEAPDLKQEERLQELESCSGLGSTSDDTDVREVSSRPSTPGLSVVSGISATSEDIPNKIEDLRSECSSDFGGKDSVTSPDMDEITHGAHQLTSPPSQSESLLAMFDPLSSHEGASAVVRPKVHYARPSHPPPDPPILEGAVGGNEARLPNFGSHVLTPAEMEAFKQRHSYPERLVRSRSSDIVSSVRRPMSDPSWNRRPGNEERELPPAAAIGATSLVAAPHSSSSSPSKDSSRGETEERKDSDDEKSDRNRPWWRKRFVSAMPKAPIPFRKKEKQEKDKDDLGPDRFSTLTDDPSPRLSAQAQVAEDILDKYRNAIKRTSPSDGAMANYESTGDNHDRDLSSKLLYHSDKEVMGDGESAHDSPRDEALQNISADDLPDSASQAAHPQDSAFSYRDAKKKLRLALCSADSVAFPVLTHSTRNGLPDHTDPEDNEIVCFLKVQIAEAINLQDKNLMAQLQETMRCVCRFDNRTCRKLLASIAEDYRKRAPYIAYLTRCRQGLQTTQAHLERLLQRVLRDKEVANRYFTTVCVRLLLESKEKKIREFIQDFQKLTAADDKTAQVEDFLQFLYGAMAQDVIWQNASEEQLQDAQLAIERSVMNRIFKLAFYPNQDGDILRDQVLHEHIQRLSKVVTANHRALQIPEVYLREAPWPSAQSEIRTISAYKTPRDKVQCILRMCSTIMNLLSLANEDSVPGADDFVPVLVFVLIKANPPCLLSTVQYISSFYASCLSGEESYWWMQFTAAVEFIKTIDDRK

SEQ ID NO: 48401 - protein, 1487 aa, Homo sapiens
MVKLDIHTLAHHLKQERLYVNSEKQLIQRLNADVLKTAEKLYRTAWIAKQQRINLDRLIITSAEASPAECCQHAKILEDTQFVDGYKQLGFQETAYGEFLSRLRENPRLIASSLVAGEKLNQENTQSVIYTVFTSLYGNCIMQEDESYLLQVLRYLIEFELKESDNPRRLLRRGTCAFSILFKLFSEGLFSAKLFLTATLHEPIMQLLVEDEDHLETDPNKLIERFSPSQQEKLFGEKGSDRFRQKVQEMVESNEAKLVALVNKFIGYLKQNTYCFPHSLRWIVSQMYKTLSCVDRLEVGEVRAMCTDLLLACFICPAVVNPEQYGIISDAPINEVARFNLMQVGRLLQQLAMTGSEEGDPRTKSSLGKFDKSCVAAFLDVVIGGRAVETPPLSSVNLLEGLSRTVVYITYSQLITLVNFMKSVMSGDQLREDRMALDNLLANLPPAKPGKSSSLEMTPYNTPQLSPATTPANKKNRLPIATRSRSRTNMLMDLHMDHEGSSQETIQEVQPEEVLVISLGTGPQLTPGMMSENEVLNMQLSDGGQGDVPVDENKLHGKPDKTLRFSLCSDNLEGISEGPSNRSNSVSSLDLEGESVSELGAGPSGSNGVEALQLLEHEQATTQDNLDDKLRKFEIRDMMGLTDDRDISETVSETWSTDVLGSDFDPNIDEDRLQEIAGAAAENMLGSLLCLPGSGSVLLDPCTGSTISETTSEAWSVEVLPSDSEAPDLKQEERLQELESCSGLGSTSDDTDVREVSSRPSTPGLSVVSGISATSEDIPNKIEDLRSECSSDFGGKDSVTSPDMDEITHDFLYILQPKQHFQHIEAEADMRIQLSSSAHQLTSPPSQSESLLAMFDPLSSHEGASAVVRPKVHYARPSHPPPDPPILEGAVGGNEARLPNFGSHVLTPAEMEAFKQRHSYPERLVRSRSSDIVSSVRRPMSDPSWNRRPGNEERELPPAAAIGATSLVAAPHSSSSSPSKDSSRGETEERKDSDDEKSDRNRPWWRKRFVSAMPKAPIPFRKKEKQEKDKDDLGPDRFSTLTDDPSPRLSAQAQVAEDILDKYRNAIKRTSPSDGAMANYESTEVMGDGESAHDSPRDEALQNISADDLPDSASQAAHPQDSAFSYRDAKKKLRLALCSADSVAFPVLTHSTRNGLPDHTDPEDNEIVCFLKVQIAEAINLQDKNLMAQLQETMRCVCRFDNRTCRKLLASIAEDYRKRAPYIAYLTRCRQGLQTTQAHLERLLQRVLRDKEVANRYFTTVCVRLLLESKEKKIREFIQDFQKLTAADDKTAQVEDFLQFLYGAMAQDVIWQNASEEQLQDAQLAIERSVMNRIFKLAFYPNQDGDILRDQVLHEHIQRLSKVVTANHRALQIPEVYLREAPWPSAQSEIRTISAYKTPRDKVQCILRMCSTIMNLLSLANEDSVPGADDFVPVLVFVLIKANPPCLLSTVQYISSFYASCLSGEESYWWMQFTAAVEFIKTIDDRK

SEQ ID NO: 48402 - protein, 837 aa, Homo sapiens
  VARIANT 1: note = MOD_RES - Any amino acid
XNCIMQEDESYLLQVLRYLIEFELKESDNPRRLLRRGTCAFSILFKLFSEGLFSAKLFLTATLHEPIMQLLVEDEDHLETDPNKLIERFSPSQQEKLFGEKGSDRFRQKVQEMVESNEAKLVALVNKFIGYLKQNTYCFPHSLRWIVSQMYKTLSCVDRLEVGEVRAMCTDLLLACFICPAVVNPEQYGIISDAPINEVARFNLMQVGRLLQQLAMTGSEEGDPRTKSSLGKFDKSCVAAFLDVVIGGRAVETPPLSSVNLLEGLSRTVVYITYSQLITLVNFMKSVMSGDQLREDRMALDNLLANLPPAKPGKSSSLEMTPYNTPQLSPATTPANKKNRLPIATRSRSRTNMLMDLHMDHEGSSQETIQEVQPEEVLVISLGTGPQLTPGMMSENEVLNMQLSDGGQGDVPVDENKLHGKPDKTLRFSLCSDNLEGISEGPSNRSNSVSSLDLEGESVSELGAGPSGSNGVEALQLLEHEQATTQDNLDDKLRKFEIRDMMGLTDDRDISETVSETWSTDVLGSDFDPNIDEDRLQEIAGAAAENMLGSLLCLPGSGSVLLDPCTGSTISETTSEAWSVEVLPSDSEAPDLKQEERLQELESCSGLGSTSDDTDVREVSSRPSTPGLSVVSGISATSEDIPNKIEDLRSECSSDFGGKDSVTSPDMDEITHGASAVVRPKVHYARPSHPPPDPPILEGAVGGNEARLPNFGSHVLTPAEMEAFKQRHSYPERLVRSRSSDIVSSVRRPMSDPSWNRRPGNEERELPPAAAIGATSLVAAPHSSSSSPSKDSSRGETEERKDSDDEKSDRNRPWWRKRFVSAMPKAPIPFRKKEKQE

SEQ ID NO: 48403 - protein, 830 aa, Homo sapiens
  VARIANT 1: note = MOD_RES - Any amino acid
XLRRGTCAFSILFKLFSEGLFSAKLFLTATLHEPIMQLLVEDEDHLETDPNKLIERFSPSQQEKLFGEKGSDRFRQKVQEMVESNEAKLVALVNKFIGYLKQNTYCFPHSLRWIVSQMYKTLSCVDRLEVGEVRAMCTDLLLACFICPAVVNPEQYGIISDAPINEVARFNLMQVGRLLQQLAMTGSEEGDPRTKSSLGKFDKSCVAAFLDVVIGGRAVETPPLSSVNLLEGLSRTVVYITYSQLITLVNFMKSVMSGDQLREDRMALDNLLANLPPAKPGKSSSLEMTPYNTPQLSPATTPANKKNRLPIGQQLAAITAWDSSATNITSHITVVTPFATRSRSRTNMLMDLHMDHEGSSQETIQEVQPEEVLVISLGTGPQLTPGMMSENEVLNMQLSDGGQGDVPVDENKLHGPSNRSNSVSSLDLEGESVSELGAGPSGSNGVEALQLLEHEQATTQDNLDDKLRKFEIRDMMGLTDDRDISETVSETWSTDVLGSDFDPNIDEDRLQEIAGAAAENMLGSLLCLPGSGSVLLDPCTGSTISETTSEAWSVEVLPSDSEAPDLKQEERLQELESCSGLGSTSDDTDVREVSSRPSTPGLSVVSGISATSEDIPNKIEDLRSECSSDFGGKDSVTSPDMDEITHGAHQLTSPPSQSESLLAMFDPLSSHEGASAVVRPKVHYARPSHPPPDPPILEGAVGGNEARLPNFGSHVLTPAEMEAFKQRHSYPERLVRSRSSDIVSSVRRPMSDPSWNRRPGNEERELPPAAAIGATSLVAAPHSSSSSPSKDSSRGETEERKDSDDEKSDRNRPWWRKRFVSAMPKAPIPF

SEQ ID NO: 48404 - protein, 171 aa, Homo sapiens
MVQWPRMSYGKTRVMNRIFKLAFYPNQDGDILRDQVLHEHIQRLSKVVTANHRALQIPEVYLREAPWPSAQSEIRTISAYKTPRDKVQCILRMCSTIMNLLSLANEDSVPGADDFVPVLVFVLIKANPPCLLSTVQYISSFYASCLSGEESYWWMQFTAAVEFIKTIDDRK

SEQ ID NO: 48405 - protein, 117 aa, Homo sapiens
MVKLDIHTLAHHLKQERLYVNSEKQLIQRLNADVLKTAEKLYRTAWIAKQQRINLDRLIITSAEASPAECCQHAKILEDTQFVDGYKQLGFQETAYGEFLSRLRENPRLIASSLVAG

SEQ ID NO: 48406 - protein, 988 aa, Homo sapiens
MVKLDIHTLAHHLKQERLYVNSEKQLIQRLNADVLKTAEKLYRTAWIAKQQRINLDRLIITSAEASPAECCQHAKILEDTQFVDGYKQLGFQETAYGEFLSRLRENPRLIASSLVAGEKLNQENTQSVIYTVFTSLYGNCIMQEDESYLLQVLRYLIEFELKESDNPRRLLRRGTCAFSILFKLFSEGLFSAKLFLTATLHEPIMQLLVEDEDHLETDPNKLIERFSPSQQEKLFGEKGSDRFRQKVQEMVESNEAKLVALVNKFIGYLKQNTYCFPHSLRWIVSQMYKTLSCVDRLEVGEVRAMCTDLLLACFICPAVVNPEQYGIISDAPINEVARFNLMQVGRLLQQLAMTGSEEGDPRTKSSLGKFDKSCVAAFLDVVIGGRAVETPPLSSVNLLEGLSRTVVYITYSQLITLVNFMKSVMSGDQLREDRMALDNLLANLPPAKPGKSSSLEMTPYNTPQLSPATTPANKKNRLPIATRSRSRTNMLMDLHMDHEGSSQETIQEVQPEEVLVISLGTGPQLTPGMMSENEVLNMQLSDGGQGDVPVDENKLHGKPDKTLRFSLCSDNLEGISEGPSNRSNSVSSLDLEGESVSELGAGPSGSNGVEALQLLEHEQATTQDNLDDKLRKFEIRDMMGLTDDRDISETVSETWSTDVLGSDFDPNIDEDRLQEIAGAAAENMLGSLLCLPGSGSVLLDPCTGSTISETTSEAWSVEVLPSDSEAPDLKQEERLQELESCSGLGSTSDDTDVREVSSRPSTPGLSVVSGISATSEDIPNKIEDLRSECSSDFGGKDSVTSPDMDEITHGAHQLTSPPSQSESLLAMFDPLSSHEGASAVVRPKVHYARPSHPPPDPPILEGAVGGNEARLPNFGSHVLTPAEMEAFKQRHSYPERLVRSRSSDIVSSVRRPMSDPSWNRRPGNEERELPPAAAIGATSLVAAPHSSSSSPSKDSSRGETEERKDSDDEKSDRNRPWWRKRFVSAMPK

SEQ ID NO: 48407 - protein, 1478 aa, Homo sapiens; identical to SEQ ID NO: 48400

SEQ ID NO: 48408 - protein, 756 aa, Homo sapiens
MVKLDIHTLAHHLKQERLYVNSEKQLIQRLNADVLKTAEKLYRTAWIAKQQRINLDRLIITSAEASPAECCQHAKILEDTQFVDGYKQLGFQETAYGEFLSRLRENPRLIASSLVAGEKLNQENTQSVIYTVFTSLYGNCIMQEDESYLLQVLRYLIEFELKESDNPRRLLRRGTCAFSILFKLFSEGLFSAKLFLTATLHEPIMQLLVEDEDHLETDPNKLIERFSPSQQEKLFGEKGSDRFRQKVQEMVESNEAKLVALVNKFIGYLKQNTYCFPHSLRWIVSQMYKTLSCVDRLEVGEVRAMCTDLLLACFICPAVVNPEQYGIISDAPINEVARFNLMQVGRLLQQLAMTGSEEGDPRTKSSLGKFDKSCVAAFLDVVIGGRAVETPPLSSVNLLEGLSRTVVYITYSQLITLVNFMKSVMSGDQLREDRMALDNLLANLPPAKPGKSSSLEMTPYNTPQLSPATTPANKKNRLPIATRSRSRTNMLMDLHMDHEGSSQETIQEVQPEEVLVISLGTGPQLTPGMMSENEVLNMQLSDGGQGDVPVDENKLHGKPDKTLRFSLCSDNLEGISEGPSNRSNSVSSLDLEGESVSELGAGPSGSNGVEALQLLEHEQATTQDNLDDKLRKFEIRDMMGLTDDRDISETVSETWSTDVLGSDFDPNIDEDRLQEIAGAAAENMLGSLLCLPGSGSVLLDPCTGSTISETTSEAWSVEVLPSDSEAPDLKQEERLQELESCSGLGSTSDDTDVREA

SEQ ID NO: 48409 - protein, 306 aa, Homo sapiens
MGGRKMATDEENVYGLEENAQSRQESTRRLILVGRTGAGKSATGNSILGQRRFFSRLGATSVTRACTTGSRRWDKCHVEVVDTPDIFSSQVSKTDPGCEERGHCYLLSAPGPHALLLVTQLGRFTAQDQQAVRQVRDMFGEDVLKWMVIVFTRKEDLAGGSLHDYVSNTENRALRELVAECGGRVCAFDNRATGREQEAQVEQLLGMVEGLVLEHKGAHYSNEVYELAQVLRWAGPEERLRRVAERVAARVQRRPWGAWLSARLWKWLKSPRSWRLGLALLLGGALLFWVLLHRRWSEAVAEVGPD

SEQ ID NO: 48410 - protein, 337 aa, Homo sapiens
MDQNEHSHWGPHAKGQCASRSELRIILVGKTGTGKSAAGNSILRKQAFESKLGSQTLTKTCSKSQGSWGNREIVIIDTPDMFSWKDHCEALYKEVQRCYLLSAPGPHVLLLVTQLGRYTSQDQQAAQRVKEIFGEDAMGHTIVLFTHKEDLNGGSLMDYMHDSDNKALSKLVAACGGRICAFNNRAEGSNQDDQVKELMDCIEDLLMEKNGDHYTNGLYSLIQRSKCGPVGSDERVKEFKQSLIKYMETQRSYTALAEANCLKGALIKTQLCVLFCIQLFLRLIILWLCILHSMCNLFCCLLFSMCNLFCSLLFIIPKKLMIFLRTVIRLERKTPRL

SEQ ID NO: 48411 - protein, 329 aa, Homo sapiens
MAAQYGSMSFNPSTPGASYGPGRQEPRNSQLRIVLVGKTGAGKSATGNSILGRKVFHSGTAAKSITKKCEKRSSSWKETELVVVDTPGIFDTEVPNAETSKEIIRCILLTSPGPHALLLVVPLGRYTEEEHKATEKILKMFGERARSFMILIFTRKDDLGDTNLHDYLREAPEDIQDLMDIFGDRYCALNNKATGAEQEAQRAQLLGLIQRVVRENKEGCYTNRMYQRAEEEIQKQTQAMQELHRVELEREKARIREEYEEKIRKLEDKVEQEKRKKQMEKKLAEQEAHYAVRQQRARTEVESKDGILELIMTALQIASFILLRLFAED

SEQ ID NO: 48412 - protein, 261 aa, Homo sapiens
MAAQYGSMSFNPSTPGASYGPGRQEPRNSQLRIVLVGKTGAGKSATGNSILGRKVFHSGTAAKSITKKILKMFGERARSFMILIFTRKDDLGDTNLHDYLREAPEDIQDLMDIFGDRYCALNNKATGAEQEAQRAQLLGLIQRVVRENKEGCYTNRMYQRAEEEIQKQTQAMQELHRVELEREKARIREEYEEKIRKLEDKVEQEKRKKQMEKKLAEQEAHYAVRQQRARTEVESKDGILELIMTALQIASFILLRLFAED

SEQ ID NO: 48413 - protein, 151 aa, Homo sapiens
MAAQYGSMSFNPSTPGASYGERAFSAPQTRLQGGPGRQEPRNSQLRIVLVGKTGAGKSATGNSILGRKVFHSGTAAKSITKKCEKRSSSWKETELVVVDTPGIFDTEVPNAETSKEIIRCILLTSPGPHALLLVVPLGRYTEEEHKATEKI

SEQ ID NO: 48414 - protein, 307 aa, Homo sapiens
MGGFQRGKYGTMAEGRSEDNLSATPPALRIILVGKTGCGKSATGNSILGQPVFESKLRAQSVTRTCQVKTGTWNGRKVLVVDTPSIFESQADTQELYKNIGDCYLLSAPGPHVLLLVIQLGRFTAQDTVAIRKVKEVFGTGAMRHVVILFTHKEDLGGQALDDYVANTDNCSLKDLVRECERRYCAFNNWGSVEEQRQQQAELLAVIERLGREREGSFHSNDLFLDAQLLQRTGAGACQEDYRQYQAKVEWQVEKHKQELRENESNWAYKALLRVKHLMLLHYEIFVFLLLCSILFFIIFLFIFHYI

SEQ ID NO: 48415 - protein, 343 aa, Homo sapiens
MELSAPAHGSSLTASAQPPSVTATLEDRAQQPFLERMGGFQRGKYGTMAEGRSEDNLSATPPALRIILVGKTGCGKSATGNSILGQPVFESKLRAQSVTRTCQVKTGTWNGRKVLVVDTPSIFESQADTQELYKNIGDCYLLSAPGPHVLLLVIQLGRFTAQDTVAIRKVKEVFGTGAMRHVVILFTHKEDLGGQALDDYVANTDNCSLKDLVRECERRYCAFNNWGSVEEQRQQQAELLAVIERLGREREGSFHSNDLFLDAQLLQRTGAGACQEDYRQYQAKVEWQVEKHKQELRENESNWAYKALLRVKHLMLLHYEIFVFLLLCSILFFIIFLFIFHYI

SEQ ID NO: 48416 - protein, 292 aa, Homo sapiens
MEEEEYEQIPQENPPEELSQDPVLELSGGLREKEQKTPRRLRLILMGKTGSGKSATGNSILGRDVFESKLSTRPVTKTSQRRSREWAGKELEVIDTPNILSPQVSPEVADAICQAIVLSAPGPHAVLLVTQLGRFTDEDQQVVRRLQEVFGVGVLGHTILVFTRKEDLAGGSLEDYVRETNNQALAWLDVTLARRHCGFNNRAQGEEQEAQLRELMEKVEAIMWENEGDYYSNKAYQYTQQNFRLKELQERQVSQGQGSEDVPGEESWLEGLSQIQKESEEAHRCLLGKADL

SEQ ID NO: 48417 - protein, 353 aa, Homo sapiens
KPWYWVSWCSIGQVSLFFLGSALALGENVQPHLQGCGPRMVAQRWFQGRCWSFTICPCSLGVHPEAPGDDKMGYMGPYPSSLCFLWIFLGLREKEQKTPRRLRLILMGKTGSGKSATGNSILGRDVFESKLSTRPVTKTSQRRSREWAGKELEVIDTPNILSPQVSPEVADAICQAIVLSAPGPHAVLLVTQLGRFTDEDQQVVRRLQEVFGVGVLGHTILVFTRKEDLAGGSLEDYVRETNNQALAWLDVTLARRHCGFNNRAQGEEQEAQLRELMEKVEAIMWENEGDYYSNKAYQYTQQNFRLKELQERQVSQGQGSEDVPGEESWLEGLSQIQKESEEAHRCLLGKADL

SEQ ID NO: 48418 - protein, 62 aa, Homo sapiens
MEEEEYEQIPQENPPEELSQDPVLELSGGLARGGRRYLPSHRLIRPRAPRRAPGDTTGPVHG

SEQ ID NO: 48419 - protein, 387 aa, Homo sapiens
MVHCSCVLFRKYGNFIDKLRLFTRGGSGGMGYPRLGGEGGKGGDVWVVAQNRMTLKQLKDRYPRKRFVAGVGANSKISALKGSKGKDCEIPVPVGISVTDENGKIIGELNKENDRILVAQGGLGGKLLTNFLPLKGQKRIIHLDLKLIADVGLVGFPNAGKSSLLSCVSHAKPAIADYAFTTLKPELGKIMYSDFKQISVADLPGLIEGAHMNKGMGHKFLKHIERTRQLLFVVDISGFQLSSHTQYRTAFETIILLTKELELYKEELQTKPALLAVNKMDLPDAQDKFHELMSQLQNPKDFLHLFEKNMIPERTVEFQHIIPISAVTGEGIEELKNCIRKSLDEQANQENDALHKKQLLNLWISDTMSSTEPPSKHAVTTSKMDII

SEQ ID NO: 48420 - protein, 308 aa, Homo sapiens
MVHCSCVLFRKYGNFIDKLRLFTRGGSGGMGYPRLGGEGGKGGDVWVVAQNRMTLKQLKDRYPRKRFVAGVGANSKFPNAGKSSLLSCVSHAKPAIADYAFTTLKPELGKIMYSDFKQISVADLPGLIEGAHMNKGMGHKFLKHIERTRQLLFVVDISGFQLSSHTQYRTAFETIILLTKELELYKEELQTKPALLAVNKMDLPDAQDKFHELMSQLQNPKDFLHLFEKNMIPERTVEFQHIIPISAVTGEGIEELKNCIRKSLDEQANQENDALHKKQLLNLWISDTMSSTEPPSKHAVTTSKMDII

SEQ ID NO: 48421 - protein, 236 aa, Homo sapiens
MSAPSATPIFAPGENCSPAWGAAPAAYDAADTHLRILGKPVMERWETPYMHALAAAASSKGGRVLEVGFGMAIAASKVQEAPIDEHWIIECNDGVFQRLRDWAPRQTHKVIPLKGLWEDVAPTLPDGHFDGILYDTYPLSEETWHTHQFNFIKNHAFRLLKPGGVLTYCNLTSWGELMKSKYSDITIMFEETQVPALLEAGFRRENIRTEVMALVPPADCRYYAFPQMITPLVTKG

SEQ ID NO: 48422 - protein, 269 aa, Homo sapiens
MSAPSATPIFAPGENCSPAWGAAPAAYDAADTHLRILGKPVMERWETPYMHALAAAASSKGGRVLEVGFGMAIAASKVQEAPIDEHWIIECNDGVFQRLRDWAPRQTHKVIPLKGLWEDVAPTLPDGHFDGILYDTYPLSEETWHTHQFNFIKNHAFRLLKPGGVLTYCNLTSWGELMKSKYSDITIMFEVRPPEVPHGSPGSDLGWGWEGAAGATLLPGEGPFLTPWVGWTVLVHLEIKVLCLAQWLPGAVAQVYNPSTVEGRGGQIA

SEQ ID NO: 48423 - protein, 471 aa, Homo sapiens
MCAAQMPPLAHIFRGTFVHSTWTCPMEVLRDHLLGVSDSGKIVFLEEASQQEKLAKEWCFKPCEIRELSHHEFFMPGLVDTHIHASQYSFAGSSIDLPLLEWLTKYTFPAEHRFQNIDFAEEVYTRVVRRTLKNGTTTACYFATIHTDSSLLLADITDKFGQRAFVGKVCMDLNDTFPEYKETTEESIKETERFVSEMLQKNYSRVKPIVTPRFSLSCSETLMGELGNIAKTRDLHIQSHISENRDEVEAVKNLYPSYKNYTSVYDKNNLLTNKTVMAHGCYLSAEELNVFHERGASIAHCPNSNLSLSSGFLNVLEVLKHEVKIGLGTDVAGGYSYSMLDAIRRAVMVSNILLINKVNEKSLTLKEVFRLATLGGSQALGLDGEIGNFEVGKEFDAILINPKASDSPIDLFYGDFFGDISEAVIQKFLYLGDDRNIEEVYVGGKQVVPFSSSVKETIHLPASSPHPPPFP

SEQ ID NO: 48424 - protein, 454 aa, Homo sapiens
MCAAQMPPLAHIFRGTFVHSTWTCPMEVLRDHLLGVSDSGKIVFLEEASQQEKLAKEWCFKPCEIRELSHHEFFMPGLVDTHIHASQYSFAGSSIDLPLLEWLTKYTFPAEHRFQNIDFAEEVYTRVVRRTLKNGTTTACYFATIHTDSSLLLADITDKFGQRAFVGKVCMDLNDTFPEYKETTEESIKETERFVSEMLQKNYSRVKPIVTPRFSLSCSETLMGELGNIAKTRDLHIQSHISENRDEVEAVKNLYPSYKNYTSVYDKNNLLTNKTVMAHGCYLSAEELNVFHERGASIAHCPNSNLSLSSGFLNVLEVLKHEVKIGLGTDVAGGYSYSMLDAIRRAVMVSNILLINKVNEKSLTLKEVFRLATLGGSQALGLDGEIGNFEVGKEFDAILINPKASDSPIDLFYGDFFGDISEAVIQKFLYLGDDRNIEEVYVGGKQVVPFSSSV

SEQ ID NO: 48425 - protein, 393 aa, Homo sapiens
MFLEEASQQEKLAKEWCFKPCEIRELSHHEFFMPGLVDTHIHASQYSFAGSSIDLPLLEWLTKYTFPAEHRFQNIDFAEEVYTRVVRRTLKNGTTTACYFATIHTDSSLLLADITDKFGQRAFVGKVCMDLNDTFPEYKETTEESIKETERFVSEMLQKNSHISENRDEVEAVKNLYPSYKNYTSVYDKNNLLTNKTVMAHGCYLSAEELNVFHERGASIAHCPNSNLSLSSGFLNVLEVLKHEVKIGLGTDVAGGYSYSMLDAIRRAVMVSNILLINKVNEKSLTLKEVFRLATLGGSQALGLDGEIGNFEVGKEFDAILINPKASDSPIDLFYGDFFGDISEAVIQKFLYLGDDRNIEEVYVGGKQVVPFSSSVKETIHLPASSPHPPPFP

SEQ ID NO: 48426 - protein, 410 aa, Homo sapiens
MEVLRDHLLGVSDSGKIVFLEEASQQEKLAKEWCFKPCEIRELSHHEFFMPGLVDTHIHASQYSFAGSSIDLPLLEWLTKYTFPAEHRFQNIDFAEEVYTRVVRRTLKNGTTTACYFATIHTDSSLLLADITDKFGQRAFVGKVCMDLNDTFPEYKETTEESIKETERFVSEMLQKNSHISENRDEVEAVKNLYPSYKNYTSVYDKNNLLTNKTVMAHGCYLSAEELNVFHERGASIAHCPNSNLSLSSGFLNVLEVLKHEVKIGLGTDVAGGYSYSMLDAIRRAVMVSNILLINKVNEKSLTLKEVFRLATLGGSQALGLDGEIGNFEVGKEFDAILINPKASDSPIDLFYGDFFGDISEAVIQKFLYLGDDRNIEEVYVGGKQVVPFSSSVKETIHLPASSPHPPPFP

SEQ ID NO: 48427 - protein, 195 aa, Homo sapiens
MTLFQNTRRPLRNRSRKLRDCHSVTQAGVQWRDLSSLKPPPPVFKRFSCLSLPSSWDYRFVSEMLQKNYSRVKPIVTPRFSLSCSETLMGELGNIAKTRDLHIQSHISENRDEVEAVKNLYPSYKNYTSVYDKNNLLTNKTVMAHGCYLSAEELNVFHERGASIAHCPNSNLSLSSGFLNVLEVLKHEVKIGLGT

SEQ ID NO: 48428 - protein, 179 aa, Homo sapiens
ERGASIAHCPNSNLSLSSGFLNVLEVLKHEVKIGLGTDVAGGYSYSMLDAIRRAVMVSNILLINKVNEKSLTLKEVFRLATLGGSQALGLDGEIGNFEVGKEFDAILINPKASDSPIDLFYGDFFGDISEAVIQKFLYLGDDRNIEEVYVGGKQVVPFSSSVKETIHLPASSPHPPPFP

SEQ ID NO: 48429 - protein, 454 aa, Homo sapiens; identical to SEQ ID NO: 48424

SEQ ID NO: 48430 - protein, 380 aa, Homo sapiens
MPGLVDTHIHASQYSFAGSSIDLPLLEWLTKYTFPAEHRFQNIDFAEEVYTRVVRRTLKNGTTTACYFATIHTDSSLLLADITDKFGQRAFVGKVCMDLNDTFPEYKETTEESIKETERFVSEMLQKNYSRVKPIVTPRFSLSCSETLMGELGNIAKTRDLHIQSHISENRDEVEAVKNLYPSYKNYTSVYDKNNLLTNKTVMAHGCYLSAEELNVFHERGASIAHCPNSNLSLSSGFLNVLEVLKHEVKIGLGTDVAGGYSYSMLDAIRRAVMVSNILLINKVNEKSLTLKEVFRLATLGGSQALGLDGEIGNFEVGKEFDAILINPKASDSPIDLFYGDFFGDISEAVIQKFLYLGDDRNIEEVYVGGKQVVPFSSSV

SEQ ID NO: 48431 - protein, 693 aa, Homo sapiens
MALCNGDSKLENAGGDLKDGHHHYEGAVVILDAGAQYGKVIDRRVRELFVQSEIFPLETPAFAIKEQGFRAIIISGGPNSVYAEDAPWFDPAIFTIGKPVLGICYGMQMMNKVFGGTVHKKSVREDGVFNISVDNTCSLFRGLQKEEVVLLTHGDSVDKVADGFKVVARSGNIVAGIANESKKLYGAQFHPEVGLTENGKVILKNFLYDIAGCSGTFTVQNRELECIREIKERVGTSKVLVLLSGGVDSTVCTALLNRALNQEQVIAVHIDNGFMRKRESQSVEEALKKLGIQVKVINAAHSFYNGTTTLPISDEDRTPRKRISKTLNMTTSPEEKRKIIGDTFVKIANEVIGEMNLKPEEVFLAQGTLRPDLIESASLVASGKAELIKTHHNDTELIRKLREEGKVIEPLKDFHKDEVRILGRELGLPEELVSRHPFPGPGLAIRVICAEEPYICKDFPETNNILKIVADFSASVKKPHTLLQRVKACTTEEDQEKLMQITSLHSLNAFLLPIKTVGVQGDCRSYSYVCGISSKDEPDWESLIFLARLIPRMCHNVNRVVYIFGPPVKEPPTDVTPTFLTTGVLSTLRQADFEAHNILRESGYAGKISQMPVILTPLHFDRDPLQKQPSCQRSVVIRTFITSDFMTGIPATPGNEIPVEVVLKMVTEIKKIPGISRIMYDLTSKPPGTTEWE

SEQ ID NO: 48432 - protein, 642 aa, Homo sapiens
MLEETLRMATTTIKEQGFRAIIISGGPNSVYAEDAPWFDPAIFTIGKPVLGICYGMQMMNKVFGGTVHKKSVREDGVFNISVDNTCSLFRGLQKEEVVLLTHGDSVDKVADGFKVVARSGNIVAGIANESKKLYGAQFHPEVGLTENGKVILKNFLYDIAGCSGTFTVQNRELECIREIKERVGTSKVLVLLSGGVDSTVCTALLNRALNQEQVIAVHIDNGFMRKRESQSVEEALKKLGIQVKVINAAHSFYNGTTTLPISDEDRTPRKRISKTLNMTTSPEEKRKIIGDTFVKIANEVIGEMNLKPEEVFLAQGTLRPDLIESASLVASGKAELIKTHHNDTELIRKLREEGKVIEPLKDFHKDEVRILGRELGLPEELVSRHPFPGPGLAIRVICAEEPYICKDFPETNNILKIVADFSASVKKPHTLLQRVKACTTEEDQEKLMQITSLHSLNAFLLPIKTVGVQGDCRSYSYVCGISSKDEPDWESLIFLARLIPRMCHNVNRVVYIFGPPVKEPPTDVTPTFLTTGVLSTLRQADFEAHNILRESGYAGKISQMPVILTPLHFDRDPLQKQPSCQRSVVIRTFITSDFMTGIPATPGNEIPVEVVLKMVTEIKKIPGISRIMYDLTSKPPGTTEWE

SEQ ID NO: 48433 - protein, 693 aa, Homo sapiens; identical to SEQ ID NO: 48431

SEQ ID NO: 48434 - protein, 381 aa, Homo sapiens
MSGVVRTLSRCLLPAEAGGARERRAGSGARDAEREARRRSRDIDALLARERRAVRRLVKILLLGAGESGKSTFLKQMRIIHGREFDQKALLEFRDTIFDNILKGSRVLVDARDKLGIPWQYSENEKHGMFLMAFENKAGLPVEPATFQLYVPALSALWRDSGIREAFSRRSEFQLGESVKYFLDNLDRIGQLNYFPSKQDILLARKATKGIVEHDFVIKKIPFKMVDVGGQRSQRQKWFQCFDGITSILFMVSSSEYDQVLMEDRRTNRLVESMNIFETIVNNKLFFNVSIILFLNKMDLLVEKVKTVSIKKHFPDFRGDPHRLEDVQRYLVQCFDRKRRNRSKPLFHHFTTAIDTENVRFVFHAVKDTILQENLKDIMLQ

SEQ ID NO: 48435 - protein, 233 aa, Homo sapiens
MIYPLIVLPLCASWHWGLIRKGIVLFWGESVKYFLDNLDRIGQLNYFPSKQDILLARKATKGIVEHDFVIKKIPFKMVDVGGQRSQRQKWFQCFDGITSILFMVSSSEYDQVLMEDRRTNRLVESMNIFETIVNNKLFFNVSIILFLNKMDLLVEKVKTVSIKKHFPDFRGDPHRLEDVQRYLVQCFDRKRRNRSKPLFHHFTTAIDTENVRFVFHAVKDTILQENLKDIMLQ

SEQ ID NO: 48436 - protein, 288 aa, Homo sapiens
MRIIHGREFDQKALLEFRDTIFDNILKGSRVLVDARDKLGIPWQYSENEKHGMFLMAFENKAGLPVEPATFQLYVPALSALWRDSGIREAFSRRSEFQLNYFPSKQDILLARKATKGIVEHDFVIKKIPFKMVDVGGQRSQRQKWFQCFDGITSILFMVSSSEYDQVLMEDRRTNRLVESMNIFETIVNNKLFFNVSIILFLNKMDLLVEKVKTVSIKKHFPDFRGDPHRLEDVQRYLVQCFDRKRRNRSKPLFHHFTTAIDTENVRFVFHAVKDTILQENLKDIMLQ

SEQ ID NO: 48437 - protein, 359 aa, Homo sapiens
MTLESMMACCLSDEVKESKRINAEIEKQLRRDKRDARRELKLLLLGTGESGKSTFIKQMRIIHGAGYSEEDKRGFTKLVYQNIFTAMQAMIRAMETLKILYKYEQNKANALLIREVDVEKVTTFEHQYVSAIKTLWEDPGIQECYDRRREYQLSDSAKYYLTDVDRIATLGYLPTQQDVLRVRVPTTGIIEYPFDLENIIFRMVDVGGQRSERRKWIHCFENVTSIMFLVALSEYDQVLVESDNENRMEESKALFRTIITYPWFQNSSVILFLNKKDLLEDKILYSHLVDYFPEFDGPQRDAQAAREFILKMFVDLNPDSDKIIYSHFTCATDTENIRFVFAAVKDTILQLNLKEYNLV

SEQ ID NO: 48438 - protein, 352 aa, Homo sapiens
MADFLPSRSVLSVCFPGCLLTSGEAEQQRKSKEIDKCLSREKTYVKRLVKILLLGAGESGKSTYSNVIKGMRVLVDAREKLHIPWGDNSNQQHGDKMMSFDTRAPMAAQGMVETRVFLQYLPAIRALWADSGIQNAYDRRREFQLGESVKYFLDNLDKLGEPDYIPSQQDILLARRPTKGIHEYDFEIKNVPFKMVDVGGQRSERKRWFECFDSVTSILFLVSSSEFDQVLMEDRLTNRLTESLNIFETIVNNRVFSNVSIILFLNKTDLLEEKVQIVSIKDYFLEFEGDPHCLRDVQKFLVECFRNKRRDQQQKPLYHHFTTAINTENIRLVFRDVKDTILHDNLKQLMLQ

SEQ ID NO: 48439 - protein, 377 aa, Homo sapiens
MADFLPSRSVLSVCFPGCLLTSGEAEQQRKSKEIDKCLSREKTYVKRLVKILLLGAGESGKSTFLKQMRIIHGQDFDQRAREEFRPTIYSNVIKGMRVLVDAREKLHIPWGDNSNQQHGDKMMSFDTRAPMAAQGMVETRVFLQYLPAIRALWADSGIQNAYDRRREFQLGESVKYFLDNLDKLGEPDYIPSQQDILLARRPTKGIHEYDFEIKNVPFKMVDVGGQRSERKRWFECFDSVTSILFLVSSSEFDQVLMEDRLTNRLTESLNIFETIVNNRVFSNVSIILFLNKTDLLEEKVQIVSIKDYFLEFEGDPHCLRDVQKFLVECFRNKRRDQQQKPLYHHFTTAINTENIRLVFRDVKDTILHDNLKQLMLQ

SEQ ID NO: 48440 - protein, 282 aa, Homo sapiens
MRVLVDAREKLHIPWGDNSNQQHGDKMMSFDTRAPMAAQGMVETRVFLQYLPAIRALWADSGIQNAYDRRREFQLGESVKYFLDNLDKLGEPDYIPSQQDILLARRPTKGIHEYDFEIKNVPFKMVDVGGQRSERKRWFECFDSVTSILFLVSSSEFDQVLMEDRLTNRLTESLNIFETIVNNRVFSNVSIILFLNKTDLLEEKVQIVSIKDYFLEFEGDPHCLRDVQKFLVECFRNKRRDQQQKPLYHHFTTAINTENIRLVFRDVKDTILHDNLKQLMLQ

SEQ ID NO: 48441 - protein, 355 aa, Homo sapiens
MAGCCCLSAEEKESQRISAEIERQLRRDKKDARRELKLLLLGTGESGKSTFIKQMRIIHGSGYSDEDRKGFTKLVYQNIFTAMQAMIRAMDTLRIQYVCEQNKENAQIIREVEVDKVSMLSREQVEAIKQLWQDPGIQECYDRRREYQLSDSAKYYLTDIDRIATPSFVPTQQDVLRVRVPTTGIIEYPFDLENIIFRMVDVGGQRSERRKWIHCFESVTSIIFLVALSEYDQVLAECDNENRMEESKALFKTIITYPWFLNSSVILFLNKKDLLEEKIMYSHLISYFPEYTGPKQDVRAARDFILKLYQDQNPDKEKVIYSHFTCATDTDNIRFVFAAVKDTILQLNLREFNLV

SEQ ID NO: 48442 - protein, 374 aa, Homo sapiens
MARSLTWRCCPWCLTEDEKAAARVDQEINRILLEQKKQDRGELKLLLLGPGESGKSTFIKQMRIIHGAGYSEEERKGFRPLVYQNIFVSMRAMIEAMERLQIPFSRPESKHHASLVMSQDPYKVTTFEKRYAAAMQWLWRDAGIRAYYERRREFHLLDSAVYYLSHLERITEEGYVPTAQDVLRSRMPTTGINEYCFSVQKTNLRIVDVGGQKSERKKWIHCFENVIALIYLASLSEYDQCLEENNQENRMKESLALFGTILELPWFKSTSVILFLNKTDILEEKIPTSHLATYFPSFQGPKQDAEAAKRFILDMYTRMYTGCVDGPEGSKKGARSRRLFSHYTCATDTQNIRKVFKDVRDSVLARYLDEINLL

SEQ ID NO: 48443 - protein, 354 aa, Homo sapiens
MGCTLSAEERAALERSKAIEKNLKEDGISAAKDVKLLLLGAGESGKSTIVKQMKIIHEDGFSGEDVKQYKPVVYSNTIQSLAAIVRAMDTLGIEYGDKERKADAKMVCDVVSRMEDTEPFSAELLSAMMRLWGDSGIQECFNRSREYQLNDSAKYYLDSLDRIGAADYQPTEQDILRTRVKTTGIVETHFTFKNLHFRLFDVGGQRSERKKWIHCFEDVTAIIFCVALSGYDQVLHEDETTNRMHESLMLFDSICNNKFFIDTSIILFLNKKDLFGEKIKKSPLTICFPEYTGPNTYEDAAAYIQAQFESKNRSPNKEIYCHMTCATDTNNIQVVFDAVTDIIIANNLRGCGLY

SEQ ID NO: 48444 - protein, 354 aa, Homo sapiens
MGCTLSAEERAALERSKAIEKNLKEDGISAAKDVKLLLLGAGESGKSTIVKQMKIIHEDGFSGEDVKQYKPVVYSNTIQSLAAIVRAMDTLGIEYGDKERKADAKMVCDVVSRMEDTEPFSAELLSAMMRLWGDSGIQECFNRSREYQLNDSAKYYLDSLDRIGAADYQPTEQDILRTRVKTTGIVETHFTFKNLHFRLFDVGGQRSERKKWIHCFEDVTAIIFCVALSGYDQVLHEDETTNRMHESLKLFDSICNNKWFTDTSIILFLNKKDIFEEKIKKSPLTICFPEYTGPSAFTEAVAYIQAQYESKNKSAHKEIYTHVTCATDTNNIQFVFDAVTDVIIAKNLRGCGLY

SEQ ID NO: 48445 - protein, 381 aa, Homo sapiens
MGCLGGNSKTTEDQGVDEKERREANKKIEKQLQKERLAYKATHRLLLLGAGESGKSTIVKQMRILHVNGFNPEEKKQKILDIRKNVKDAIVTIVSAMSTIIPPVPLANPENQFRSDYIKSIAPITDFEYSQEFFDHVKKLWDDEGVKACFERSNEYQLIDCAQYFLERIDSVSLVDYTPTDQDLLRCRVLTSGIFETRFQVDKVNFHMFDVGGQRDERRKWIQCFNDVTAIIYVAACSSYNMVIREDNNTNRLRESLDLFESIWNNRWLRTISIILFLNKQDMLAEKVLAGKSKIEDYFPEYANYTVPEDATPDAGEDPKVTRAKFFIRDLFLRISTATGDGKHYCYPHFTCAVDTENIRRVFNDCRDIIQRMHLKQYELL

SEQ ID NO: 48446 - protein, 458 aa, Homo sapiens
MGLCYSLRPLLFGGPGDDPCAASEPPVEDAQPAPAPALAPVRAAARDTARTLLPRGGEGSPACARPKADKPKEKRQRTEQLSAEEREAAKEREAVKEARKVSRGIDRMLRDQKRDLQQTHRLLLLGAGESGKSTIVKQMRILHVNGFNPEEKKQKILDIRKNVKDAIVTIVSAMSTIIPPVPLANPENQFRSDYIKSIAPITDFEYSQEFFDHVKKLWDDEGVKACFERSNEYQLIDCAQYFLERIDSVSLVDYTPTDQDLLRCRVLTSGIFETRFQVDKVNFHMFDVGGQRDERRKWIQCFNDVTAIIYVAACSSYNMVIREDNNTNRLRESLDLFESIWNNRWLRTISIILFLNKQDMLAEKVLAGKSKIEDYFPEYANYTVPEDATPDAGEDPKVTRAKFFIRDLFLRISTATGDGKHYCYPHFTCAVDTENIRRVFNDCRDIIQRMHLKQYELL

SEQ ID NO: 48447 - protein, 381 aa, Homo sapiens; identical to SEQ ID NO: 48445

SEQ ID NO: 48448 - protein, 381 aa, Homo sapiens; identical to SEQ ID NO: 48445

SEQ ID NO: 48449 - protein, 174 aa, Homo sapiens
MFDVGGQRDERRKWIQCFNDVTAIIYVAACSSYNMVIREDNNTNRLRESLDLFESIWNNRWLRTISIILFLNKQDMLAEKVLAGKSKIEDYFPEYANYTVPEDATPDAGEDPKVTRAKFFIRDLFLRISTATGDGKHYCYPHFTCAVDTENIRRVFNDCRDIIQRMHLKQYELL

SEQ ID NO: 48450 - protein, 320 aa, Homo sapiens
MRILHVNGFNPEEKKQKILDIRKNVKDAIVTIVSAMSTIIPPVPLANPENQFRSDYIKSIAPITDFEYSQEFFDHVKKLWDDEGVKACFERSNEYQLIDCAQYFLERIDSVSLVDYTPTDQDLLRCRVLTSGIFETRFQVDKVNFHMFDVGGQRDERRKWIQCFNDVTAIIYVAACSSYNMVIREDNNTNRLRESLDLFESIWNNRWLRTISIILFLNKQDMLAEKVLAGKSKIEDYFPEYANYTVPEDATPDAGEDPKVTRAKFFIRDLFLRISTATGDGKHYCYPHFTCAVDTENIRRVFNDCRDIIQRMHLKQYELL

SEQ ID NO: 48451 - protein, 354 aa, Homo sapiens
MGCTLSAEDKAAVERSKMIDRNLREDGEKAAREVKLLLLGAGESGKSTIVKQMKIIHEAGYSEEECKQYKAVVYSNTIQSIIAIIRAMGRLKIDFGDSARADDARQLFVLAGAAEEGFMTAELAGVIKRLWKDSGVQACFNRSREYQLNDSAAYYLNDLDRIAQPNYIPTQQDVLRTRVKTTGIVETHFTFKDLHFKMFDVGGQRSERKKWIHCFEGVTAIIFCVALSDYDLVLAEDEEMNRMHESMKLFDSICNNKWFTDTSIILFLNKKDLFEEKIKKSPLTICYPEYAGSNTYEEAAAYIQCQFEDLNKRKDTKEIYTHFTCATDTKNVQFVFDAVTDVIIKNNLKDCGLF

SEQ ID NO: 48452 - protein, 23 aa, Homo sapiens
MGCTLSAEDKAAVERSKMIDRNL

SEQ ID NO: 48453 - protein, 302 aa, Homo sapiens
MKIIHEAGYSEEECKQYKAVVYSNTIQSIIAIIRAMGRLKIDFGDSARADDARQLFVLAGAAEEGFMTAELAGVIKRLWKDSGVQACFNRSREYQLNDSAAYYLNDLDRIAQPNYIPTQQDVLRTRVKTTGIVETHFTFKDLHFKMFDVGGQRSERKKWIHCFEGVTAIIFCVALSDYDLVLAEDEEMNRMHESMKLFDSICNNKWFTDTSIILFLNKKDLFEEKIKKSPLTICYPEYAGSNTYEEAAAYIQCQFEDLNKRKDTKEIYTHFTCATDTKNVQFVFDAVTDVIIKNNLKDCGLF

SEQ ID NO: 48454 - protein, 339 aa, Homo sapiens
MEYAGHLPASSAQGTILACTSCTGAGESGKSTIVKQMKIIHEDGYSEEECRQYRAVVYSNTIQSIMAIVKAMGNLQIDFADPSRADDARQLFALSCTAEEQGVLPDDLSGVIRRLWADHGVQACFGRSREYQLNDSAAYYLNDLERIAQSDYIPTQQDVLRTRVKTTGIVETHFTFKDLHFKMFDVGGQRSERKKWIHCFEGVTAIIFCVALSAYDLVLAEDEEMNRMHESMKLFDSICNNKWFTDTSIILFLNKKDLFEEKITHSPLTICFPEYTGANKYDEAASYIQSKFEDLNKRKDTKEIYTHFTCATDTKNVQFVFDAVTDVIIKNNLKDCGLF

SEQ ID NO: 48455 - protein, 355 aa, Homo sapiens
MGCTVSAEDKAAAERSKMIDKNLREDGEKAAREVKLLLLGAGESGKSTIVKQMKIIHEDGYSEEECRQYRAVVYSNTIQSIMAIVKAMGNLQIDFADPSRADDARQLFALSCTAEEQGVLPDDLSGVIRRLWADHGVQACFGRSREYQLNDSAAYYLNDLERIAQSDYIPTQQDVLRTRVKTTGIVETHFTFKDLHFKMFDVGGQRSERKKWIHCFEGVTAIIFCVALSAYDLVLAEDEEMNRMHESMKLFDSICNNKWFTDTSIILFLNKKDLFEEKITHSPLTICFPEYTGANKYDEAASYIQSKFEDLNKRKDTKEIYTHFTCATDTKNVQFVFDAVTDVIIKNNLKDCGLF

SEQ ID NO: 48456 - protein, 339 aa, Homo sapiens
MTEGVKTLGWTKQKGGCHWGRSEGAGESGKSTIVKQMKIIHEDGYSEEECRQYRAVVYSNTIQSIMAIVKAMGNLQIDFADPSRADDARQLFALSCTAEEQGVLPDDLSGVIRRLWADHGVQACFGRSREYQLNDSAAYYLNDLERIAQSDYIPTQQDVLRTRVKTTGIVETHFTFKDLHFKMFDVGGQRSERKKWIHCFEGVTAIIFCVALSAYDLVLAEDEEMNRMHESMKLFDSICNNKWFTDTSIILFLNKKDLFEEKITHSPLTICFPEYTGANKYDEAASYIQSKFEDLNKRKDTKEIYTHFTCATDTKNVQFVFDAVTDVIIKNNLKDCGLF

SEQ ID NO: 48457 - protein, 303 aa, Homo sapiens
MKIIHEDGYSEEECRQYRAVVYSNTIQSIMAIVKAMGNLQIDFADPSRADDARQLFALSCTAEEQGVLPDDLSGVIRRLWADHGVQACFGRSREYQLNDSAAYYLNDLERIAQSDYIPTQQDVLRTRVKTTGIVETHFTFKDLHFKMFDVGGQRSERKKWIHCFEGVTAIIFCVALSAYDLVLAEDEEMNRMHESMKLFDSICNNKWFTDTSIILFLNKKDLFEEKITHSPLTICFPEYTGANKYDEAASYIQSKFEDLNKRKDTKEIYTHFTCATDTKNVQFVFDAVTDVIIKNNLKDCGLF

SEQ ID NO: 48458 - protein, 318 aa, Homo sapiens
MRGAGESGKSTIVKQMKIIHEDGYSEEECRQYRAVVYSNTIQSIMAIVKAMGNLQIDFADPSRADDARQLFALSCTAEEQGVLPDDLSGVIRRLWADHGVQACFGRSREYQLNDSAAYYLNDLERIAQSDYIPTQQDVLRTRVKTTGIVETHFTFKDLHFKMFDVGGQRSERKKWIHCFEGVTAIIFCVALSAYDLVLAEDEEMNRMHESMKLFDSICNNKWFTDTSIILFLNKKDLFEEKITHSPLTICFPEYTGANKYDEAASYIQSKFEDLNKRKDTKEIYTHFTCATDTKNVQFVFDAVTDVIIKNNLKDCGLF

SEQ ID NO: 48459 - protein, 274 aa, Homo sapiens
MAIVKAMGNLQIDFADPSRADDARQLFALSCTAEEQGVLPDDLSGVIRRLWADHGVQACFGRSREYQLNDSAAYYLNDLERIAQSDYIPTQQDVLRTRVKTTGIVETHFTFKDLHFKMFDVGGQRSERKKWIHCFEGVTAIIFCVALSAYDLVLAEDEEMNRMHESMKLFDSICNNKWFTDTSIILFLNKKDLFEEKITHSPLTICFPEYTGANKYDEAASYIQSKFEDLNKRKDTKEIYTHFTCATDTKNVQFVFDAVTDVIIKNNLKDCGLF

SEQ ID NO: 48460 - protein, 361 aa, Homo sapiens
MGCTVSAEDKAAAERSKMIDKNLREDGEKAAREVKLLLLGAGESGKSTIVKQMKIIHEDGYSEEECRQYRAVVYSNTIQSIMAIVKAMGNLQIDFADPSRADDARQLFALSCTAEEQGVLPDDLSGVIRRLWADHGVQACFGRSREYQLNDSAAYYLNDLERIAQSDYIPTQQDVLRTRVKTTGIVETHFTFKDLHFKMFDVGGQRSERKKWIHCFEGVTAIIFCVALSAYDLVLAEDEEMNRMHESMKLFDSICNNKWFTDTSIILFLNKKDLFEEKITHSPLTICFPEYTGANKYDEAASYIQSKFEDLNKRKDTKEIYTHFTCATDTKSRKLFRENYLKLSDPDQQPPPAPLPSDSVP

SEQ ID NO: 48461 - protein, 354 aa, Homo sapiens
MGCTLSAEDKAAVERSKMIDRNLREDGEKAAKEVKLLLLGAGESGKSTIVKQMKIIHEDGYSEDECKQYKVVVYSNTIQSIIAIIRAMGRLKIDFGEAARADDARQLFVLAGSAEEGVMTPELAGVIKRLWRDGGVQACFSRSREYQLNDSASYYLNDLDRISQSNYIPTQQDVLRTRVKTTGIVETHFTFKDLYFKMFDVGGQRSERKKWIHCFEGVTAIIFCVALSDYDLVLAEDEEMNRMHESMKLFDSICNNKWFTETSIILFLNKKDLFEEKIKRSPLTICYPEYTGSNTYEEAAAYIQCQFEDLNRRKDTKEIYTHFTCATDTKNVQFVFDAVTDVIIKNNLKECGLY

SEQ ID NO: 48462 - protein, 350 aa, Homo sapiens
MGAGASAEEKHSRELEKKLKEDAEKDARTVKLLLLGAGESGKSTIVKQMKIIHQDGYSLEECLEFIAIIYGNTLQSILAIVRAMTTLNIQYGDSARQDDARKLMHMADTIEEGTMPKEMSDIIQRLWKDSGIQACFERASEYQLNDSAGYYLSDLERLVTPGYVPTEQDVLRSRVKTTGIIETQFSFKDLNFRMFDVGGQRSERKKWIHCFEGVTCIIFIAALSAYDMVLVEDDEVNRMHESLHLFNSICNHRYFATTSIVLFLNKKDVFFEKIKKAHLSICFPDYDGPNTYEDAGNYIKVQFLELNMRRDVKEIYSHMTCATDTQNVKFVFDAVTDIIIKENLKDCGLF

SEQ ID NO: 48463 - protein, 350 aa, Homo sapiens; identical to SEQ ID NO: 48462

SEQ ID NO: 48464 - protein, 354 aa, Homo sapiens
MGSGASAEDKELAKRSKELEKKLQEDADKEAKTVKLLLLGAGESGKSTIVKQMKIIHQDGYSPEECLEFKAIIYGNVLQSILAIIRAMTTLGIDYAEPSCADDGRQLNNLADSIEEGTMPPELVEVIRRLWKDGGVQACFERAAEYQLNDSASYYLNQLERITDPEYLPSEQDVLRSRVKTTGIIETKFSVKDLNFRMFDVGGQRSERKKWIHCFEGVTCIIFCAALSAYDMVLVEDDEVNRMHESLHLFNSICNHKFFAATSIVLFLNKKDLFEEKIKKVHLSICFPEYDGNNSYDDAGNYIKSQFLDLNMRKDVKEIYSHMTCATDTQNVKFVFDAVTDIIIKENLKDCGLF

SEQ ID NO: 48465 - protein, 355 aa, Homo sapiens
MGCRQSSEEKEAARRSRRIDRHLRSESQRQRREIKLLLLGTSNSGKSTIVKQMKIIHSGGFNLEACKEYKPLIIYNAIDSLTRIIRALAALRIDFHNPDRAYDAVQLFALTGPAESKGEITPELLGVMRRLWADPGAQACFSRSSEYHLEDNAAYYLNDLERIAAADYIPTVEDILRSRDMTTGIVENKFTFKELTFKMVDVGGQRSERKKWIHCFEGVTAIIFCVELSGYDLKLYEDNQTSRMAESLRLFDSICNNNWFINTSLILFLNKKDLLAEKIRRIPLTICFPEYKGQNTYEEAAVYIQRQFEDLNRNKETKEIYSHFTCATDTSNIQFVFDAVTDVIIQNNLKYIGLC

SEQ ID NO: 48466 - protein, 303 aa, Homo sapiens [sequence omitted]

SEQ ID NO: 48467 - protein, 395 aa, Homo sapiens
MCDQTFLVNVFGSCDKCFKQRALRPVFKKSQQLSYCSTCAEIMATEGLHENETLASLKSEAESLKGKLEEERAKLHDVELHQVAERVEALGQFVMKTRRTLKGHGNKVLCMDWCKDKRRIVSSSQDGKVIVWDSFTTNKEHAVTMPCTWVMACAYAPSGCAIACGGLDNKCSVYPLTFDKNENMAAKKKSVAMHTNYLSACSFTNSDMQILTASGDGTCALWDVESGQLLQSFHGHGADVLCLDLAPSETGNTFVSGGCDKKAMVWDMRSGQCVQAFETHESDINSVRYYPSGDAFASGSDDATCRLYDLRADREVAIYSKESIIFGASSVDFSLSGRLLFAGYNDYTINVWDVLKGSRVSILFGHENRVSTLRVSPDGTAFCSGSWDHTLRVWA

SEQ ID NO: 48468 - protein, 353 aa, Homo sapiens
MATEGLHENETLASLKSEAESLKGKLEEERAKLHDVELHQVAERVEALGQFVMKTRRTLKGHGNKVLCMDWCKDKRRIVSSSQDGKVIVWDSFTTNKEHAVTMPCTWVMACAYAPSGCAIACGGLDNKCSVYPLTFDKNENMAAKKKSVAMHTNYLSACSFTNSDMQILTASGDGTCALWDVESGQLLQSFHGHGADVLCLDLAPSETGNTFVSGGCDKKAMVWDMRSGQCVQAFETHESDINSVRYYPSGDAFASGSDDATCRLYDLRADREVAIYSKESIIFGASSVDFSLSGRLLFAGYNDYTINVWDVLKGSRVSILFGHENRVSTLRVSPDGTAFCSGSWDHTLRVWA

SEQ ID NO: 48469 - protein, 283 aa, Homo sapiens
MATEGLHENETLASLKSEAESLKGKLEEERAKLHDVELHQVAERVEALGQFVMKTRRTLKGHGNKVLCMDWCKDKRRIVSSSQDGKVIVWDSFTTNKILTASGDGTCALWDVESGQLLQSFHGHGADVLCLDLAPSETGNTFVSGGCDKKAMVWDMRSGQCVQAFETHESDINSVRYYPSGDAFASGSDDATCRLYDLRADREVAIYSKESIIFGASSVDFSLSGRLLFAGYNDYTINVWDVLKGSRVSILFGHENRVSTLRVSPDGTAFCSGSWDHTLRVWA

SEQ ID NO: 48470 - protein, 193 aa, Homo sapiens
MSKLLILILTASGDGTCALWDVESGQLLQSFHGHGADVLCLDLAPSETGNTFVSGGCDKKAMVWDMRSGQCVQAFETHESDINSVRYYPSGDAFASGSDDATCRLYDLRADREVAIYSKESIIFGASSVDFSLSGRLLFAGYNDYTINVWDVLKGSRVSILFGHENRVSTLRVSPDGTAFCSGSWDHTLRVWA

SEQ ID NO: 48471 - protein, 340 aa, Homo sapiens [sequence omitted]

SEQ ID NO: 48472 - protein, 340 aa, Homo sapiens [sequence omitted]

SEQ ID NO: 48473 - protein, 198 aa, Homo sapiens
  VARIANT 1: note = MOD_RES - Any amino acid
XGYLSCCRFLDDNQIVTSSGDTTCALWDIETGQQTTTFTGHTGDVMSLSLAPDTRLFVSGACDASAKLWDVREGMCRQTFTGHESDINAICFFPNGNAFATGSDDATCRLFDLRADQELMTYSHDNIICGITSVSFSKSGRLLLAGYDDFNCNVWDALKADRAGVLAGHDNRVSCLGVTDDGMAVATGSWDSFLKIWN

SEQ ID NO: 48474 - protein, 147 aa, Homo sapiens
MSELDQLRQEAEQLKNQIRDARKACADATLSQITNNIDPVGRIQMRTRRTLRGHLAKIYAMHWGTDSRLLVSASQDGKLIIWDSYTTNKVHAIPLRSSWVMTCAYAPSGNYVACGGLDNICSIYNLKTREGNVRVSRELAGHTGTCP

SEQ ID NO: 48475 - protein, 108 aa, Homo sapiens
MSELDQLRQEAEQLKNQIRDARKACADATLSQITNNIDPVGRIQMRTRRTLRGHLAKIYAMHWGTDSRLLVSASQDGKLIIWDSYTTNKVHAIPLRSSWVMTCAYAPS

SEQ ID NO: 48476 - protein, 134 aa, Homo sapiens
MSELDQLRQEAEQLKNQIRITNNIDPVGRIQMRTRRTLRGHLAKIYAMHWGTDSRLLVSASQDGKLIIWDSYTTNKVHAIPLRSSWVMTCAYAPSGNYVACGGLDNICSIYNLKTREGNVRVSRELAGHTGTCP

SEQ ID NO: 48477 - protein, 240 aa, Homo sapiens
MTCAYAPSGNYVACGGLDNICSIYNLKTREGNVRVSRELAGHTGYLSCCRFLDDNQIVTSSGDTTCALWDIETGQQTTTFTGHTGDVMSLSLAPDTRLFVSGACDASAKLWDVREGMCRQTFTGHESDINAICFFPNGNAFATGSDDATCRLFDLRADQELMTYSHDNIICGITSVSFSKSGRLLLAGYDDFNCNVWDALKADRAGVLAGHDNRVSCLGVTDDGMAVATGSWDSFLKIWN

SEQ ID NO: 48478 - protein, 327 aa, Homo sapiens
MTAPCPPPPPDPQFVLRGTQSPVHALHFCEGAQAQGRPLLFSGSQSGLVHIWSLQTRRAVTTLDGHGGQCVTWLQTLPQGRQLLSQGRDLKLCLWDLAEGRSAVVDSVCLESVGFCRSSILAGGQPRWTLAVPGRGSDEVQILEMPSKTSVCALKPKADAKLGMPMCLRLWQADCSSRPLLLAGYEDGSVVLWDVSEQKVCSRIACHEEPVMDLDFDSQKARGISGSAGKALAVWSLDWQQALQVRGTHELTNPGIAEVTIRPDRKILATAGWDHRIRVFHWRTMQPLAVLAFHSAAVQCVAFTADGLLAAGSKDQRISLWSLYPRA

SEQ ID NO: 48479 - protein, 327 aa, Homo sapiens; identical to SEQ ID NO: 48478

SEQ ID NO: 48480 - protein, 212 aa, Homo sapiens
MTAPCPPPPPDPQFVLRGTQSPVHALHFCEGAQAQGRPLLFSGSQSGLVHIWSLQTRRAVTTLDGHGGQCVTWLQTLPQGRQLLSQGRDLKLCLWDLAEGRSAVVDSVCLESVGFCRSSILAGGQPRWTLAVPGRGSDEVQILEMPSKTSVCALKPKADAKLGMPMCLRLWQADCSSRPLLLAGYEDGSVVLWDVSEQKVCSRIACHEEPGL

SEQ ID NO: 48481 - protein, 340 aa, Homo sapiens
MSELEQLRQEAEQLRNQIRDARKACGDSTLTQITAGLDPVGRIQMRTRRTLRGHLAKIYAMHWGTDSRLLVSASQDGKLIIWDSYTTNKVHAIPLRSSWVMTCAYAPSGNFVACGGLDNICSIYSLKTREGNVRVSRELPGHTGYLSCCRFLDDNQIITSSGDTTCALWDIETGQQTVGFAGHSGDVMSLSLAPDGRTFVSGACDASIKLWDVRDSMCRQTFIGHESDINAVAFFPNGYAFTTGSDDATCRLFDLRADQELLMYSHDNIICGITSVAFSRSGRLLLAGYDDFNCNIWDAMKGDRAGVLAGHDNRVSCLGVTDDGMAVATGSWDSFLKIWN

SEQ ID NO: 48482 - protein, 340 aa, Homo sapiens; identical to SEQ ID NO: 48481

SEQ ID NO: 48483 - protein, 340 aa, Homo sapiens; identical to SEQ ID NO: 48481

SEQ ID NO: 48484 - protein, 152 aa, Homo sapiens
MSELEQLRQEAEQLRNQIRDARKACGDSTLTQITAGLDPVGRIQMRTRRTLRGHLAKIYAMHWGTDSRLLVSASQDGKLIIWDSYTTNKVHAIPLRSSWVMTCAYAPSGNFVACGGLDNICSIYSLKTREGNVRVSRELPGHTGYLSCCRFL

SEQ ID NO: 48485 - protein, 240 aa, Homo sapiens
MTCAYAPSGNFVACGGLDNICSIYSLKTREGNVRVSRELPGHTGYLSCCRFLDDNQIITSSGDTTCALWDIETGQQTVGFAGHSGDVMSLSLAPDGRTFVSGACDASIKLWDVRDSMCRQTFIGHESDINAVAFFPNGYAFTTGSDDATCRLFDLRADQELLMYSHDNIICGITSVAFSRSGRLLLAGYDDFNCNIWDAMKGDRAGVLAGHDNRVSCLGVTDDGMAVATGSWDSFLKIWN

SEQ ID NO: 48486 - protein, 296 aa, Homo sapiens
MRTRRTLRGHLAKIYAMHWGTDSRLLVSASQDGKLIIWDSYTTNKVHAIPLRSSWVMTCAYAPSGNFVACGGLDNICSIYSLKTREGNVRVSRELPGHTGYLSCCRFLDDNQIITSSGDTTCALWDIETGQQTVGFAGHSGDVMSLSLAPDGRTFVSGACDASIKLWDVRDSMCRQTFIGHESDINAVAFFPNGYAFTTGSDDATCRLFDLRADQELLMYSHDNIICGITSVAFSRSGRLLLAGYDDFNCNIWDAMKGDRAGVLAGHDNRVSCLGVTDDGMAVATGSWDSFLKIWN

SEQ ID NO: 48487 - protein, 240 aa, Homo sapiens; identical to SEQ ID NO: 48485

SEQ ID NO: 48488 - protein, 232 aa, Homo sapiens
MSELEQLRQEAEQLRNQIRDARKACGDSTLTQITAGLDPVGRIQMRTRRTLRGHLAKIYAMHWGTDSRLLVSASQDGKLIIWDSYTTNKVHAIPLRSSWVMTCAYAPSGNFVACGGLDNICSIYSLKTREGNVRVSRELPGHTGYLSCCRFLDDNQIITSSGDTTCALWDIETGQQTVGFAGHSGDVMSLSLAPDGRTFVSGACDASIKLWDVRDSMCRQTFIGHESDINAV

SEQ ID NO: 48489 - protein, 296 aa, Homo sapiens; identical to SEQ ID NO: 48486

SEQ ID NO: 48490 - protein, 251 aa, Homo sapiens
MSELEQLRQEAEQLRNQIRDARKACGDSTLTQITAGLDPVGRIQMRTRRTLRGHLAKIYAMHWGTDSRLLVSASQDGKLIIWDSYTTNKVHAIPLRSSWVMTCAYAPSGNFVACGGLDNICSIYSLKTREGNVRVSRELPGHTGYLSCCRFLDDNQIITSSGDTTCALWDIETGQQTVGFAGHSGDVMSLSLAPDGRTFVSGACDASIKLWDVRDSMCRQTFIGHESDINAVAFFPNGYAFTTGSDDATCR

SEQ ID NO: 48491 - protein, 340 aa, Homo sapiens [sequence omitted]

SEQ ID NO: 48492 - protein, 340 aa, Homo sapiens
MSELEQLRQEAEQLRNQIQDARKACNDATLVQITSNMDSVGRIQMRTRRTLRGHLAKIYAMHWGYDSRLLVSASQDGKLIIWDSYTTNKMHAIPLRSSWVMTCAYAPSGNYVACGGLDNICSIYNLKTREGNVRVSRELPGHTGYLSCCRFLDDSQIVTSSGDTTCALWDIETAQQTTTFTGHSGDVMSLSLSPDMRTFVSGACDASSKLWDIRDGMCRQSFTGHVSDINAVSFFPNGYAFATGSDDATCRLFDLRADQELLLYSHDNIICGITSVAFSKSGRLLLAGYDDFNCNVWDTLKGDRAGVLAGHDNRVSCLGVTDDGMAVATGSWDSFLRIWN

SEQ ID NO: 48493 - protein, 340 aa, Homo sapiens; identical to SEQ ID NO: 48492

SEQ ID NO: 48494 - protein, 79 aa, Homo sapiens
MSELEQLRQEAEQLRNQIQDARKACNDATLVQITSNMDSVGRIQMRTRRTLRGHLAKIYAMHWGYDSRLLVSASQDGKL

SEQ ID NO: 48495 - protein, 67 aa, Homo sapiens
MEEWDVPQMKKEVESLKYQLAFQREMASKTIPELLKWIEDGIPKDPFLNPDLMKNNPWVEKGKCTIL

SEQ ID NO: 48496 - protein, 71 aa, Homo sapiens
MASNNTASIAQARKLVEQLKMEANIDRIKVSKAAADLMAYCEAHAKEDPLLTPVPASENPFREKKFFCAIL

SEQ ID NO: 48497 - protein, 102 aa, Homo sapiens
MQGKLQPPMEREARDGVPSGKVFLKDLSSTPMASNNTASIAQARKLVEQLKMEANIDRIKVSKAAADLMAYCEAHAKEDPLLTPVPASENPFREKKFFCAIL

SEQ ID NO: 48498 - protein, 71 aa, Homo sapiens; identical to SEQ ID NO: 48496

SEQ ID NO: 48499 - protein, 71 aa, Homo sapiens; identical to SEQ ID NO: 48496

SEQ ID NO: 48500 - protein, 71 aa, Homo sapiens; identical to SEQ ID NO: 48496

SEQ ID NO: 48501 - protein, 71 aa, Homo sapiens; identical to SEQ ID NO: 48496

SEQ ID NO: 48502 - protein, 110 aa, Homo sapiens
MVYLQAKTRIPEHRKVTQLIKCWSPDLNPVFLKDLSSTPMASNNTASIAQARKLVEQLKMEANIDRIKVSKAAADLMAYCEAHAKEDPLLTPVPASENPFREKKFFCAIL

SEQ ID NO: 48503 - protein, 68 aa, Homo sapiens
MSGSSSVAAMKKVVQQLRLEAGLNRVKVSQAAADLKQFCLQNAQHDPLLTGVSSSTNPFRPQKVCSFL

SEQ ID NO: 48504 - protein, 68 aa, Homo sapiens; identical to SEQ ID NO: 48503

SEQ ID NO: 48505 - protein, 74 aa, Homo sapiens
MPVINIEDLTEKDKLKMEVDQLKKEVTLERMLVSKCCEEVRDYVEERSGEDPLVKGIPEDKNPFKELKGGCVIS

SEQ ID NO: 48506 - protein, 74 aa, Homo sapiens; identical to SEQ ID NO: 48505

SEQ ID NO: 48507 - protein, 69 aa, Homo sapiens
MAQDLSEKDLLKMEVEQLKKEVKNTRIPISKAGKEIKEYVEAQAGNDPFLKGIPEDKNPFKEKGGCLIS

SEQ ID NO: 48508 - protein, 69 aa, Homo sapiens; identical to SEQ ID NO: 48507

SEQ ID NO: 48509 - protein, 69 aa, Homo sapiens; identical to SEQ ID NO: 48507

SEQ ID NO: 48510 - protein, 69 aa, Homo sapiens; identical to SEQ ID NO: 48507

SEQ ID NO: 48511 - protein, 69 aa, Homo sapiens; identical to SEQ ID NO: 48507

SEQ ID NO: 48512 - protein, 359 aa, Homo sapiens
MTLESIMACCLSEEAKEARRINDEIERQLRRDKRDARRELKLLLLGTGESGKSTFIKQMRIIHGSGYSDEDKRGFTKLVYQNIFTAMQAMIRAMDTLKIPYKYEHNKAHAQLVREVDVEKVSAFENPYVDAIKSLWNDPGIQECYDRRREYQLSDSTKYYLNDLDRVADPAYLPTQQDVLRVRVPTTGIIEYPFDLQSVIFRMVDVGGQRSERRKWIHCFENVTSIMFLVALSEYDQVLVESDNENRMEESKALFRTIITYPWFQNSSVILFLNKKDLLEEKIMYSHLVDYFPEYDGPQRDAQAAREFILKMFVDLNPDSDKIIYSHFTCATDTENIRFVFAAVKDTILQLNLKEYNLV

SEQ ID NO: 48513 - protein, 157 aa, Homo sapiens
MVDVGGQRSERRKWIHCFENVTSIMFLVALSEYDQVLVESDNENRMEESKALFRTIITYPWFQNSSVILFLNKKDLLEEKIMYSHLVDYFPEYDGPQRDAQAAREFILKMFVDLNPDSDKIIYSHFTCATDTENIRFVFAAVKDTILQLNLKEYNLV

SEQ ID NO: 48514 - protein, 170 aa, Homo sapiens
MGERWADSQLDSRSTHGTGESGKSTFIKQMRIIHGSGYSDEDKRGFTKLVYQNIFTAMQAMIRAMDTLKIPYKYEHNKAHAQLVREVDVEKVSAFENPYVDAIKSLWNDPGIQECYDRRREYQLSDSTKYYLNDLDRVADPAYLPTQQDVLRVRVPTTGIIEYPFDLQSV

SEQ ID NO: 48515 - protein, 607 aa, Homo sapiens
MPRKKPFSVKQKKKQLQDKRERKRGLQDGLRSSSNSRSGSRERREEQTDTSDGESVTHHIRRLNQQPSQGLGPRGYDPNRYRLHFERDSREEVERRKRAAREQVLQPVSAELLELDIREVYQPGSVLDFPRRPPWSYEMSKEQLMSQEERSFQDYLGKIHGAYSSEKLSYFEHNLETWRQLWRVLEMSDIVLLITDIRHPVVNFPPALYEYVTGELGLALVLVLNKVDLAPPALVVAWKHYFHQHYPQLHVVLFTSFPRDPRTPQDPSSVLKKSRRRGRGWTRALGPEQLLRACEAITVGKVDLSSWREKIARDVAGATWGNGSGEEEEEEDGPAVLVEQQTDSAMEPTGPTQERYKDGVVTIGCVGFPNVGKSSLINGLVGRKVVSVSRTPGHTRYFQTYFLTPSVKLCDCPGLIFPSLLPRQLQVLAGIYPIAQIQEPYTAVGYLASRIPVQALLHLRHPEAEDPSAEHPWCAWDICEAWAEKRGYKTAKAARNDVYRAANSLLRLAVDGRLSLCFHPPGYSEQKGTWESHPETTELVVLQGRVGPAGDEEEEEEEELSSSCEEEGEEDRDADEEGEGDEETPTSAPGSSLAGRNPYALLGEDEC

SEQ ID NO: 48516 - protein, 407 aa, Homo sapiens
VVNFPPALYEYVTGELGLALVLVLNKVDLAPPALVVAWKHYFHQHYPQLHVVLFTSFPRDPRTPQDPSSVLKKSRRRGRGWTRALGPEQLLRACEAITVGKVDLSSWREKIARDVAGATWGNGSGEEEEEEDGPAVLVEQQTDSAMEPTGPTQERYKDGVVTIGCVGFPNVGKSSLINGLVGRKVVSVSRTPGHTRYFQTYFLTPSVKLCDCPGLIFPSLLPRQLQVLAGIYPIAQIQEPYTAVGYLASRIPVQALLHLRHPEAEDPSAEHPWCAWDICEAWAEKRGYKTAKAARNDVYRAANSLLRLAVDGRLSLCFHPPGYSEQKGTWESHPETTELVVLQGRVGPAGDEEEEEEEELSSSCEEEGEEDRDADEEGEGDEETPTSAPGSSLAGRNPYALLGEDEC

SEQ ID NO: 48517 - protein, 607 aa, Homo sapiens; identical to SEQ ID NO: 48515

SEQ ID NO: 48518 - protein, 264 aa, Homo sapiens
MGERVLWPLRAGQHWRHRPLPAGLQDGLRSSSNSRSGSRERREEQTDTSDGESVTHHIRRLNQQPSQGLGPRGYDPNRYRLHFERDSREEVERRKRAAREQVLQPVSAELLELDIREVYQPGSVLDFPRRPPWSYEMSKEQLMSQEERSFQDYLGKIHGAYSSEKLSYFEHNLETWRQLWRVLEMSDIVLLITDIRHPVVNFPPALYEYVTGELGLALVLVLNKVDLAPPALVVAWKHYFHQHYPQLHVVLFTSFPRDPRTPQD

SEQ ID NO: 48519 - protein, 607 aa, Homo sapiens; identical to SEQ ID NO: 48515

SEQ ID NO: 48520 - protein, 429 aa, Homo sapiens
MEAAVVLEMSDIVLLITDIRHPVVNFPPALYEYVTGELGLALVLVLNKVDLAPPALVVAWKHYFHQHYPQLHVVLFTSFPRDPRTPQDPSSVLKKSRRRGRGWTRALGPEQLLRACEAITVGKVDLSSWREKIARDVAGATWGNGSGEEEEEEDGPAVLVEQQTDSAMEPTGPTQERYKDGVVTIGCVGFPNVGKSSLINGLVGRKVVSVSRTPGHTRYFQTYFLTPSVKLCDCPGLIFPSLLPRQLQVLAGIYPIAQIQEPYTAVGYLASRIPVQALLHLRHPEAEDPSAEHPWCAWDICEAWAEKRGYKTAKAARNDVYRAANSLLRLAVDGRLSLCFHPPGYSEQKGTWESHPETTELVVLQGRVGPAGDEEEEEEEELSSSCEEEGEEDRDADEEGEGDEETPTSAPGSSLAGRNPYALLGEDEC

SEQ ID NO: 48521 - protein, 607 aa, Homo sapiens; identical to SEQ ID NO: 48515

SEQ ID NO: 48522 - protein, 404 aa, Homo sapiens
MSKEQLMSQEERSFQDYLGKIHGAYSSEKLSYFEHNLETWRQLWRVLEMSDIVLLITDIRHPVVNFPPALYEYVTGELGLALVLVLNKVDLAPPALVVAWKHYFHQHYPQLHVVLFTSFPRDPRTPQDPSSVLKKSRRRGRGWTRALGPEQLLRACEAITVGKGFPNVGKSSLINGLVGRKVVSVSRTPGHTRYFQTYFLTPSVKLCDCPGLIFPSLLPRQLQVLAGIYPIAQIQEPYTAVGYLASRIPVQALLHLRHPEAEDPSAEHPWCAWDICEAWAEKRGYKTAKAARNDVYRAANSLLRLAVDGRLSLCFHPPGYSEQKGTWESHPETTELVVLQGRVGPAGDEEEEEEEELSSSCEEEGEEDRDADEEGEGDEETPTSAPGSSLAGRNPYALLGEDEC

SEQ ID NO: 48523 - protein, 264 aa, Homo sapiens; identical to SEQ ID NO: 48518

SEQ ID NO: 48524 - protein, 264 aa, Homo sapiens; identical to SEQ ID NO: 48518

SEQ ID NO: 48525 - protein, 264 aa, Homo sapiens; identical to SEQ ID NO: 48518

SEQ ID NO: 48526 - protein, 607 aa, Homo sapiens; identical to SEQ ID NO: 48515

SEQ ID NO: 48527 - protein, 607 aa, Homo sapiens; identical to SEQ ID NO: 48515

SEQ ID NO: 48528 - protein, 264 aa, Homo sapiens; identical to SEQ ID NO: 48518

SEQ ID NO: 48529 - protein, 264 aa, Homo sapiens; identical to SEQ ID NO: 48518

SEQ ID NO: 48530 - protein, 607 aa, Homo sapiens; identical to SEQ ID NO: 48515

SEQ ID NO: 48531 - protein, 66 aa, Homo sapiens
VVNFPPALYEYVTGELGLALVLVLNKVDLAPPALVVAWKHYFHQHYPQLHVVLFTSFPRDPRTPQD

SEQ ID NO: 48532 - protein, 264 aa, Homo sapiens; identical to SEQ ID NO: 48518

SEQ ID NO: 48533 - protein, 404 aa, Homo sapiens; identical to SEQ ID NO: 48522

SEQ ID NO: 48534 - protein, 262 aa, Homo sapiens
MEPTGPTQERYKDGVVTIGCVGFPNVGKSSLINGLVGRKVVSVSRTPGHTRYFQTYFLTPSVKLCDCPGLIFPSLLPRQLQVLAGIYPIAQIQEPYTAVGYLASRIPVQALLHLRHPEAEDPSAEHPWCAWDICEAWAEKRGYKTAKAARNDVYRAANSLLRLAVDGRLSLCFHPPGYSEQKGTWESHPETTELVVLQGRVGPAGDEEEEEEEELSSSCEEEGEEDRDADEEGEGDEETPTSAPGSSLAGRNPYALLGEDEC

SEQ ID NO: 48535 - protein, 262 aa, Homo sapiens; identical to SEQ ID NO: 48534

SEQ ID NO: 48536 - protein, 429 aa, Homo sapiens; identical to SEQ ID NO: 48520

SEQ ID NO: 48537 - protein, 404 aa, Homo sapiens; identical to SEQ ID NO: 48522

SEQ ID NO: 48538 - protein, 404 aa, Homo sapiens; identical to SEQ ID NO: 48522

SEQ ID NO: 48539 - protein, 262 aa, Homo sapiens; identical to SEQ ID NO: 48534

SEQ ID NO: 48540 - protein, 429 aa, Homo sapiens; identical to SEQ ID NO: 48520

SEQ ID NO: 48541 - protein, 429 aa, Homo sapiens; identical to SEQ ID NO: 48520

SEQ ID NO: 48542 - protein, 262 aa, Homo sapiens; identical to SEQ ID NO: 48534

SEQ ID NO: 48543 - protein, 404 aa, Homo sapiens; identical to SEQ ID NO: 48522

SEQ ID NO: 48544 - protein, 429 aa, Homo sapiens; identical to SEQ ID NO: 48520

SEQ ID NO: 48545 - protein, 429 aa, Homo sapiens; identical to SEQ ID NO: 48520

SEQ ID NO: 48546 - protein, 262 aa, Homo sapiens; identical to SEQ ID NO: 48534

SEQ ID NO: 48547 - protein, 429 aa, Homo sapiens; identical to SEQ ID NO: 48520

SEQ ID NO: 48548 - protein, 404 aa, Homo sapiens; identical to SEQ ID NO: 48522

SEQ ID NO: 48549 - protein, 404 aa, Homo sapiens; identical to SEQ ID NO: 48522

SEQ ID NO: 48550 - protein, 262 aa, Homo sapiens; identical to SEQ ID NO: 48534

SEQ ID NO: 48551 - protein, 731 aa, Homo sapiens
MVKPKYKGRSTINPSKASTNPDRVQGAGGQNMRDRATIRRLNMYRQKERRNSRGKIIKPLQYQSTVASGTVARVEPNIKWFGNTRVIKQSSLQKFQEEMDTVMKDPYKVVMKQSKLPMSLLHDRIRPHNLKVHILDTESFETTFGPKSQRKRPNLFASDMQSLIENAEMSTESYDQGKDRDLVTEDTGVRNEAQEEIYKKGQSKRIWGELYKVIDSSDVVVQVLDARDPMGTRSPHIETYLKKEKPWKHLIFVLNKCDLVPTWATKRWVAVLSQDYPTLAFHASLTNPFGKGAFIQLLRQFGKLHTDKKQISVGFIGYPNVGKSSVINTLRSKKVCNVAPIAGETKVWQYITLMRRIFLIDCPGVVYPSEDSETDIVLKGVVQVEKIKSPEDHIGAVLERAKPEYISKTYKIDSWENAEDFLEKLAFRTGKLLKGGEPDLQTVGKMVLNDWQRGRIPFFVKPPNAEPLVAPQLLPSSSLEVVPEAAQNNPGEEVTETAGEGSESIIKEETEENSHCDANTEMQQILTRVRQNFGKINVVPQFSGDDLVPVEVSDLEEELESFSDEEEEEQEQQRDDAEESSSEPEEENVGNDTKAVIKALDEKIAKYQKFLDKAKAKKFSAVRISKGLSEKIFAKPEEQRKTLEEDVDDRAPSKKGKKRKAQREEEQEHSNKAPRALTSKERRRAVRQQRPKKVGVRYYETHNVKNRNRNKKKTNDSEGQKHKRKKFRQKQ

SEQ ID NO: 48552 - protein, 192 aa, Homo sapiens [sequence omitted]

SEQ ID NO: 48553 - protein, 537 aa, Homo sapiens
MTCHKRYKIQKKVREHHRKLRKEAKKRGHKKPRKDPGVPNSAPFKEALLREAELRKQRLEELKQQQKLDRQKELEKKRKLETNPDIKPSNVEPMEKEFGLCKTENKAKSGKQNSKKLYCQELKKVIEASDVVLEVLDARDPLGCRCPQVEEAIVQSGQKKLVLILNKSDLVPKENLESWLNYLKKELPTVVFRASTKPKDKGKITKRVKAKKNAAPFRSEVCFGKEGLWKLLGGFQETCSKAIRVGVIGFPNVGKSSIINSLKQEQMCNVGVSMGLTRSMQVVPLDKQITIIDSPSFIVSPLNSSSALALRSPASIEVVKPMEAASAILSQADARQVVLKYTVPGYRNSLEFFTVLAQRRGMHQKGGIPNVEGAAKLLWSEWTGASLAYYCHPPTSWTPPPYFNESIVVDMKSGFNLEELEKNNAQSIRAIKGPHLANSILFQSSGLTNGIIEEKDIHEELPKRKERKQEEREDDKDSDQETVDEEVDENSSGMFAAEETGEALSEETTAGEQSTRSFILDKIIEEDDAYDFSTDYV

SEQ ID NO: 48554 - protein, 549 aa, Homo sapiens
MKRPKLKKASKRMTCHKRYKIQKKVREHHRKLRKEAKKRGHKKPRKDPGVPNSAPFKEALLREAELRKQRLEELKQQQKLDRQKELEKKRKLETNPDIKPSNVEPMEKEFGLCKTENKAKSGKQNSKKLYCQELKKVIEASDVVLEVLDARDPLGCRCPQVEEAIVQSGQKKLVLILNKSDLVPKENLESWLNYLKKELPTVVFRASTKPKDKGKITKRVKAKKNAAPFRSEVCFGKEGLWKLLGGFQETCSKAIRVGVIGFPNVGKSSIINSLKQEQMCNVGVSMGLTRSMQVVPLDKQITIIDSPSFIVSPLNSSSALALRSPASIEVVKPMEAASAILSQADARQVVLKYTVPGYRNSLEFFTVLAQRRGMHQKGGIPNVEGAAKLLWSEWTGASLAYYCHPPTSWTPPPYFNESIVVDMKSGFNLEELEKNNAQSIRAIKGPHLANSILFQSSGLTNGIIEEKDIHEELPKRKERKQEEREDDKDSDQETVDEEVDENSSGMFAAEETGEALSEETTAGEQSTRSFILDKIIEEDDAYDFSTDYV

SEQ ID NO: 48555 - protein, 96 aa, Homo sapiens
MTCHKRYKIQKKVREHHRKLRKEAKKRGHKKPRKDPGVPNSAPFKEALLREAELRKQRLEELKQQQKLDRQKELEKKRKLETNPDIKPSNVEPMEK

SEQ ID NO: 48556 - protein, 135 aa, Homo sapiens
MTCHKRYKIQKKVREHHRKLRKEAKKRGHKKPRKDPGVPNSAPFKEALLREAELRKQRLEELKQQQKLDRQKELEKKRKLETNPDIKPSNVEPMEKEFGLCKTENKAKSGKQNSKKLYCQELKKVIEASDVVLEV

SEQ ID NO: 48557 - protein, 138 aa, Homo sapiens
MKRPKLKKASKRMTCHKRYKIQKKVREHHRKLRKEAKKRGHKKPRKDPGVPNSAPFKEALLREAELRKQRLEELKQQQKLDRQKELEKKRKLETNPDIKPSNVEPMEKEFGLCKTENKAKSGKQNSKKLYCQELKKVS

SEQ ID NO: 48558 - protein, 345 aa, Homo sapiens
MPRIDADLKLDFKDVLLRPKRSSLKSRAEVDLERTFTFRNSKQTYSGIPIIVANMDTVGTFEMAAVMSQHSMFTAIHKHYSLDDWKLFATNHPECLQNVAVSSGSGQNDLEKMTSILEAVPQVKFICLDVANGYSEHFVEFVKLVRAKFPEHTIMAGNVVTGEMVEELILSGADIIKVGVGPGSVCTTRTKTGVGYPQLSAVIECADSAHGLKGHIISDGGCTCPGDVAKAFGAGADFVMLGGMFSGHTECAGEVFERNGRKLKLFYGMSSDTAMNKHAGGVAEYRASEGKTVEVPYKGDVENTILDILGGLRSTCTYVGAAKLKELSRRATFIRVTQQHNTVFS

SEQ ID NO: 48559 - protein, 409 aa, Homo sapiens
MPHIDNDVKLDFKDVLLRPKRSTLKSRSEVDLTRSFSFRNSKQTYSGVPIIAANMDTVGTFEMAKVLCKFSLFTAVHKHYSLVQWQEFAGQNPDCLEHLAASSGTGSSDFEQLEQILEAIPQVKYICLDVANGYSEHFVEFVKDVRKRFPQHTIMAGNVVTGEMVEELILSGADIIKVGIGPGSVCTTRKKTGVGYPQLSAVMECADAAHGLKGHIISDGGCSCPGDVAKAFGAGADFVMLGGMLAGHSESGGELIERDGKKYKLFYGMSSEMAMKKYAGGVAEYRYVWRPRSLVIVWRQNSWLLRGGWYSSQRSMVNRGSMLGSVEKSLGLRNPEGEDNKVFPTLRASEGKTVEVPFKGDVEHTIRDILGGIRSTCTYVGAAKLKELSRRTTFIRVTQQVNPIFSEAC

SEQ ID NO: 48560 - protein, 348 aa, Homo sapiens
MPHIDNDVKLDFKDVLLRPKRSTLKSRSEVDLTRSFSFRNSKQTYSGVPIIAANMDTVGTFEMAKVLCKFSLFTAVHKHYSLVQWQEFAGQNPDCLEHLAASSGTGSSDFEQLEQILEAIPQVKYICLDVANGYSEHFVEFVKDVRKRFPQHTIMAGNVVTGEMVEELILSGADIIKVGIGPGSVCTTRKKTGVGYPQLSAVMECADAAHGLKGHIISDGGCSCPGDVAKAFGAGADFVMLGGMLAGHSESGGELIERDGKKYKLFYGMSSEMAMKKYAGGVAEYRASEGKTVEVPFKGDVEHTIRDILGGIRSTCTYVGAAKLKELSRRTTFIRVTQQVNPIFSEAC

SEQ ID NO: 48561 - protein, 348 aa, Homo sapiens; identical to SEQ ID NO: 48560

SEQ ID NO: 48562 - protein, 366 aa, Homo sapiens
MTSCLPALRFIATPRLSAMPHIDNDVKLDFKDVLLRPKRSTLKSRSEVDLTRSFSFRNSKQTYSGVPIIAANMDTVGTFEMAKVLCKFSLFTAVHKHYSLVQWQEFAGQNPDCLEHLAASSGTGSSDFEQLEQILEAIPQVKYICLDVANGYSEHFVEFVKDVRKRFPQHTIMAGNVVTGEMVEELILSGADIIKVGIGPGSVCTTRKKTGVGYPQLSAVMECADAAHGLKGHIISDGGCSCPGDVAKAFGAGADFVMLGGMLAGHSESGGELIERDGKKYKLFYGMSSEMAMKKYAGGVAEYRASEGKTVEVPFKGDVEHTIRDILGGIRSTCTYVGAAKLKELSRRTTFIRVTQQVNPIFSEAC

SEQ ID NO: 48563 - protein, 348 aa, Homo sapiens
MPHIDNDVKLDFKDVLLRPKRSTLKSRSEVDLTRSFSFRNSKQTYSGVPIIAANMDTVGTFEMAKVLCKFSLFTAVHKHYSLVQWQEFAGQNPDCLESIWLPAQAQALLTLSSWNRSWKLFPRKYICLDVANGYSEHFVEFVKDVRKRFPQHTIMAGNVVTGEMVEELILSGADIIKVGIGPGSVCTTRKKTGVGYPQLSAVMECADAAHGLKGHIISDGGCSCPGDVAKAFGAGADFVMLGGMLAGHSESGGELIERDGKKYKLFYGMSSEMAMKKYAGGVAEYRASEGKTVEVPFKGDVEHTIRDILGGIRSTCTYVGAAKLKELSRRTTFIRVTQQVNPIFSEAC

SEQ ID NO: 48564 - protein, 348 aa, Homo sapiens; identical to SEQ ID NO: 48560

SEQ ID NO: 48565 - protein, 592 aa, Homo sapiens
MASEIHMTGPMCLIENTNGRLMANPEALKILSAITQPMVVVAIVGLYRTGKSYLMNKLAGKKKGFSLGSTVQSHTKGIWMWCVPHPKKPGHILVLLDTEGLGDVEKGDNQNDSWIFALAVLLSSTFVYNSIGTINQQAMDQLYYVTELTHRIRSKSSPDENENEVEDSADFVSFFPDFVWTLRDFSLDLEADGQPLTPDEYLTYSLKLKKGTSQKDETFNLPRLCIRKFFPKKKCFVFDRPVHRRKLAQLEKLQDEELDPEFVQQVADFCSYIFSNSKTKTLSGGIQVNGPRLESLVLTYVNAISSGDLPCMENAVLALAQIENSAAVQKAIAHYEQQMGQKVQLPTETLQELLDLHRDSEREAIEVFIRSSFKDVDHLFQKELAAQLEKKRDDFCKQNQEASSDRCSALLQVIFSPLEEEVKAGIYSKPGGYRLFVQKLQDLKKKYYEEPRKGIQAEEILQTYLKSKESMTDAILQTDQTLTEKEKEIEVERVKAESAQASAKMLQEMQRKNEQMMEQKERSYQEHLKQLTEKMENDRVQLLKEQERTLALKLQEQEQLLKEGFQKESRIMKNEIQDLQTKMRRRKACTIS

SEQ ID NO: 48566 - protein, 555 aa, Homo sapiens
MVVVAIVGLYRTGKSYLMNKLAGKKKGFSLGSTVQSHTKGIWMWCVPHPKKPGHILVLLDTEGLGDVEKGDNQNDSWIFALAVLLSSTFVYNSIGTINQQAMDQLYYVTELTHRIRSKSSPDENENEVEDSADFVSFFPDFVWTLRDFSLDLEADGQPLTPDEYLTYSLKLKKGTSQKDETFNLPRLCIRKFFPKKKCFVFDRPVHRRKLAQLEKLQDEELDPEFVQQVADFCSYIFSNSKTKTLSGGIQVNGPRLESLVLTYVNAISSGDLPCMENAVLALAQIENSAAVQKAIAHYEQQMGQKVQLPTETLQELLDLHRDSEREAIEVFIRSSFKDVDHLFQKELAAQLEKKRDDFCKQNQEASSDRCSALLQVIFSPLEEEVKAGIYSKPGGYRLFVQKLQDLKKKYYEEPRKGIQAEEILQTYLKSKESMTDAILQTDQTLTEKEKEIEVERVKAESAQASAKMLQEMQRKNEQMMEQKERSYQEHLKQLTEKMENDRVQLLKEQERTLALKLQEQEQLLKEGFQKESRIMKNEIQDLQTKMRRRKACTIS

SEQ ID NO: 48567 - protein, 591 aa, Homo sapiens
MAPEINLPGPMSLIDNTKGQLVVNPEALKILSAITQPVVVVAIVGLYRTGKSYLMNKLAGKKNGFSLGSTVKSHTKGIWMWCVPHPKKPEHTLVLLDTEGLGDIEKGDNENDSWIFALAILLSSTFVYNSMGTINQQAMDQLHYVTELTDRIKANSSPGNNSVDDSADFVSFFPAFVWTLRDFTLELEVDGEPITADDYLELSLKLRKGTDKKSKSFNDPRLCIRKFFPKRKCFVFDWPAPKKYLAHLEQLKEEELNPDFIEQVAEFCSYILSHSNVKTLSGGIPVNGPRLESLVLTYVNAISSGDLPCMENAVLALAQIENSAAVEKAIAHYEQQMGQKVQLPTETLQELLDLHRDSEREAIEVFMKNSFKDVDQMFQRKLGAQLEARRDDFCKQNSKASSDCCMALLQDIFGPLEEDVKQGTFSKPGGYRLFTQKLQELKNKYYQVPRKGIQAKEVLKKYLESKEDVADALLQTDQSLSEKEKAIEVERIKAESAEAAKKMLEEIQKKNEEMMEQKEKSYQEHVKQLTEKMERDRAQLMAEQEKTLALKLQEQERLLKEGFENESKRLQKDIWDIQMRSKSLEPICNIL

SEQ ID NO: 48568 - protein, 591 aa, Homo sapiens; identical to SEQ ID NO: 48567

SEQ ID NO: 48569 - protein, 440 aa, Homo sapiens
MAPEIHMTGPMCLIENTNGELVANPEALKILSAITQPVVVVAIVGLYRTGKSYLMNKLAGKNKGFSLGSTVKSHTKGIWMWCVPHPKKPEHTLVLLDTEGLGDVKKGDNQNDSWIFTLAVLLSSTLVYNSMGTINQQAMDQLYYVTELTHRIRSKSSPDENENEDSADFVSFFPDFVWTLRDFSLDLEADGQPLTPDEYLEYSLKLTQGTSQKDKNFNLPRLCIRKFFPKKKCFVFDLPIHRRKLAQLEKLQDEELDPEFVQQVADFCSYIFSNSKTKTLSGGIKVNGPRLESLVLTYINAISRGDLPCMENAVLALAQIENSAAVQKAIAHYDQQMGQKVQLPAETLQELLDLHRVSEREATEVYMKNSFKDVDHLFQKKLAAQLDKKRDDFCKQNQEASSDRCSALLQVIFSPLEEEVKAGIYSKPGGYCLFIQKLQD

SEQ ID NO: 48570 - protein, 595 aa, Homo sapiens
MAPEIHMTGPMCLIENTNGELVANPEALKILSAITQPVVVVAIVGLYRTGKSYLMNKLAGKNKGFSLGSTVKSHTKGIWMWCVPHPKKPEHTLVLLDTEGLGDVKKGDNQNDSWIFTLAVLLSSTLVYNSMGTINQQAMDQLYYVTELTHRIRSKSSPDENENEDSADFVSFFPDFVWTLRDFSLDLEADGQPLTPDEYLEYSLKLTQGTSQKDKNFNLPRLCIRKFFPKKKCFVFDLPIHRRKLAQLEKLQDEELDPEFVQQVADFCSYIFSNSKTKTLSGGIKVNGPRLESLVLTYINAISRGDLPCMENAVLALAQIENSAAVQKAIAHYDQQMGQKVQLPAETLQELLDLHRVSEREATEVYMKNSFKDVDHLFQKKLAAQLDKKRDDFCKQNQEASSDRCSALLQVIFSPLEEEVKAGIYSKPGGYCLFIQKLQDLEKKYYEEPRKGIQAEEILQTYLKSKESVTDAILQTDQILTEKEKEIEVECVKAESAQASAKMVEEMQIKYQQMMEEKEKSYQEHVKQLTEKMERERAQLLEEQEKTLTSKLQEQARVLKERCQGESTQLQNEIQKLQKTLKKKTKRYMSHKLKI

SEQ ID NO: 48571 - protein, 563 aa, Homo sapiens
MAPEIHMTGPMCLIENTNGELVANPEALKILSAITQPVVVVAIVGLYRTGKSYLMNKLAGKNKGFSLGSTVKSHTKGIWMWCVPHPKKPEHTLVLLDTEGLGDVKKGDNQNDSWIFTLAVLLSSTLVYNSMGTINQQAMDQLYYVTELTHRIRSKSSPDENENEDSADFVSFFPDFVWTLRDFSLDLEADGQPLTPDEYLEYSLKLTQGNRKLAQLEKLQDEELDPEFVQQVADFCSYIFSNSKTKTLSGGIKVNGPRLESLVLTYINAISRGDLPCMENAVLALAQIENSAAVQKAIAHYDQQMGQKVQLPAETLQELLDLHRVSEREATEVYMKNSFKDVDHLFQKKLAAQLDKKRDDFCKQNQEASSDRCSALLQVIFSPLEEEVKAGIYSKPGGYCLFIQKLQDLEKKYYEEPRKGIQAEEILQTYLKSKESVTDAILQTDQILTEKEKEIEVECVKAESAQASAKMVEEMQIKYQQMMEEKEKSYQEHVKQLTEKMERERAQLLEEQEKTLTSKLQEQARVLKERCQGESTQLQNEIQKLQKTLKKKTKRYMSHKLKI

SEQ ID NO: 48572 - protein, 137 aa, Homo sapiens
QDEELDPEFVQQVADFCSYIFSNSKTKTLSGGIKAEEILQTYLKSKESVTDAILQTDQILTEKEKEIEVECVKAESAQASAKMVEEMQIKYQQMMEEKEKSYQEHVKQLTEKMERERAQLLEEQEKTLTSKLQVSKC

SEQ ID NO: 48573 - protein, 640 aa, Homo sapiens
MGERTLHAAVPTPGYPESESIMMAPICLVENQEEQLTVNSKALEILDKISQPVVVVAIVGLYRTGKSYLMNRLAGKRNGFPLGSTVQSETKGIWMWCVPHLSKPNHTLVLLDTEGLGDVEKSNPKNDSWIFALAVLLSSSFVYNSVSTINHQALEQLHYVTELAELIRAKSCPRPDEAEDSSEFASFFPDFIWTVRDFTLELKLDGNPITEDEYLENALKLIPGKNPKIQNSNMPRECIRHFFRKRKCFVFDRPTNDKQYLNHMDEVPEENLERHFLMQSDNFCSYIFTHAKTKTLREGIIVTGKRLGTLVVTYVDAINSGAVPCLENAVTALAQLENPAAVQRAADHYSQQMAQQLRLPTDTLQELLDVHAACEREAIAVFMEHSFKDENHEFQKKLVDTIEKKKGDFVLQNEEASAKYCQAELKRLSEHLTESILRGIFSVPGGHNLYLEEKKQVEWDYKLVPRKGVKANEVLQNFLQSQVVVEESILQSDKALTAGEKAIAAERAMKEAAEKEQELLREKQKEQQQMMEAQERSFQEYMAQMEKKLEEERENLLREHERLLKHKLKVQEEMLKEEFQKKSEQLNKEINQLKEKIESTKNEQLRLLKILDMASNIMIVTLPGASKLLGVGTKYLGSRI

SEQ ID NO: 48574 - protein, 586 aa, Homo sapiens
MALEIHMSDPMCLIENFNEQLKVNQEALEILSAITQPVVVVAIVGLYRTGKSYLMNKLAGKNKGFSVASTVQSHTKGIWIWCVPHPNWPNHTLVLLDTEGLGDVEKADNKNDIQIFALALLLSSTFVYNTVNKIDQGAIDLLHNVTELTDLLKARNSPDLDRVEDPADSASFFPDLVWTLRDFCLGLEIDGQLVTPDEYLENSLRPKQGSDQRVQNFNLPRLCIQKFFPKKKCFIFDLPAHQKKLAQLETLPDDELEPEFVQQVTEFCSYIFSHSMTKTLPGGIMVNGSRLKNLVLTYVNAISSGDLPCIENAVLALAQRENSAAVQKAIAHYDQQMGQKVQLPMETLQELLDLHRTSEREAIEVFMKNSFKDVDQSFQKELETLLDAKQNDICKRNLEASSDYCSALLKDIFGPLEEAVKQGIYSKPGGHNLFIQKTEELKAKYYREPRKGIQAEEVLQKYLKSKESVSHAILQTDQALTETEKKKKEAQVKAEAEKAEAQRLAAIQRQNEQMMQERERLHQEQVRQMEIAKQNWLAEQQKMQEQQMQEQAAQLSTTFQAQNRSLLSELQHAQRTVNNDDPCVLL

SEQ ID NO: 48575 - protein, 586 aa, Homo sapiens; identical to SEQ ID NO: 48574

SEQ ID NO: 48576 - protein, 483 aa, Homo sapiens
MALEIHMSDPMCLIENFNEQLKVNQEALEILSAITQPVVVVAIVGLYRTGKSYLMNKLAGKNKGFSVASTVQSHTKGIWIWCVPHPNWPNHTLVLLDTEGLGDVEKADNKNDIQIFALALLLSSTFVYNTVNKIDQGAIDLLHNVTELTDLLKARNSPDLDRVEDPADSASFFPDLVWTLRDFCLGLEIDGQLVTPDEYLENSLRPKQGSDQRVQNFNLPRLCIQKFFPKKKCFIFDLPAHQKKLAQLETLPDDELEPEFVQQVTEFCSYIFSHSMTKTLPGGIMVNGSRLKNLVLTYVNAISSGDLPCIENAVLALAQRENSAAVQKAIAHYDQQMGQKVQLPMETLQELLDLHRTSEREAIEVFMKNSFKDVDQSFQKELETLLDAKQNDICKRNLEASSDYCSALLKDIFGPLEEAVKQGIYSKPGGHNLFIQKTEELKAKYYREPRKGIQAEEVLQKYLKSKESVSHAILQTDQALTET

SEQ ID NO: 48577 - protein, 638 aa, Homo sapiens
MASEIHMPGPVCLTENTKGHLVVNSEALEILSAITQPVVVVAIVGLYRTGKSYLMNKLAGKNKGFPLGCTVKSETKGIWMWCVPHPSKPNHTLILLDTEGLGDMEKSDPKSDSWIFALAVLLSSSFVYNSMGTINHQALEQLHYVTELTELIRAKSCPRPDEVEDSSEFVSFFPDFIWTVRDFTLELKLDGHPITEDEYLENALKLISGKNPQIQNSNKPREWIRHFFPKQKCFVFDRPINDKKLLLHVEEVREDQLDSNFQMQSENFCSYIFTHAKTKTLREGILVTGNRLGMLVETYLDAINSGATPCLENAMAVLAQCENSAAVQRAANHYSQQMAQQVRFPTDTLQELLDVHAVCEREAIAVFMEYSFKDKSQEFQKKLVDTMEKKKEDFVLQNEEASAKYCQAELKRLSELLTESISRGTFFVPGGHNIYLEAKKKIEQDYTLVPRKGVKADEVLQSFLQSQVVIEESILQSDKALTAGEKAIAAKQAKKEAAEKEQELLRQKQKEQQQMMEAQERSFQENIAQLKKKMERERENYMRELRKMLSHKMKVLEELLTEGFKEIFESLNEEINRLKEQIEAAENEEPSVFSQILDVAGSIFIAALPGAAKLVDLGMKILSSLCNRLRNPGKKIIS

SEQ ID NO: 48578 - protein, 633 aa, Homo sapiens
MESGPKMLAPVCLVENNNEQLLVNQQAIQILEKISQPVVVVAIVGLYRTGKSYLMNHLAGQNHGFPLGSTVQSETKGIWMWCVPHPSKPNHTLVLLDTEGLGDVEKGDPKNDSWIFALAVLLCSTFVYNSMSTINHQALEQLHYVTELTELIKAKSSPRPDGVEDSTEFVSFFPDFLWTVRDFTLELKLNGHPITEDEYLENALKLIQGNNPRVQTSNFPRECIRRFFPKRKCFVFDRPTNDKDLLANIEKVSEKQLDPKFQEQTNIFCSYIFTHARTKTLREGITVTGNRLGTLAVTYVEAINSGAVPCLENAVITLAQRENSAAVQRAADYYSQQMAQRVKLPTDTLQELLDMHAACEREAIAIFMEHSFKDENQEFQKKFMETTMNKKGDFLLQNEESSVQYCQAKLNELSKGLMESISAGSFSVPGGHKLYMETKERIEQDYWQVPRKGVKAKEVFQRFLESQMVIEESILQSDKALTDREKAVAVDRAKKEAAEKEQELLKQKLQEQQQQMEAQDKSRKENIAQLKEKLQMEREHLLREQIMMLEHTQKVQNDWLHEGFKKKYEEMNAEISQFKRMIDTTKNDDTPWIARTLDNLADELTAILSAPAKLIGHGVKGVSSLFKKHKLPF

SEQ ID NO: 48579 - protein, 503 aa, Homo sapiens
MSTINHQALEQLHYVTELTELIKAKSSPRPDGVEDSTEFVSFFPDFLWTVRDFTLELKLNGHPITEDEYLENALKLIQGNNPRVQTSNFPRECIRRFFPKRKCFVFDRPTNDKDLLANIEKVSEKQLDPKFQEQTNIFCSYIFTHARTKTLREGITVTGNRLGTLAVTYVEAINSGAVPCLENAVITLAQRENSAAVQRAADYYSQQMAQRVKLPTDTLQELLDMHAACEREAIAIFMEHSFKDENQEFQKKFMETTMNKKGDFLLQNEESSVQYCQAKLNELSKGLMESISAGSFSVPGGHKLYMETKERIEQDYWQVPRKGVKAKEVFQRFLESQMVIEESILQSDKALTDREKAVAVDRAKKEAAEKEQELLKQKLQEQQQQMEAQDKSRKENIAQLKEKLQMEREHLLREQIMMLEHTQKVQNDWLHEGFKKKYEEMNAEISQFKRMIDTTKNDDTPWIARTLDNLADELTAILSAPAKLIGHGVKGVSSLFKKHKLPF

SEQ ID NO: 48580 - protein, 604 aa, Homo sapiens
MESGPKMLAPVCLVENNNEQLLVNQQAIQILEKISQPVVVVAIVGLYRTGKSYLMNHLAGQNHGFPLDTEGLGDVEKGDPKNDSWIFALAVLLCSTFVYNSMSTINHQALEQLHYVTELTELIKAKSSPRPDGVEDSTEFVSFFPDFLWTVRDFTLELKLNGHPITEDEYLENALKLIQGNNPRVQTSNFPRECIRRFFPKRKCFVFDRPTNDKDLLANIEKVSEKQLDPKFQEQTNIFCSYIFTHARTKTLREGITVTGNRLGTLAVTYVEAINSGAVPCLENAVITLAQRENSAAVQRAADYYSQQMAQRVKLPTDTLQELLDMHAACEREAIAIFMEHSFKDENQEFQKKFMETTMNKKGDFLLQNEESSVQYCQAKLNELSKGLMESISAGSFSVPGGHKLYMETKERIEQDYWQVPRKGVKAKEVFQRFLESQMVIEESILQSDKALTDREKAVAVDRAKKEAAEKEQELLKQKLQEQQQQMEAQDKSRKENIAQLKEKLQMEREHLLREQIMMLEHTQKVQNDWLHEGFKKKYEEMNAEISQFKRMIDTTKNDDTPWIARTLDNLADELTAILSAPAKLIGHGVKGVSSLFKKHKLPF

SEQ ID NO: 48581 - protein, 432 aa, Homo sapiens
MKSTKPSLSPSKPQSSLVIPTSLFCKTFPFHFMFDKDMTILQFGNGIRRLMNRRDFQGKPNFEEYFEILTPKINQTFSGIMTMLNMQFVVRVRRWDNSVKKSSRVMDLKGQMIYIVESSAILFLGSPCVDRLEDFTGRGLYLSDIPIHNALRDVVLIGEQARAQDGLKKRLGKLKATLEQAHQALEEEKKKTVDLLCSIFPCEVAQQLWQGQVVQAKKFSNVTMLFSDIVGFTAICSQCSPLQVITMLNALYTRFDQQCGELDVYKVETIGDAYCVAGGLHKESDTHAVQIALMALKMMELSDEVMSPHGEPIKMRIGLHSGSVFAGVVGVKMPRYCLFGNNVTLANKFESCSVPRKINVSPTTYRLLKDCPGFVFTPRSREELPPNFPSEIPGICHFLDAYQQGTNSKPCFQKKDVEDGNANFLGKASGID

SEQ ID NO: 48582 - protein, 624 aa, Homo sapiens
MFCTKLKDLKITGECPFSLLAPGQVPNESSEEAAGSSESCKATVPICQDIPEKNIQESLPQRKTSRSRVYLHTLAESICKLIFPEFERLNVALQRTLAKHKIKESRKSLEREDFEKTIAEQAVAAGVPVEVIKESLGEEVFKICYEEDENILGVVGGTLKDFLNSFSTLLKQSSHCQEAGKRGRLEDASILCLDKEDDFLHVYYFFPKRTTSLILPGIIKAAAHVLYETEVEVSLMPPCFHNDCSEFVNQPYLLYSVHMKSTKPSLSPSKPQSSLVIPTSLFCKTFPFHFMFDKDMTILQFGNGIRRLMNRRDFQGKPNFEEYFEILTPKINQTFSGIMTMLNMQFVVRVRRWDNSVKKSSRVMDLKGQMIYIVESSAILFLGSPCVDRLEDFTGRGLYLSDIPIHNALRDVVLIGEQARAQDGLKKRLGKLKATLEQAHQALEEEKKKTVDLLCSIFPCEVAQQLWQGQVVQAKKFSNVTMLFSDIVGFTAICSQCSPLQVITMLNALYTRFDQQCGELDVYKVETIGDAYCVAGGLHKESDTHAVQIALMALKMMELSDEVMSPHGEPIKMRIGLHSGSVFAGVVGVKMPRYCLFGNNVTLANKFESCSVPRKINVSPTTYR

SEQ ID NO: 48583 - protein, 763 aa, Homo sapiens
MSRRKISSESFSSLGSDYLETSPEEEGECPLSRLCWNGSRSPPGPLEPSPAAAAAAAAPAPTPAASAAAAAATAGARRVQRRRRVNLDSLGESISRLTAPSPQTIQQTLKRTLQYYEHQVIGYRDAEKNFHNISNRCSYADHSNKEEIEDVSGILQCTANILGLKFEEIQKRFGEEFFNICFHENERVLRAVGGTLQDFFNGFDALLEHIRTSFGKQATLESPSFLCKELPEGTLMLHYFHPHHIVGFAMLGMIKAAGKKIYRLDVEVEQVANEKLCSDVSNPGNCSCLTFLIKECENTNIMKNLPQGTSQVPADLRISINTFCRAFPFHLMFDPSMSVLQLGEGLRKQLRCDTHKVLKFEDCFEIVSPKVNATFERVLLRLSTPFVIRTKPEASGSENKDKVMEVKGQMIHVPESNSILFLGSPCVDKLDELMGRGLHLSDIPIHDATRDVILVGEQAKAQDGLKKRMDKLKATLERTHQALEEEKKKTVDLLYSIFPGDVAQQLWQGQQVQARKFDDVTMLFSDIVGFTAICAQCTPMQVISMLNELYTRFDHQCGFLDIYKVETIGDAYCVAAGLHRKSLCHAKPIALMALKMMELSEEVLTPDGRPIQPQRSELLFSFPVSIQLVPDQHQSETDLGTEKMRIGIHSGSVLAGVVGVRMPRYCLFGNNVTLASKFESGSHPRRINVSPTTYQLLKREESFTFIPRSREELPDNFPKEIPGICYFLEVRTGPKPPKPSLSSSRIKKVSYNIGTMFLRETSL

SEQ ID NO: 48584 - protein, 732 aa, Homo sapiens
MSRRKISSESFSSLGSDYLETSPEEEGECPLSRLCWNGSRSPPGPLEPSPAAAAAAAAPAPTPAASAAAAAATAGARRVQRRRRVNLDSLGESISRLTAPSPQTIQQTLKRTLQYYEHQVIGYRDAEKNFHNISNRCSYADHSNKEEIEDVSGILQCTANILGLKFEEIQKRFGEEFFNICFHENERVLRAVGGTLQDFFNGFDALLEHIRTSFGKQATLESPSFLCKELPEGTLMLHYFHPHHIVGFAMLGMIKAAGKKIYRLDVEVEQVANEKLCSDVSNPGNCSCLTFLIKECENTNIMKNLPQGTSQVPADLRISINTFCRAFPFHLMFDPSMSVLQLGEGLRKQLRCDTHKVLKFEDCFEIVSPKVNATFERVLLRLSTPFVIRTKPEASGSENKDKVMEVKGQMIHVPESNSILFLGSPCVDKLDELMGRGLHLSDIPIHDATRDVILVGEQAKAQDGLKKRMDKLKATLERTHQALEEEKKKTVDLLYSIFPGDVAQQLWQGQQVQARKFDDVTMLFSDIVGFTAICAQCTPMQVISMLNELYTRFDHQCGFLDIYKVETIGDAYCVAAGLHRKSLCHAKPIALMALKMMELSEEVLTPDGRPIQMRIGIHSGSVLAGVVGVRMPRYCLFGNNVTLASKFESGSHPRRINVSPTTYQLLKREESFTFIPRSREELPDNFPKEIPGICYFLEVRTGPKPPKPSLSSSRIKKVSYNIGTMFLRETSL

SEQ ID NO: 48585 - protein, 690 aa, Homo sapiens
MFCTKLKDLKITGECPFSLLAPGQVPNESSEEAAGSSESCKATVPICQDIPEKNIQESLPQRKTSRSRVYLHTLAESICKLIFPEFERLNVALQRTLAKHKIKESRKSLEREDFEKTIAEQAVAAGVPVEVIKESLGEEVFKICYEEDENILGVVGGTLKDFLNSFSTLLKQSSHCQEAGKRGRLEDASILCLDKEDDFLHVYYFFPKRTTSLILPGIIKAAAHVLYETEVEVSLMPPCFHNDCSEFVNQPYLLYSVHMKSTKPSLSPSKPQSSLVIPTSLFCKTFPFHFMFDKDMTILQFGNGIRRLMNRRDFQGKPNFEEYFEILTPKINQTFSGIMTMLNMQFVVRVRRWDNSVKKSSRVMDLKGQMIYIVESSAILFLGSPCVDRLEDFTGRGLYLSDIPIHNALRDVVLIGEQARAQDGLKKRLGKLKATLEQAHQALEEEKKKTVDLLCSIFPCEVAQQLWQGQVVQAKKFSNVTMLFSDIVGFTAICSQCSPLQVITMLNALYTRFDQQCGELDVYKVETIGDAYCVAGGLHKESDTHAVQIALMALKMMELSDEVMSPHGEPIKMRIGLHSGSVFAGVVGVKMPRYCLFGNNVTLANKFESCSVPRKINVSPTTYRLLKDCPGFVFTPRSREELPPNFPSEIPGICHFLDAYQQGTNSKPCFQKKDVEDGNANFLGKASGID

SEQ ID NO: 48586 - protein, 690 aa, Homo sapiens; identical to SEQ ID NO: 48585

SEQ ID NO: 48587 - protein, 690 aa, Homo sapiens; identical to SEQ ID NO: 48585

SEQ ID NO: 48588 - protein, 690 aa, Homo sapiens; identical to SEQ ID NO: 48585

SEQ ID NO: 48589 - protein, 690 aa, Homo sapiens; identical to SEQ ID NO: 48585

SEQ ID NO: 48590 - protein, 619 aa, Homo sapiens
MYGFVNHALELLVIRNYGPEVWEDIKKEAQLDEEGQFLVRIIYDDSKTYDLVAAASKVLNLNAGEILQMFGKMFFVFCQESGYDTILRVLGSNVREFLQNLDALHDHLATIYPGMRAPSFRCTDAEKGKGLILHYYSEREGLQDIVIGIIKTVAQQIHGTEIDMKVIQQRNEECDHTQFLIEEKESKEEDFYEDLDRFEENGTQESRISPYTFCKAFPFHIIFDRDLVVTQCGNAIYRVLPQLQPGNCSLLSVFSLVRPHIDISFHGILSHINTVFVLRSKEGLLDVEKLECEDELTGTEISCLRLKGQMIYLPEADSILFLCSPSVMNLDDLTRRGLYLSDIPLHDATRDLVLLGEQFREEYKLTQELEILTDRLQLTLRALEDEKKKTDTLLYSVLPPSVANELRHKRPVPAKRYDNVTILFSGIVGFNAFCSKHASGEGAMKIVNLLNDLYTRFDTLTDSRKNPFVYKVETVGDKYMTVSGLPEPCIHHARSICHLALDMMEIAGQVQVDGESVQITIGIHTGEVVTGVIGQRMPRYCLFGNTVNLTSRTETTGEKGKINVSEYTYRCLMSPENSDPQFHLEHRGPVSMKGKKEPMQVWFLSRKNTGTEETKQDDD

SEQ ID NO: 48591 - protein, 551 aa, Homo sapiens
MFGKMFFVFCQESGYDTILRVLGSNVREFLQNLDALHDHLATIYPGMRAPSFRCTDAEKGKGLILHYYSEREGLQDIVIGIIKTVAQQIHGTEIDMKVIQQRNEECDHTQFLIEEKESKEEDFYEDLDRFEENGTQESRISPYTFCKAFPFHIIFDRDLVVTQCGNAIYRVLPQLQPGNCSLLSVFSLVRPHIDISFHGILSHINTVFVLRSKEGLLDVEKLECEDELTGTEISCLRLKGQMIYLPEADSILFLCSPSVMNLDDLTRRGLYLSDIPLHDATRDLVLLGEQFREEYKLTQELEILTDRLQLTLRALEDEKKKTDTLLYSVLPPSVANELRHKRPVPAKRYDNVTILFSGIVGFNAFCSKHASGEGAMKIVNLLNDLYTRFDTLTDSRKNPFVYKVETVGDKYMTVSGLPEPCIHHARSICHLALDMMEIAGQVQVDGESVQITIGIHTGEVVTGVIGQRMPRYCLFGNTVNLTSRTETTGEKGKINVSEYTYRCLMSPENSDPQFHLEHRGPVSMKGKKEPMQVWFLSRKNTGTEETKQDDD

SEQ ID NO: 48592 - protein, 599 aa, Homo sapiens
MLMCFIKEAQLDEEGQFLVRIIYDDSKTYDLVAAASKVLNLNAGEILQMFGKMFFVFCQESGYDTILRVLGSNVREFLQNLDALHDHLATIYPGMRAPSFRCTDAEKGKGLILHYYSEREGLQDIVIGIIKTVAQQIHGTEIDMKVIQQRNEECDHTQFLIEEKESKEEDFYEDLDRFEENGTQESRISPYTFCKAFPFHIIFDRDLVVTQCGNAIYRVLPQLQPGNCSLLSVFSLVRPHIDISFHGILSHINTVFVLRSKEGLLDVEKLECEDELTGTEISCLRLKGQMIYLPEADSILFLCSPSVMNLDDLTRRGLYLSDIPLHDATRDLVLLGEQFREEYKLTQELEILTDRLQLTLRALEDEKKKTDTLLYSVLPPSVANELRHKRPVPAKRYDNVTILFSGIVGFNAFCSKHASGEGAMKIVNLLNDLYTRFDTLTDSRKNPFVYKVETVGDKYMTVSGLPEPCIHHARSICHLALDMMEIAGQVQVDGESVQITIGIHTGEVVTGVIGQRMPRYCLFGNTVNLTSRTETTGEKGKINVSEYTYRCLMSPENSDPQFHLEHRGPVSMKGKKEPMQVWFLSRKNTGTEETKQDDD

SEQ ID NO: 48593 - protein, 551 aa, Homo sapiens; identical to SEQ ID NO: 48591

SEQ ID NO: 48594 - protein, 1073 aa, Homo sapiens
MKTLLLDLALWSLLFQPGWLSFSSQVSQNCHNGSYEISVLMMGNSAFAEPLKNLEDAVNEGLEIVRGRLQNAGLNVTVNATFMYSDGLIHNSGDCRSSTCEGLDLLRKISNAQRMGCVLIGPSCTYSTFQMYLDTELSYPMISAGSFGLSCDYKETLTRLMSPARKLMYFLVNFWKTNDLPFKTYSWSTSYVYKNGTETEDCFWYLNALEASVSYFSHELGFKVVLRQDKEFQDILMDHNRKSNVIIMCGGPEFLYKLKGDRAVAEDIVIILVDLFNDQYFEDNVTAPDYMKNVLVLTLSPGNSLLNSSFSRNLSPTKRDFALAYLNGILLFGHMLKIFLENGENITTPKFAHAFRNLTFEGYDGPVTLDDWGDVDSTMVLLYTSVDTKKYKVLLTYDTHVNKTYPVDMSPTFTWKNSKLPNDITGRGPQILMIAVFTLTGAVVLLLLVALLMLRKYRKDYELRQKKWSHIPPENIFPLETNETNHVSLKIDDDKRRDTIQRLRQCKYDKKRVILKDLKHNDGNFTEKQKIELNKLLQIDYYNLTKFYGTVKLDTMIFGVIEYCERGSLREVLNDTISYPDGTFMDWEFKISVLYDIAKGMSYLHSSKTEVHGRLKSTNCVVDSRMVVKITDFGCNSILPPKKDLWTAPEHLRQANISQKGDVYSYGIIAQEIILRKETFYTLSCRDRNEKIFRVENSNGMKPFRPDLFLETAEEKELEVYLLVKNCWEEDPEKRPDFKKIETTLAKIFGLFHDQKNESYMDTLIRRLQLYSRNLEHLVEERTQLYKAERDRADRLNFMLLPRLVVKSLKEKGFVEPELYEEVTIYFSDIVGFTTICKYSTPMEVVDMLNDIYKSFDHIVDHHDVYKVETIGDAYMVASGLPKRNGNRHAIDIAKMALEILSFMGTFELEHLPGLPIWIRIGVHSGPCAAGVVGIKMPRYCLFGDTVNTASRMESTGLPLRIHVSGSTIAILKRTECQFLYEVRGETYLKGRGNETTYWLTGMKDQKFNLPTPPTVENQQRLQAEFSDMIANSLQKRQAAGIRSQKPRRVASYKKGTLEYLQLNTTDKESTYF

SEQ ID NO: 48595 - protein, 1103 aa, Homo sapiens
MTACARRAGGLPDPGLCGPAWWAPSLPRLPRALPRLPLLLLLLLLQPPALSAVFTVGVLGPWACDPIFSRARPDLAARLAAARLNRDPGLAGGPRFEVALLPEPCRTPGSLGAVSSALARVSGLVGPVNPAACRPAELLAEEAGIALVPWGCPWTQAEGTTAPAVTPAADALYALLRAFGWARVALVTAPQDLWVEAGRSLSTALRARGLPVASVTSMEPLDLSGAREALRKVRDGPRVTAVIMVMHSVLLGGEEQRYLLEAAEELGLTDGSLVFLPFDTIHYALSPGPEALAALANSSQLRRAHDAVLTLTRHCPSEGSVLDSLRRAQERRELPSDLNLQQVSPLFGTIYDAVFLLARGVAEARAAAGGRWVSGAAVARHIRDAQVPGFCGDLGGDEEPPFVLLDTDAAGDRLFATYMLDPARGSFLSAGTRMHFPRGGSAPGPDPSCWFDPNNICGGGLEPGLVFLGFLLVVGMGLAGAFLAHYVRHRLLHMQMVSGPNKIILTVDDITFLHPHGGTSRKVAQGSRSSLGARSMSDIRSGPSQHLDSPNIGVYEGDRVWLKKFPGDQHIAIRPATKTAFSKLQELRHENVALYLGLFLARGAEGPAALWEGNLAVVSEHCTRGSLQDLLAQREIKLDWMFKSSLLLDLIKGIRYLHHRGVAHGRLKSRNCIVDGRFVLKITDHGHGRLLEAQKVLPEPPRAEDQLWTAPELLRDPALERRGTLAGDVFSLAIIMQEVVCRSAPYAMLELTPEEVVQRVRSPPPLCRPLVSMDQAPVECILLMKQCWAEQPELRPSMDHTFDLFKNINKGRKTNIIDSMLRMLEQYSSNLEDLIRERTEELELEKQKTDRLLTQMLPPSVAEALKTGTPVEPEYFEQVTLYFSDIVGFTTISAMSEPIEVVDLLNDLYTLFDAIIGSHDVYKVETIGDAYMVASGLPQRNGQRHAAEIANMSLDILSAVGTFRMRHMPEVPVRIRIGLHSGPCVAGVVGLTMPRYCLFGDTVNTASRMESTGLPYRIHVNLSTVGILRALDSGYQVELRGRTELKGKGAEDTFWLVGRRGFNKPIPKPPDLQPGSSNHGISLQEIPPERRRKLEKARPGQFS

SEQ ID NO: 48596 - protein, 1108 aa, Homo sapiens
MFLGLGRFSRLVLWFAAFRKLLGHHGLASAKFLWCLCLLSVMSLPQQVWTLPYKIGVVGPWACDSLFSKALPEVAARLAIERINRDPSFDLSYSFEYVILNEDCQTSRALSSFISHHQMASGFIGPTNPGYCEAASLLGNSWDKGIFSWACVNYELDNKISYPTFSRTLPSPIRVLVTVMKYFQWAHAGVISSDEDIWVHTANRVASALRSHGLPVGVVLTTGQDSQSMRKALQRIHQADRIRIIIMCMHSALIGGETQMHLLECAHDLKMTDGTYVFVPYDALLYSLPYKHTPYRVLRNNPKLREAYDAVLTITVESQEKTFYQAFTEAAARGEIPEKLEFDQVSPLFGTIYNSIYFIAQAMNNAMKENGQAGAASLVQHSRNMQFHGFNQLMRTDSNGNGISEYVILDTNLKEWELHSTYTVDMEMELLRFGGTPIHFPGGRPPRADAKCWFAEGKICHGGIDPAFAMMVCLTLLIALLSINGFAYFIRRRINKIQLIKGPNRILLTLEDVTFINPHFGSKRGSRASVSFQITSEVQSGRSPRLSFSSGSLTPATYENSNIAIYEGDWVWLKKFSLGDFGDLKSIKSRASDVFEMMKDLRHENINPLLGFFYDSGMFAIVTEFCSRGSLEDILTNQDVKLDWMFKSSLLLDLIKGMKYLHHREFVHGRLKSRNCVVDGRFVLKVTDYGFNDILEMLRLSEEESSMEELLWTAPELLRAPRGSRLGSFAGDVYSFAIIMQEVMVRGTPFCMMDLPAQEIINRLKKPPPVYRPVVPPEHAPPECLQLMKQCWAEAAEQRPTFDEIFNQFKTFNKGKKTNIIDSMLRMLEQYSSNLEDLIRERTEELEIEKQKTEKLLTQMLPPSVAESLKKGCTVEPEGFDLVTLYFSDIVGFTTISAMSEPIEVVDLLNDLYTLFDAIIGSHDVYKVETIGDAYMVASGLPKRNGSRHAAEIANMSLDILSSVGTFKMRHMPEVPVRIRIGLHSGPVVAGVVGLTMPRYCLFGDTVNTASRMESTGLPYRIHVSLSTVTILQNLSEGYEVELRGRTELKGKGTEETFWLIGKKGFMKPLPVPPPVDKDGQVGHGLQPVEIAAFQRRKAERQLVRNKP

SEQ ID NO: 48597 - protein, 201 aa, Homo sapiens
MGNVMEGKSVEELSSTECHQWYKKFMTECPSGQLTLYEFRQFFGLKNLSPSASQYVEQMFETFDFNKDGYIDFMEYVAALSLVLKGKVEQKLRWYFKLYDVDGNGCIDRDELLTIIQAIRAINPCSDTTMTAEEFTDTVFSKIDVNGDGELSLEEFIEGVQKDQMLLDTLTRSLDLTRIVRRLQNGEQDEEGADEAAEAAG

SEQ ID NO: 48598 - protein, 201 aa, Homo sapiens; identical to SEQ ID NO: 48597

SEQ ID NO: 48599 - protein, 205 aa, Homo sapiens
MEGKSVEELSSTECHQWYKKFMTECPSGQLTLYEFRQFFGLKNLSPSASQYVEQMFETFDFNKDGYIDFMEYVAALSLVLKGKVEQKLRWYFKLYDVDGNGCIDRDELLTIIQFPHQYQKTAIRAINPCSDTTMTAEEFTDTVFSKIDVNGDGELSLEEFIEGVQKDQMLLDTLTRSLDLTRIVRRLQNGEQDEEGADEAAEAAG

SEQ ID NO: 48600 - protein, 201 aa, Homo sapiens; identical to SEQ ID NO: 48597

SEQ ID NO: 48601 - protein, 88 aa, Homo sapiens
MGNVMEGKSVEELSSTECHQWYKKFMTECPSGQLTLYEFRQFFGLKNLSPSASQYVEQMFETFDFNKDGYIDFMEYVAALSLVLKGKV

SEQ ID NO: 48602 - protein, 201 aa, Homo sapiens; identical to SEQ ID NO: 48597

SEQ ID NO: 48603 - protein, 200 aa, Homo sapiens
MGQEFSWEEAEAAGEIDVAELQEWYKKFVMECPSGTLFMHEFKRFFKVTDDEEASQYVEGMFRAFDKNGDNTIDFLEYVAALNLVLRGTLEHKLKWTFKIYDKDGNGCIDRLELLNIVEGIYQLKKACRRELQTEQGQLLTPEEVVDRIFLLVDENGDGQLSLNEFVEGARRDKWVMKMLQMDMNPSSWLAQQRRKSAMF

SEQ ID NO: 48604 - protein, 172 aa, Homo sapiens
MGQEFSWEEAEAAGEIDVAELQEWYKKFVMECPSGTLFMHEFKRFFKVTDDEEASQYVEGMFRAFDKNGDNTIDFLEYVAALNLVLRGTLEHKLKWTFKIYDKDGNGCIDRLELLNIVECRRELQTEQGQLLTPEEVVDRIFLLVDENGDGQLSLNEFVEGARRDNLLMPTL

SEQ ID NO: 48605 - protein, 209 aa, Homo sapiens
MGNGKSIAGDQKAVPTQETHVWYRTFMMEYPSGLQTLHEFKTLLGLQGLNQKANKHIDQVYNTFDTNKDGFVDFLEFIAAVNLIMQEKMEQKLKWYFKLYDADGNGSIDKNELLDMFMAVQALNGQQTLSPEEFINLVFHKIDINNDGELTLEEFINGMAKDQDLLEIVYKSFDFSNVLRVICNGKQPDMETDSSKSPDKAGLGKVKMK

SEQ ID NO: 48606 - protein, 196 aa, Homo sapiens
MGNGKSIAGDQKAVPTQETHVWYRTFMMEYPSGLQTLHEFKTLLGLQGLNQKANKHIDQVYNTFDTNKDGFVDFLEFIAAVNLIMQEKMEQKLKWYFKLYDADGNGSIDKNELLDMFMAVQALNGQQTLSPEEFINLVFHKIDINNDGNGATLYWITFPTKGIDFRRIYQWHGKRSGSPGDCLQELRLLQCAESNL

SEQ ID NO: 48607 - protein, 115 aa, Homo sapiens
MNAFLLSALCLLGAWAALAGGVTVQDGNFSFSLESVKKLKDLQEPQEPRVGKLRNFAPIPGEPVVPILCSNPNFPEELKPLCKEPNAQEILQRLEEIAEDPGTCEICAYAACTGC

SEQ ID NO: 48608 - protein, 112 aa, Homo sapiens
MGCRAASGLLPGVAVVLLLLLQSTQSVYIQYQGFRVQLESMKKLSDLEAQWAPSPRLQAQSLLPAVCHHPALPQDLQPVCASQEASSIFKTLRTIANDDCELCVNVACTGCL

SEQ ID NO: 48609 - protein, 197 aa, Homo sapiens
MSGPRPVVLSGPSGAGKSTLLKRLLQEHSGIFGFSVSHTTRNPRPGEENGKDYYFVTREVMQRDIAAGDFIEHAEFSGNLYGTSKVAVQAVQAMNRICVLDVDLQGVRNIKATDLRPIYISVQPPSLHVLEQRLRQRNTETEESLVKRLAAAQADMESSKEPGLFDVVIINDSLDQAYAELKEALSEEIKKAQRTGA

SEQ ID NO: 48610 - protein, 197 aa, Homo sapiens; identical to SEQ ID NO: 48609

SEQ ID NO: 48611 - protein, 197 aa, Homo sapiens; identical to SEQ ID NO: 48609

SEQ ID NO: 48612 - protein, 199 aa, Homo sapiens
MSGPRPVVLSGPSGAGKSTLLKRLLQEHSGIFGFSVSRESRALVEGYHEEPEARRGERQREVMQRDIAAGDFIEHAEFSGNLYGTSKVAVQAVQAMNRICVLDVDLQGVRNIKATDLRPIYISVQPPSLHVLEQRLRQRNTETEESLVKRLAAAQADMESSKEPGLFDVVIINDSLDQAYAELKEALSEEIKKAQRTGA

SEQ ID NO: 48613 - protein, 242 aa, Homo sapiens
MSGPRPVVLSGPSGAGKSTLLKRLLQEHSGIFGFSVSHTTRNPRPGEENGKDYYFVTREVMQRDIAAGDFIEHAEFSGNLYGTSKVAVQAVQAMNRICVLDVDLQGVRNIKATDLRPIYISVQPPSLHVLRLRQRNTETEESLVKRLAAAQADMESSKEPGLFDVVIINDSLDQAYAELKEALSEVGPSLCLPGQGPRGGLGARPLLSMRPLRKSRKLKGPAPEACCLFSAPRAHTGPGQQH

SEQ ID NO: 48614 - protein, 218 aa, Homo sapiens
MLRRPLAGLAAAALGRAPPDGMSGPRPVVLSGPSGAGKSTLLKRLLQEHSGIFGFSVSHTTRNPRPGEENGKDYYFVTREVMQRDIAAGDFIEHAEFSGNLYGTSKVAVQAVQAMNRICVLDVDLQGVRNIKATDLRPIYISVQPPSLHVLEQRLRQRNTETEESLVKRLAAAQADMESSPAGLESCPTAAVRTAAGQSPACLMWSSLTTAWTRPTQS

SEQ ID NO: 48615 - protein, 197 aa, Homo sapiens; identical to SEQ ID NO: 48609

SEQ ID NO: 48616 - protein, 241 aa, Homo sapiens
MLRRPLAGLAAAALGRAPPDGMSGPRPVVLSGPSGAGKSTLLKRLLQEHSGIFGFSVSHTTRNPRPGEENGKDYYFVTREVMQRDIAAGDFIEHAEFSGNLYGTSKVAVQAVQAMNRICVLDVDLQGVRNIKATDLRPIYISVQPPSLHVLEQRLRQRNTETEESLVKRLAAAQADMESRNQESSKDRRLRLAVCSRHPGPIQDQGSSIEPPPWQAIRQLCALGQHVEWRRCCPCGWNILG

SEQ ID NO: 48617 - protein, 197 aa, Homo sapiens; identical to SEQ ID NO: 48609

SEQ ID NO: 48618 - protein, 218 aa, Homo sapiens
MLRRPLAGLAAAALGRAPPDGMSGPRPVVLSGPSGAGKSTLLKRLLQEHSGIFGFSVSHTTRNPRPGEENGKDYYFVTREVMQRDIAAGDFIEHAEFSGNLYGTSKVAVQAVQAMNRICVLDVDLQGVRNIKATDLRPIYISVQPPSLHVLEQRLRQRNTETEESLVKRLAAAQADMESSKEPGLFDVVIINDSLDQAYAELKEALSEEIKKAQRTGA

SEQ ID NO: 48619 - protein, 253 aa, Homo sapiens
MAGSQKEEIMPPQQGVPFQESGCWGSMGAQSRERSGRDHSGTWICAGGSQETFHLGAPVETTCLAGMSGPRPVVLSGPSGAGKSTLLKRLLQEHSGIFGFSVSHTTRNPRPGEENGKDYYFVTREVMQRDIAAGDFIEHAEFSGNLYGTSKVAVQAVQAMNRICVLDVDLQGVRNIKATDLRPIYISVQPPSLHVLEQRLRQRNTETEESLVKRLAAAQADMESSKEPGLFDVVIINDSLDQAYAELKEALSE

SEQ ID NO: 48620 - protein, 171 aa, Homo sapiens
MSGPRPVVLSGPSGAGKSTLLKRLLQEHSGIFGFSVSRESNTTRNPRPGEENGKDYYFVTREVMQRDIAAGDFIEHAEFSGNLYGTSKVAVQAVQAMNRICVLDVDLQGVRNIKATDLRPIYISVQPPSLHVLEQRLRQRNTETEESLVKRLAAAQADMESEIKKAQRTGA

SEQ ID NO: 48621 - protein, 272 aa, Homo sapiens
MAGSQKEEIMPPQQGVPFQESGCWGSMGAQSRERSGRDHSGTWICAGGSQETFHLGAPVETTCLAASLLTPRHVGPQACGAERAFGSWEEHPAEEAAPGAQRHLWLQRVPYHEEPEARRGERQREVMQRDIAAGDFIEHAEFSGNLYGTSKVAVQAVQAMNRICVLDVDLQGVRNIKATDLRPIYISVQPPSLHVLEQRLRQRNTETEESLVKRLAAAQADMESRNQESSKDRRLRLAVCSRHPGPIQDQGSSIEPPPWQAIRQLCALGQHV

SEQ ID NO: 48622 - protein, 217 aa, Homo sapiens
MLRRPLAGLAAAALGRAPPDGMSGPRPVVLSGPSGAGKSTLLKRLLQEHSGIFGFSVSHTTRNPRPGEENGKDYYFVTREVMQRDIAAGDFIEHAEFSGNLYGTSKVAVQAVQAMNRICVLDVDLQGVRNIKATDLRPIYISVQPPSLHVLEQRLRQRNTETEESLVKRLAAAQADMESSKEPGLFDVVIINDSLDQAYAELKEALSEEIKKAQRTG

SEQ ID NO: 48623 - protein, 304 aa, Homo sapiens
MNRAFSRKKDKTWMHTPEALSKHFIPYNAKFLGSTEVEQPKGTEVVRDAVRKLKFARHIKKSEGQKIPKVELQISIYGVKILEPKTKEVQHNCQLHRISFCADDKTDKRIFTFICKDSESNKHLCYVFDSEKCAEEITLTIGQAFDLAYRKFLESGGKDVETRKQIAGLQKRIQDLETENMELKNKVQDLENQLRITQVSAPPAGSMTPKSPSTDIFDMIPFSPISHQSSMPTRNGTQPPPVPSRSTEIKRDLFGAEPFDPFNCGAADFPPDIQSKLDEMQEGFKMGLTLEGTVFCLDPLDSRC

SEQ ID NO: 48624 - protein, 304 aa, Homo sapiens; identical to SEQ ID NO: 48623

SEQ ID NO: 48625 - protein, 304 aa, Homo sapiens; identical to SEQ ID NO: 48623

SEQ ID NO: 48626 - protein, 167 aa, Homo sapiens
MNRAFSRKKDKTWMHTPEALSKHFIPYNAKFLGSTEVEQPKGTEVVRDAVRKLKFARHIKKSEGQKIPKVELQISIYGVKILEPKTKEVQHNCQLHRISFCADDKTDKRIFTFICKDSESNKHLCYVFDSEKCVSIPDVVGWFVLFYKPGIVLLLALAKYLKMNNFL

SEQ ID NO: 48627 - protein, 304 aa, Homo sapiens; identical to SEQ ID NO: 48623

SEQ ID NO: 48628 - protein, 68 aa, Homo sapiens
MNRAFSRKKDKTWMHTPEALSKHFIPYNAKFLGSTEVEQPKGTEVVRDAVRKLKFARHIKKSEGQKIP

SEQ ID NO: 48629 - protein, 167 aa, Homo sapiens; identical to SEQ ID NO: 48626

SEQ ID NO: 48630 - protein, 194 aa, Homo sapiens
MTENSTSAPAAKPKRAKASKKSTDHPKYSDMIVAAIQAEKNRAGSSRQSIQKYIKSHYKVGENADSQIKLSIKRLVTTGVLKQTKGVGASGSFRLAKSDEPKKSVAFKKTKKEIKKVATPKKASKPKKAASKAPTKKPKATPVKKAKKKLAATPKKAKKPKTVKAKPVKASKPKKAKPVKPKAKSSAKRAGKKK

SEQ ID NO: 48631 - protein, 177 aa, Homo sapiens
MTEKSTDHPKYSDMIVAAIQAEKNRAGSSRQSIQKYIKSHYKVGENADSQIKLSIKRLVTTGVLKQTKGVGASGSFRLAKSDEPKKSVAFKKTKKEIKKVATPKKASKPKKAASKAPTKKPKATPVKKAKKKLAATPKKAKKPKTVKAKPVKASKPKKAKPVKPKAKSSAKRAGKKK

SEQ ID NO: 48632 - protein, 136 aa, Homo sapiens
MARTKQTARKSTGGKAPRKQLATKAARKSAPSTGGVKKPHRYRPGTVALREIRRYQKSTELLIRKLPFQRLVREIAQDFKTDLRFQSAAIGALQEASEAYLVGLFEDTNLCAIHAKRVTIMPKDIQLARRIRGERA

SEQ ID NO: 48633 - protein, 123 aa, Homo sapiens
MARTKQTARKSTGGKAPRKQLATKAARKSAPSTGGVKKPHRYRPGTVALREIRRYQKSTELLIRKLPFQRLVREIAQDFKTDLRFQSAAIGALQVKWWVGRLRVCIPVVYQEQFQIVACAYII

SEQ ID NO: 48634 - protein, 136 aa, Homo sapiens; identical to SEQ ID NO: 48632

SEQ ID NO: 48635 - protein, 136 aa, Homo sapiens; identical to SEQ ID NO: 48632

SEQ ID NO: 48636 - protein, 136 aa, Homo sapiens; identical to SEQ ID NO: 48632

SEQ ID NO: 48637 - protein, 348 aa, Homo sapiens
MPDELTEPGRATPARASSFLIENLLAAEAKGAGRATQGDGSREDEEEDDDDPEDEDAEQARRRRLQRRRQLLAGTGPGGEARARALLGPGALGLGPRPPPGPGPPFALGCGGAARWYPRAHGGYGGGLSPDTSDRDSPETGEEMGRAEGAWPRGPGPGAVQREAAELAARGPAAGTEEASELAEVPAAAGETRGGVGVGGGRKKKTRTVFSRSQVFQLESTFDLKRYLSSAERAGLAASLQLTETQVKIWFQNRRNKWKRQLAAELEAASLSPPGAQRLVRVPVLYHESPPAAAAAGPPATLPFPLAPAAPAPPPPLLGFSGALAYPLAAFPAAASVPFLRAQMPGLV

SEQ ID NO: 48638 - protein, 273 aa, Homo sapiens
MGSKEDAGKGCPAAGGVSSFTIQSILGGGPSEAPREPVGWPARKRSLSVSSEEEEPDDGWKAPACFCPDQHGPKEQGPKHHPPIPFPCLGTPKGSGGSGPGGLERTPFLSPSHSDFKEEKERLLPAGSPSPGSERPRDGGAERQAGAAKKKTRTVFSRSQVYQLESTFDMKRYLSSSERACLASSLQLTETQVKTWFQNRRNKWKRQLSAELEAANMAHASAQTLVSMPLVFRDSSLLRVPVPRSLAFPAPLYYPGSNLSALPLYNLYNKLDY

SEQ ID NO: 48639 - protein, 357 aa, Homo sapiens
MPEPGPDAAGTASAQPQPPPPPPPAPKESPFSIKNLLNGDHHRPPPKPQPPPRTLFAPASAAAAAAAAAAAAAKGALEGAAGFALSQVGDLAFPRFEIPAQRFALPAHYLERSPAWWYPYTLTPAGGHLPRPEASEKALLRDSSPASGTDRDSPEPLLKADPDHKELDSKSPDEIILEESDSEESKKEGEAAPGAAGASVGAAAATPGAEDWKKGAESPEKKPACRKKKTRTVFSRSQVFQLESTFDMKRYLSSSERAGLAASLHLTETQVKIWFQNRRNKWKRQLAAELEAANLSHAAAQRIVRVPILYHENSAAEGAAAAAAGAPVPVSQPLLTFPHPVYYSHPVVSSVPLLRPV

SEQ ID NO: 48640 - protein, 1134 aa, Homo sapiens
MESTPSFLKGTPTWEKTAPENGIVRQEPGSPPRDGLHHGPLCLGEPAPFWRGVLSTPDSWLPPGFPQGPKDMLPLVEGEGPQNGERKVNWLGSKEGLRWKEAMLTHPLAFCGPACPPRCGPLMPEHSGGHLKSDPVAFRPWHCPFLLETKILERAPFWVPTCLPPYLVSGLPPEHPCDWPLTPHPWVYSGGQPKVPSAFSLGSKGFYYKDPSIPRLAKEPLAAAEPGLFGLNSGGHLQRAGEAERPSLHQRDGEMGAGRQQNPCPLFLGQPDTVPWTSWPACPPGLVHTLGNVWAGPGDGNLGYQLGPPATPRCPSPEPPVTQRGCCSSYPPTKGGGLGPCGKCQEGLEGGASGASEPSEEVNKASGPRACPPSHHTKLKKTWLTRHSEQFECPRGCPEVEERPVARLRALKRAGSPEVQGAMGSPAPKRPPDPFPGTAEQGAGGWQEVRDTSIGNKDVDSGQHDEQKGPQDGQASLQDPGLQDIPCLALPAKLAQCQSCAQAAGEGGGHACHSQQVRRSPLGGELQQEEDTATNSSSEEGPGSGPDSRLSTGLAKHLLSGLGDRLCRLLRREREALAWAQREGQGPAVTEDSPGIPRCCSRCHHGLFNTHWRCPRCSHRLCVACGRVAGTGRAREKAGFQEQSAEECTQEAGHAACSLMLTQFVSSQALAELSTAMHQVWVKFDIRGHCPCQADARVWAPGDAGQQKESTQKTPPTPQPSCNGDTHRTKSIKEETPDSAETPAEDRAGRGPLPCPSLCELLASTAVKLCLGHERIHMAFAPVTPALPSDDRITNILDSIIAQVVERKIQEKALGPGLRAGPGLRKGLGLPLSPVRPRLPPPGALLWLQEPQPCPRRGFHLFQEHWRQGQPVLVSGIQRTLQGNLWGTEALGALGGQVQALSPLGPPQPSSLGSTTFWEGFSWPELRPKSDEGSVLLLHRALGDEDTSRVENLAASLPLPEYCALHGKLNLASYLPPGLALRPLEPQLWAAYGVSPHRGHLGTKNLCVEVADLVSILVHADTPLPAWHRAQKDFLSGLDGEGLWSPGSQVSTVWHVFRAQDAQRIRRFLQMVQGLVSTVSVTQHFLSPETSALSAQLCHQGPSLPPDCHLLYAQMDWAVFQAVKVAVGTLQEAK

SEQ ID NO: 48641 - protein, 1189 aa, Homo sapiens
MESTPSFLKGTPTWEKTAPENGIVRQEPGSPPRDGLHHGPLCLGEPAPFWRGVLSTPDSWLPPGFPQGPKDMLPLVEGEGPQNGERKVNWLGSKEGLRWKEAMLTHPLAFCGPACPPRCGPLMPEHSGGHLKSDPVAFRPWHCPFLLETKILERAPFWVPTCLPPYLVSGLPPEHPCDWPLTPHPWVYSGGQPKVPSAFSLGSKGFYYKDPSIPRLAKEPLAAAEPGLFGLNSGGHLQRAGEAERPSLHQRDGEMGAGRQQNPCPLFLGQPDTVPWTSWPACPPGLVHTLGNVWAGPGDGNLGYQLGPPATPRCPSPEPPVTQRGCCSSYPPTKGGGLGPCGKCQEGLEGGASGASEPSEEVNKASGPRACPPSHHTKLKKTWLTRHSEQFECPRGCPEVEERPVARLRALKRAGSPEVQGAMGSPAPKRPPDPFPGTAEQGAGGWQEVRDTSIGNKDVDSGQHDEQKGPQDGQASLQDPGLQDIPCLALPAKLAQCQSCAQAAGEGGGHACHSQQVRRSPLGGELQQEEDTATNSSSEEGPGSGPDSRLSTGLAKHLLSGLGDRLCRLLRREREALAWAQREGQGPAVTEDSPGIPRCCSRCHHGLFNTHWRCPRCSHRLCVACGRVAGTGRAREKAGFQEQSAEECTQEAGHAACSLMLTQFVSSQALAELSTAMHQVWVKFDIRGHCPCQADARVWAPGDAGQQKESTQKTPPTPQPSCNGDTHRTKSIKEETPDSAETPAEDRAGRGPLPCPSLCELLASTAVKLCLGHERIHMAFAPVTPALPSDDRITNILDSIIAQVVERKIQEKALGPGLRAGPGLRKGLGLPLSPVRPRLPPPGALLWLQEPQPCPRRGFHLFQEHWRQGQPVLVSGIQRTLQGNLWGTEALGALGGQVQALSPLGPPQPSSLGSTTFWEGFSWPELRPKSDEGSVLLLHRALGDEDTSRVENLAASLPLPEYCALHGKLNLASYLPPGLALRPLEPQLWAAYGVSPHRGHLGTKNLCVEVADLVSILVHADTPLPAWHRAQKDFLSGLDGEGLWSPGSQVSTVWHVFRAQDAQRIRRFLQMVCPAGAGALEPGAPGSCYLDAGLRRRLREEWGVSCWTLLQAPGEAVLVPAGAPHQVQGLVSTVSVTQHFLSPETSALSAQLCHQGPSLPPDCHLLYAQMDWAVFQAVKVAVGTLQEAK

SEQ ID NO: 48642 - protein, 280 aa, Homo sapiens
MPADIMEKNSSSPVAATPASVNTTPDKPKTASEHRKSSKPIMEKRRRARINESLSQLKTLILDALKKDSSRHSKLEKADILEMTVKHLRNLQRAQMTAALSTDPSVLGKYRAGFSECMNEVTRFLSTCEGVNTEVRTRLLGHLANCMTQINAMTYPGQPHPALQAPPPPPPGPGGPQHAPFAPPPPLVPIPGGAAPPPGGAPCKLGSQAGEAAKVFGGFQVVPAPDGQFAFLIPNGAFAHSGPVIPVYTSNSGTSVGPNAVSPSSGPSLTADSMWRPWRN

SEQ ID NO: 48643 - protein, 173 aa, Homo sapiens
MGLPRRAGDAAELRKSLKPLLEKRRRARINQSLSQLKGLILPLLGRENSNCSKLEKADVLEMTVRFLQELPASSWPTAAPLPCDSYREGYSACVARLARVLPACRVLEPAVSARLLEHLWRRAASATLDGGRAGDSSGPSAPAPAPASAPEPASAPVPSPPSPPCGPGLWRPW

SEQ ID NO: 48644 - protein, 76 aa, Homo sapiens
MGLPRRAGDAAELRKSLKPLLEKRRRARINQSLSQLKGLILPLLGREDASGWHTWLPLHAQNCFLLYIQAPEQPPA

SEQ ID NO: 48645 - protein, 76 aa, Homo sapiens; identical to SEQ ID NO: 48644

SEQ ID NO: 48646 - protein, 186 aa, Homo sapiens
MEKKRRARINVSLEQLKSLLEKHYSHQIRKRKLEKADILELSVKYMRSLQNSLQGLWPVPRGAEQPSGFRSCLPGVSQLLRRGDEVGSGLRCPLVPESAAGSTMDSAGLGQEAPALFRPCTPAVWAPAPAAGGPRSPPPLLLLPESLPGSSASVPPPQPASSRCAESPGLGLRVWRPWGSPGDDLN

SEQ ID NO: 48647 - protein, 221 aa, Homo sapiens
MAADTPGKPSASPMAGAPASASRTPDKPRSAAEHRKSSKPVMEKRRRARINESLAQLKTLILDALRKESSRHSKLEKADILEMTVRHLRSLRRVQVTAALSADPAVLGKYRAGFHECLAEVNRFLAGCEGVPADVRSRLLGHLAACLRQLGPSRRPASLSPAAPAEAPAPEVYAGRPLLPSLGGPFPLLAPPLLPGLTRALPAAPRAGPQGPGGPWRPWLR

SEQ ID NO: 48648 - protein, 247 aa, Homo sapiens
MAADTPGKPSASPMAGAPASASRTPDKPRSAAEHRKVGSRPGVRGATGGREGRGTQPVPDPQSSKPVMEKRRRARINESLAQLKTLILDALRKESSRHSKLEKADILEMTVRHLRSLRRVQVTAALSADPAVLGKYRAGFHECLAEVNRFLAGCEGVPADVRSRLLGHLAACLRQLGPSRRPASLSPAAPAEAPAPEVYAGRPLLPSLGGPFPLLAPPLLPGLTRALPAAPRAGPQGPGGPWRPWLR

SEQ ID NO: 48649 - protein, 166 aa, Homo sapiens
MAPSTVAVELLSPKEKNRLRKPVVEKMRRDRINSSIEQLKLLLEQEFARHQPNSKLEKADILEMAVSYLKHSKAFVAAAGPKSLHQDYSEGYSWCLQEAVQFLTLHAASDTQMKLLYHFQRPPAAPAAPAKEPKAPGAAPPPALSAKATAAAAAAHQPACGLWRPW

SEQ ID NO: 48650 - protein, 224 aa, Homo sapiens
MAPPAAPGRDRVGREDEDGWETRGDRKARKPLVEKKRRARINESLQELRLLLAGAEVQAKLENAEVLELTVRRVQGVLRGRAREREQLQAEASERFAAGYIQCMHEVHTFVSTCQAIDATVAAELLNHLLESMPLREGSSFQDLLGDALAGPPRAPGRSGWPAGGAPGSPIPSPPGPGDDLCSDLEEAPEAELSQAPAEGPDLVPAALGSLTTAQIARSVWRPW

SEQ ID NO: 48651 - protein, 214 aa, Homo sapiens
MAPPAAPGRDRVGREDEDGWETRGDRKARKPLVEKKRRARINESLQELRLLLAGAEVQAKLENAEVLELTVRRVQGVLRGRARGEWRRGGRGRRPRAPVTPARRRTSLPAPLSCRRRGLPPEQGAPPRLLGEPRPRGPGGLGHAVAAHRAGRGSLPPTLGPRARAAAGGSERALRCRLHPVHARGAHVRVHVPGHRRYRRCRAPEPSARVHAAA

SEQ ID NO: 48652 - protein, 222 aa, Homo sapiens
MAPPAAPGRDRVGREDEDGWETRGDRKARKPLVEKKRRARINESLQELRLLLAGAEAKLENAEVLELTVRRVQGVLRGRAREREQLQAEASERFAAGYIQCMHEVHTFVSTCQAIDATVAAELLNHLLESMPLREGSSFQDLLGDALAGPPRAPGRSGWPAGGAPGSPIPSPPGPGDDLCSDLEEAPEAELSQAPAEGPDLVPAALGSLTTAQIARSVWRPW

SEQ ID NO: 48653 - protein, 225 aa, Homo sapiens
MVTRDRAENRDGPKMLKPLVEKRRRDRINRSLEELRLLLLERTRDQNLRNPKLEKAEILEFAVGYLRERSRVEPPGVPRSPVQDAEALASCYLSGFRECLLRLAAFAHDASPAARAQLFSALHGYLRPKPPRPKPVDPRPPAPRPSLDPAAPALGPALHQRPPVHQGHPSPRCAWSPSLCSPRAGDSGAPAPLTGLLPPPPPPHRQDGAPKAPLPPPPAFWRPWP

SEQ ID NO: 48654 - protein, 230 aa, Homo sapiens
MVTRDRAENRDGPKMLKPLVEKRRRDRINRSLEELRLLLLERTRDQNLRNPKLEKAEILEFAVGYLRERSRVEPPAAAAPGVPRSPVQDAEALASCYLSGFRECLLRLAAFAHDASPAARAQLFSALHGYLRPKPPRPKPVDPRPPAPRPSLDPAAPALGPALHQRPPVHQGHPSPRCAWSPSLCSPRAGDSGAPAPLTGLLPPPPPPHRQDGAPKAPLPPPPAFWRPWP

SEQ ID NO: 48655 - protein, 337 aa, Homo sapiens
MKRPCEETTSESDMDETIDVGSENNYSGQSTSSVIRLNSPTTTSQIMARKKRRGIIEKRRRDRINNSLSELRRLVPTAFEKQGSAKLEKAEILQMTVDHLKMLQATGGKGYFDAHALAMDFMSIGFRECLTEVARYLSSVEGLDSSDPLRVRLVSHLSTCATQREAAAMTSSMAHHHHPLHPHHWAAAFHHLPAALLQPNGLHASESTPCRLSTTSEVPPAHGSALLTATFAHADSALRMPSTGSVAPCVPPLSTSLLSLSATVHAAAAAATAAAHSFPLSFAGAFPMLPPNAAAAVAAATAISPPLSVSATSSPQQTSSGTNNKPYRPWGTEVGAF

SEQ ID NO: 48656 - protein, 291 aa, Homo sapiens
MARKKRRGIIEKRRRDRINNSLSELRRLVPTAFEKQGSAKLEKAEILQMTVDHLKMLQATGGKGYFDAHALAMDFMSIGFRECLTEVARYLSSVEGLDSSDPLRVRLVSHLSTCATQREAAAMTSSMAHHHHPLHPHHWAAAFHHLPAALLQPNGLHASESTPCRLSTTSEVPPAHGSALLTATFAHADSALRMPSTGSVAPCVPPLSTSLLSLSATVHAAAAAATAAAHSFPLSFAGAFPMLPPNAAAAVAAATAISPPLSVSATSSPQQTSSGTNNKPYRPWGTEVGAF

SEQ ID NO: 48657 - protein, 406 aa, Homo sapiens
MSALGAVIALLLWGQLFAVDSGNDVTDIADDGCPKPPEIAHGYVEHSVRYQCKNYYKLRTEGDGVYTLNDKKQWINKAVGDKLPECEADDGCPKPPEIAHGYVEHSVRYQCKNYYKLRTEGDGVYTLNNEKQWINKAVGDKLPECEAVCGKPKNPANPVQRILGGHLDAKGSFPWQAKMVSHHNLTTGATLINEQWLLTTAKNLFLNHSENATAKDIAPTLTLYVGKKQLVEIEKVVLHPNYSQVDIGLIKLKQKVSVNERVMPICLPSKDYAEVGRVGYVSGWGRNANFKFTDHLKYVMLPVADQDQCIRHYEGSTVPEKKTPKSPVGVQPILNEHTFCAGMSKYQEDTCYGDAGSAFAVHDLEEDTWYATGILSFDKSCAVAEYGVYVKVTSIQDWVQKTIAEN

SEQ ID NO: 48658 - protein, 382 aa, Homo sapiens
VYACVCVCVYMHVCVDACMCCEAGRLAFHSSLSSLCSALGAVIALLLWGQLFAVDSGNDVTDIADDGCPKPPEIAHGYVEHSVRYQCKNYYKLRTEGDGVYTLNDKKQWINKAVGDKLPECEAVCGKPKNPANPVQRILGGHLDAKGSFPWQAKMVSHHNLTTGATLINEQWLLTTAKNLFLNHSENATAKDIAPTLTLYVGKKQLVEIEKVVLHPNYSQVDIGLIKLKQKVSVNERVMPICLPSKDYAEVGRVGYVSGWGRNANFKFTDHLKYVMLPVADQDQCIRHYEGSTVPEKKTPKSPVGVQPILNEHTFCAGMSKYQEDTCYGDAGSAFAVHDLEEDTWYATGILSFDKSCAVAEYGVYVKVTSIQDWVQKTIAEN

SEQ ID NO: 48659 - protein, 347 aa, Homo sapiens
MSALGAVIALLLWGQLFAVDSGNDVTDIADDGCPKPPEIAHGYVEHSVRYQCKNYYKLRTEGDGVYTLNNEKQWINKAVGDKLPECEAVCGKPKNPANPVQRILGGHLDAKGSFPWQAKMVSHHNLTTGATLINEQWLLTTAKNLFLNHSENATAKDIAPTLTLYVGKKQLVEIEKVVLHPNYSQVDIGLIKLKQKVSVNERVMPICLPSKDYAEVGRVGYVSGWGRNANFKFTDHLKYVMLPVADQDQCIRHYEGSTVPEKKTPKSPVGVQPILNEHTFCAGMSKYQEDTCYGDAGSAFAVHDLEEDTWYATGILSFDKSCAVAEYGVYVKVTSIQDWVQKTIAEN

SEQ ID NO: 48660 - protein, 281 aa, Homo sapiens
MSRISQMTAARSPPRLHMAMWSTRFATSVRTNPVQRILGGHLDAKGSFPWQAKMVSHHNLTTGATLINEQWLLTTAKNLFLNHSENATAKDIAPTLTLYVGKKQLVEIEKVVLHPNYSQVDIGLIKLKQKVSVNERVMPICLPSKDYAEVGRVGYVSGWGRNANFKFTDHLKYVMLPVADQDQCIRHYEGSTVPEKKTPKSPVGVQPILNEHTFCAGMSKYQEDTCYGDAGSAFAVHDLEEDTWYATGILSFDKSCAVAEYGVYVKVTSIQDWVQKTIAEN

SEQ ID NO: 48661 - protein, 385 aa, Homo sapiens
MHVCVCVCVCVYMPVCVDACMCCEAGRPAFRSFLFSLCSDLGAVISLLLWGRQLFALYSGNDVTDISDDRFPKPPEIANGYVEHLFRYQCKNYYRLRTEGDGVYTLNDKKQWINKAVGDKLPECEAVCGKPKNPANPVQRILGGHLDAKGSFPWQAKMVSHHNLTTGATLINEQWLLTTAKNLFLNHSENATAKDIAPTLTLYVGKKQLVEIEKVVLHPNYHQVDIGLIKLKQKVLVNERVMPICLPSKNYAEVGRVGYVSGWGQSDNFKLTDHLKYVMLPVADQYDCITHYEGSTCPKWKAPKSPVGVQPILNEHTFCVGMSKYQEDTCYGDAGSAFAVHDLEEDTWYAAGILSFDKSCAVAEYGVYVKVTSIQHWVQKTIAEN

SEQ ID NO: 48662 - protein, 348 aa, Homo sapiens
MSDLGAVISLLLWGRQLFALYSGNDVTDISDDRFPKPPEIANGYVEHLFRYQCKNYYRLRTEGDGVYTLNDKKQWINKAVGDKLPECEAVCGKPKNPANPVQRILGGHLDAKGSFPWQAKMVSHHNLTTGATLINEQWLLTTAKNLFLNHSENATAKDIAPTLTLYVGKKQLVEIEKVVLHPNYHQVDIGLIKLKQKVLVNERVMPICLPSKNYAEVGRVGYVSGWGQSDNFKLTDHLKYVMLPVADQYDCITHYEGSTCPKWKAPKSPVGVQPILNEHTFCVGMSKYQEDTCYGDAGSAFAVHDLEEDTWYAAGILSFDKSCAVAEYGVYVKVTSIQHWVQKTIAEN

SEQ ID NO: 48663 - protein, 348 aa, Homo sapiens; identical to SEQ ID NO: 48662

SEQ ID NO: 48664 - protein, 204 aa, Homo sapiens
MAAANPWDPASAPNGAGLVLGHFIASGMVNQKNLEIELLKLEKDTADVVHPFFLAQKCHTLQSMNNHLEAVLKEKRSLRQRLLKPMCQENLPIEAVYHRYMVHLLELAVTFIERLETHLETIRNIPHLAANLKKMNQALAKMDILVTETEELAENILKWRKQQNEVSSCIPKILAEESYLYKHDIIMPPLPFTSKVHVQTINAK

SEQ ID NO: 48665 - protein, 278 aa, Homo sapiens
MEPQEERETQVAAWLKKIFGDHPIPQYEVNPRTTEILHHLSERNRVRDRDVYLVIEDLKQKASEYESEAKYLQDLLMESVNFSPANLSSTGSRYLNALVDSAVALETKDTSLASFIPAVNDLTSDLFRTKSKSEEIKIELEKLEKNLTATLVLEKCLQEDVKKAELHLSTERAKVDNRRQNMDFLKAKSEEFRFGIKAAEEQLSARGMDASLSHQSLVALSEKLARLKQQTIPLKKKLESYLDLMPNPSLAQVKIEEAKRELDSIEAELTRRVDMMEL

SEQ ID NO: 48666 - protein, 235 aa, Homo sapiens
MAAANPWDPASAPNGAGLVLGHFIASGMVNQEMLNMSKKTVSCFVNFTRLQQITNIQAEIYQKNLEIELLKLEKDTADVVHPFFLAQKCHTLQSMNNHLEAVLKEKRSLRQRLLKPMCQENLPIEAVYHRYMVHLLELAVTFIERLETHLETIRNIPHLAANLKKMNQALAKMDILVTETEELAENILKWRKQQNEVSSCIPKILAEESYLYKHDIIMPPLPFTSKVHVQTINAK

SEQ ID NO: 48667 - protein, 204 aa, Homo sapiens; identical to SEQ ID NO: 48664

SEQ ID NO: 48668 - protein, 603 aa, Homo sapiens
MSCGNEFVETLKKIGYPKADNLNGEDFDWLFEGVEDESFLKWFCGNVNEQNVLSERELEAFSILQKSGKPILEGAALDEALKTCKTSDLKTPRLDDKELEKLEDEVQTLLKLKNLKIQRRNKCQLMASVTSHKSLRLNAKEEEATKKLKQSQGILNAMITKISNELQALTDEVTQLMMFFRHSNLGQGTNPLVFLSQFSLEKYLSQEEQSTAALTLYTKKQFFQGIHEVVESSNEDNFQLLDIQTPSICDNQEILEERRLEMARLQLAYICAQHQLIHLKASNSSMKSSIKWAEESLHSLTSKAVDKENLDAKISSLTSEIMKLEKEVTQIKDRSLPAVVRENAQLLNMPVVKGDFDLQIAKQDYYTARQELVLNQLIKQKASFELLQLSYEIELRKHRDIYRQLENLVQELSQSNMMLYKQLEMLTDPSVSQQINPRNTIDTKDYSTHRLYQVLEGENKKKELFLTHGNLEEVAEKLKQNISLVQDQLAVSAQEHSFFLSKRNKDVDMLCDTLYQGGNQLLLSDQELTEQFHKVESQLNKLNHLLTDILADVKTKRKTLANNKLHQMEREFYVYFLKDEDYLKDIVENLETQSKIKAVSLED

SEQ ID NO: 48669 - protein, 603 aa, Homo sapiens; identical to SEQ ID NO: 48668

SEQ ID NO: 48670 - protein, 10 aa, Homo sapiens
MSCGNEFVET

SEQ ID NO: 48671 - protein, 33 aa, Homo sapiens
MSCGNEFVETLKKIGYPKADNLNGEDFDWLFEG

SEQ ID NO: 48672 - protein, 363 aa, Homo sapiens
MASGDFCSPGEGMEILQQVCSKQLPPCNLSKEDLLQNPYFSKLLLNLSQHVDESGLSLTLAKEQAQAWKEVRLHKTTWLRSEILHRVIQELLVDYYVKIQDTNVTSEDKKFHETLEQRLLVTELMRLLGPSQEREIPPLLGLEKADLLELMPLSEDFVWMRARLQQEVEEQLKKKCFTLLCYYDPNSDADSETVKAAKVWKLAEVLVGEQQQCQDAKSQQKEQMLLLEKKSAAYSQVLLRCLTLLQRLLQEHRLKTQSELDRINAQYLEVKCGAMILKLRMEELKILSDTYTVEKVEVHRLIRDRLEGAIHLQEQDMENSRQVLNSYEVLGEEFDRLVKEYTVLKQATENKRWALQEFSKVYR

SEQ ID NO: 48673 - protein, 318 aa, Homo sapiens
MASGDFCSPGEGMEILQQVCSKQLPPCNLSKEDLLQNPYFSKLLLNLSQHVDESGLSLTLAKEQAQAWKEVRLHKTTWLRSEILHRVIQELLVDYYVKIQDTNVTSEDKKDFVWMRARLQQEVEEQLKKKCFTLLCYYDPNSDADSETVKAAKVWKLAEVLVGEQQQCQDAKSQQKEQMLLLEKKSAAYSQVLLRCLTLLQRLLQEHRLKTQSELDRINAQYLEVKCGAMILKLRMEELKILSDTYTVEKVEVHRLIRDRLEGAIHLQEQDMENSRQVLNSYEVLGEEFDRLVKEYTVLKQATENKRWALQEFSKVYR

SEQ ID NO: 48674 - protein, 237 aa, Homo sapiens
MASGDFCSPGEGMEILQQVCSKQLPPCNLSKEDLLQNPYFSKLLLNLSQHVDESGLSLTLAKEQAQAWKEVRLHKTTWLRSEILHRVIQELLVDYYVKIQDTNVTSEDKKVLLRCLTLLQRLLQEHRLKTQSELDRINAQYLEVKCGAMILKLRMEELKILSDTYTVEKVEVHRLIRDRLEGAIHLQEQDMENSRQVLNSYEVLGEEFDRLVKEYTVLKQATENKRWALQEFSKVYR

SEQ ID NO: 48675 - protein, 237 aa, Homo sapiens; identical to SEQ ID NO: 48674

SEQ ID NO: 48676 - protein, 239 aa, Homo sapiens
MRLLGPSQEREIPPLLGLEKADLLELMPLSEDFVWMRARLQQEVEEQLKKKCFTLLCYYDPNSDADSETVKAAKVWKLAEVLVGEQQQCQDAKSQQKEQMLLLEKKSAAYSQVLLRCLTLLQRLLQEHRLKTQSELDRINAQYLEVKCGAMILKLRMEELKILSDTYTVEKVEVHRLIRDRLEGAIHLQEQDMENSRQVLNSYEVLGEEFDRLVKEYTVLKQATENKRWALQEFSKVYR

SEQ ID NO: 48677 - protein, 363 aa, Homo sapiens; identical to SEQ ID NO: 48672

SEQ ID NO: 48678 - protein, 17 aa, Homo sapiens
MRLLGPSQEREIPPLLG

SEQ ID NO: 48679 - protein, 187 aa, Homo sapiens
MASGDFCSPGEGMEILQQVCSKQLPPCNLSKEDLLQNPYFSKLLLNLSQHVDESGLSLTLAKEQAQAWKEVRLHKTTWLRSEILHRVIQELLVDYYVKIQDTNVTSEDKKFHETLEQRLLVTELMRLLGPSQEREIPPLLGLEKADLLELMPLSEDFVWMRARLQQEVEEQLKKKCFTLLCYYDPNS

SEQ ID NO: 48680 - protein, 279 aa, Homo sapiens
MASGDFCSPGEGMEILQQVCSKQLPPCNLSKEDLLQNPYFSKLLLNLSQHVDESGLSLTLAKEQAQAWKEVRLHKTTWLRSEILHRVIQELLVDYYVKIQDTNVTSEDKKFHETLEQRLLVTELMRLLGPSQEREIPPLLGLEKADLLELMPLSEDFVWMRARLQQEVEEQLKKKCFTLLCYYDPNSDADSETVKAAKVWKLAEVLVGEQQQCQDAKSQQKEQMLLLEKKSAAYSQVLLRCLTLLQRLLQEHRLKTQSELDRINAQYLEVKCGAMILKL

SEQ ID NO: 48681 - protein, 318 aa, Homo sapiens; identical to SEQ ID NO: 48673

SEQ ID NO: 48682 - protein, 318 aa, Homo sapiens; identical to SEQ ID NO: 48673

SEQ ID NO: 48683 - protein, 160 aa, Homo sapiens
MASGDFCSPGEGMEILQQVCSKQLPPCNLSKEDLLQNPYFSKLLLNLSQHVDESGLSLTLAKEQAQAWKEVRLHKTTWLRSEILHRVIQELLVDYYVKIQDTNVTSEDKKFHETLEQRLLVTELMRLLGPSQEREIPPLLGLEKADLLELMPLSEDFVWM

SEQ ID NO: 48684 - protein, 633 aa, Homo sapiens
MELAQEARELGCWAVEEMGVPVAARAPESTLRRLCLGQGADIWAYILQHVHSQRTVKKIRGNLLWYGHQDSPQVRRKLELEAAVTRLRAEIQELDQSLELMERDTEAQDTAMEQARQHTQDTQRRALLLRAQAGAMRRQQHTLRDPMQRLQNQLRRLQDMERKAKVDVTFGSLTSAALGLEPVVLRDVRTACTLRAQFLQNLLLPQAKRGSLPTPHDDHFGTSYQQWLSSVETLLTNHPPGHVLAALEHLAAEREAEIRSLCSGDGLGDTEISRPQAPDQSDSSQTLPSMVHLIQEGWRTVGVLVSQRSTLLKERQVLTQRLQGLVEEVERRVLGSSERQVLILGLRRCCLWTELKALHDQSQELQDAAGHRQLLLRELQAKQQRILHWRQLVEETQEQVRLLIKGNSASKTRLCRSPGEVLALVQRKVVPTFEAVAPQSRELLRCLEEEVRHLPHILLGTLLRHRPGELKPLPTVLPSIHQLHPASPRGSSFIALSHKLGLPPGKASELLLPAAASLRQDLLLLQDQRSLWCWDLLHMKTSLPPGLPTQELLQIQASQEKQQKENLGQALKRLEKLLKQALERIPELQGIVGDWWEQPGQAALSEELCQGLSLPQWRLRWVQAQGALQKLCS

SEQ ID NO: 48685 - protein, 290 aa, Homo sapiens
MELAQEARELGCWAVEEMGVPVAARAPESTLRRLCLGQGADIWAYILQHVHSQRTVKKIRGNLLWYGHQDSPQVRRKLELEAAVTRLRAEIQELDQSLELMERDTEAQDTAMEQARQHTQDTQRRALLLRAQAGAMRRQQHTLRDPMQRLQNQLRRLQDMERKAKVDVTFGSLTSAALGLEPVVLRDVRTACTLRAQFLQNLLLPQAKRGSLPTPHDDHFGTSYQQWLSSVETLLTNHPPGHVLAALEHLAAEREAEIRSLCSGDGLGDTEISRRAGGLWVCWSPSGAPS

SEQ ID NO: 48686 - protein, 802 aa, Homo sapiens
MKYIKSNSKNSSHHFVETFNIKPQDLHKCIARCHFARSRFLQILQRQDCVTQKYQENAQLSVKQVRNLRSECIGLENQIKKMEPYDDHSNMEEKIQKVRSLWASVNETLMFLEKEREVVSSVLSLVNQYALDGTNVAINIPRLLLDKIEKQMFQLHIGNVYEAGKLNLLTVIQLLNEVLKVMKYERCQADQARLTVDLHYLEKETKFQKERLSDLKHMRYRIKDDLTTIRHSVVEKQGEWHKKWKEFLGLSPFSLIKGWTPSVDLLPPMSPLSFDPASEEVYAKSILCQYPASLPDAHKQHNQENGCRGDSDTLGALHDLANSPASFLSQSVSSSDRNSVTVLEKDTKMGTPKEKNEAISKKIPEFEVENSPLSDVAKNTESSAFGGSLPAKKSDPFQKEQDHLVEEVARAVLSDSPQLSEGKEIKLEELIDSLGSNPFLTRNQIPRTPENLITEIRSSWRKAIEMEENRTKEPIQMDAEHREVLPESLPVLHNQREFSMADFLLETTVSDFGQSHLTEEKVISDCECVPQKHVLTSHIDEPPTQNQSDLLNKKVICKQDLECLAFTKLSETSRMETFSPAVGNRIDVMGGSEEEFMKILDHLEVSCNKPSTNKTMLWNSFQISSGISSKSFKDNDFGILHETLPEEVGHLSFNSSSSSEANFKLEPNSPMHGGTLLEDVVGGRQTTPESDFNLQALRSRYEALKKSLSKKREESYLSNSQTPERHKPELSPTPQNVQTDDTLNFLDTCDLHTEHIKPSLRTSIGERKRSLSPLIKFSPVEQRLRTTIACSLGELPNLKGKV

SEQ ID NO: 48687 - protein, 955 aa, Homo sapiens
MSSASVTAFEKEHLWMYLQALGFEPGPATIACGKIVSHTHLGVNMFDKLNRDAFHIISYFLFQVLDQSLTKEVFKFCWPPFDQKSDTEFRKHCCEWIKRISGECGSSFPQVVGSLFLSPGGPKFIHLMYHFARFVAMKYIKSNSKNSSHHFVETFNIKPQDLHKCIARCHFARSRFLQILQRQDCVTQKYQENAQLSVKQVRNLRSECIGLENQIKKMEPYDDHSNMEEKIQKVRSLWASVNETLMFLEKEREVVSSVLSLVNQYALDGTNVAINIPRLLLDKIEKQMFQLHIGNVYEAGKLNLLTVIQLLNEVLKVMKYERCQADQARLTVDLHYLEKETKFQKERLSDLKHMRYRIKDDLTTIRHSVVEKQGEWHKKWKEFLGLSPFSLIKGWTPSVDLLPPMSPLSFDPASEEVYAKSILCQYPASLPDAHKQHNQENGCRGDSDTLGALHDLANSPASFLSQSVSSSDRNSVTVLEKDTKMGTPKEKNEAISKKIPEFEVENSPLSDVAKNTESSAFGGSLPAKKSDPFQKEQDHLVEEVARAVLSDSPQLSEGKEIKLEELIDSLGSNPFLTRNQIPRTPENLITEIRSSWRKAIEMEENRTKEPIQMDAEHREVLPESLPVLHNQREFSMADFLLETTVSDFGQSHLTEEKVISDCECVPQKHVLTSHIDEPPTQNQSDLLNKKVICKQDLECLAFTKLSETSRMETFSPAVGNRIDVMGGSEEEFMKILDHLEVSCNKPSTNKTMLWNSFQISSGISSKSFKDNDFGILHETLPEEVGHLSFNSSSSSEANFKLEPNSPMHGGTLLEDVVGGRQTTPESDFNLQALRSRYEALKKSLSKKREESYLSNSQTPERHKPELSPTPQNVQTDDTLNFLDTCDLHTEHIKPSLRTSIGERKRSLSPLIKFSPVEQRLRTTIACSLGELPNLKEEDILNKSLDAKEPPSDLTR

SEQ ID NO: 48688 - protein, 183 aa, Homo sapiens
MGTPKEKNEAISKKIPEFEVENSPLSDVAKNTESSAFGGSLPAKKSDPFQKEQDHLVEEVARAVLSDSPQLSEGKEIKLEELIDSLGSNPFLTRNQIPRTPENLITEIRSSWRKAIEMEENRTKEPIQMDAEHREVLPESLPVLHNQREFSMADFLLETTVSDFGQSHLTEEKVISDCECVPQ

SEQ ID NO: 48689 - protein, 358 aa, Homo sapiens
MAGQDAGCGRGGDDYSEDEGDSSVSRAAVEVFGKLKDLNCPFLEGLYITEPKTIQELLCSPSEYRLEILEWMCTRVWPSLQDRFSSLKGVPTEVKIQEMTKLGHELMLCAPDDQELLKGCACAQKQLHFMDQLLDTIRSLTIGCSSCSSLMEHFEDTREKNEALLGELFSSPHLQMLLNPECDPWPLDMQPLLNKQSDDWQWASASAKSEEEEKLAELARQLQESAAKLHALRTEYFAQHEQGAAAGAADISTLDQKLRLVTSDFHQLILAFLQVYDDELGECCQRPGPDLHPCGPIIQATHQNLTSYSQLLQVVMAVADTSAKAVETVKKQQGEQICWGGSSSVMSLATKMNELMEK

SEQ ID NO: 48690 - protein, 427 aa, Homo sapiens
MGGARLGARNMAGQDAGCGRGGDDYSEDEGDSSVSRAAVEVFGKLKDLNCPFLEGLYITEPKTIQELLCSPSEYRLEILEWMCTRVWPSLQDRFSSLKGVPTEVKIQEMTKLGHELMLCAPDDQELLKGCACAQKQLHFMDQLLDTIRSLTIGCSSCSSLMEHFEDTREKNEALLGELFSSPHLQMLLNPECDPWPLDMQPLLNKQSDDWQWASASAKSEEEEKLAELARQLQESAAKLHALRTEYFAQHEQGAAAGAADISTLDQKLRLVTSDFHQLILAFLQVYDDELGECCQRPGPDLHPCGPIIQATHQNLTSYSQIPRGQPKKPALVTMTTVPTCATLPLAQGFRDVHFGFLSERLRAFQPLTGWSCETPRSGMLLQVVMAVADTSAKAVETVKKQQGEQICWGGSSSVMSLATKMNELMEK

SEQ ID NO: 48691 - protein, 368 aa, Homo sapiens
MGGARLGARNMAGQDAGCGRGGDDYSEDEGDSSVSRAAVEVFGKLKDLNCPFLEGLYITEPKTIQELLCSPSEYRLEILEWMCTRVWPSLQDRFSSLKGVPTEVKIQEMTKLGHELMLCAPDDQELLKGCACAQKQLHFMDQLLDTIRSLTIGCSSCSSLMEHFEDTREKNEALLGELFSSPHLQMLLNPECDPWPLDMQPLLNKQSDDWQWASASAKSEEEEKLAELARQLQESAAKLHALRTEYFAQHEQGAAAGAADISTLDQKLRLVTSDFHQLILAFLQVYDDELGECCQRPGPDLHPCGPIIQATHQNLTSYSQLLQVVMAVADTSAKAVETVKKQQGEQICWGGSSSVMSLATKMNELMEK

SEQ ID NO: 48692 - protein, 136 aa, Homo sapiens
MDQLLDTIRSLTIGCSSCSSLMEHFEDTREKNEALLGELFSSPHLQMLLNPECDPWPLDMQPLLNKQSDDWQWASASAKSEEEEKLAELARQLQESAAKLHALRTESTTTSWASAASAQALTSTRAAPSSRPRTRI

SEQ ID NO: 48693 - protein, 171 aa, Homo sapiens
MVKRRRSPALGEERFSPSSILHPRLPLVLLGTRVPLSGGGPGEPDQGRSAPSWKSLASTHHHSRPAAGATPARPATQSQLGPFAPPLPGVRPAPFPAVEVFGKLKDLNCPFLEGLYITEPKTIQELLCSPSEYRLEILEWMCTRVWPSLQDRFSSLKGVPTEVKIQGLLAG

SEQ ID NO: 48694 - protein, 410 aa, Homo sapiens
MADSSGRGAGKPATGPTNSSSAKKKDKRVQGGRVIESRYLQYEKKTTQKAPAGDGSQTRGKMSEGGRKSSLLQKSKADSSGVGKGDLQSTLLEGHGTAPPDLDLSAINDKSIVKKTPQLAKTISKKPESTSFSAPRKKSPDLSEAMEMMESQTLLLTLLSVKMENNLAEFERRAEKNLLIMCKEKEKLQKKAHELKRRLLLSQRKRELADVLDAQIEMLSPFEAVATRFKEQYRTFATALDTTRHELPVRSIHLEGDGQQLLDALQHELVTTQRLLGELDVGDSEENVQVLDLLSELKDVTAKKDLELRRSFAQVLELSAEASKEAALANQEVWEETQGMAPPSRWYFNQDSACRESGGAPKNTPLSEDDNPGASSAPAQATFISPSEDFSSSSQAEVPPSLSRSGRDLS

SEQ ID NO: 48695 - protein, 409 aa, Homo sapiens
MADSSGRGAGKPATGPTNSSSAKKKDKRVQGGRVIESRYLQYEKKTTQKAPAGDGSQTRGKMSEGGRKSSLLQKSKDSSGVGKGDLQSTLLEGHGTAPPDLDLSAINDKSIVKKTPQLAKTISKKPESTSFSAPRKKSPDLSEAMEMMESQTLLLTLLSVKMENNLAEFERRAEKNLLIMCKEKEKLQKKAHELKRRLLLSQRKRELADVLDAQIEMLSPFEAVATRFKEQYRTFATALDTTRHELPVRSIHLEGDGQQLLDALQHELVTTQRLLGELDVGDSEENVQVLDLLSELKDVTAKKDLELRRSFAQVLELSAEASKEAALANQEVWEETQGMAPPSRWYFNQDSACRESGGAPKNTPLSEDDNPGASSAPAQATFISPSEDFSSSSQAEVPPSLSRSGRDLS

SEQ ID NO: 48696 - protein, 632 aa, Homo sapiens
MARHRNVRGYNYDEDFEDDDLYGQSVEDDYCISPSTAAQFIYSRRDKPSVEPVEEYDYEDLKESSNSVSNHQLSGFDQARLYSCLDHMREVLGDAVPDEILIEAVLKNKFDVQKALSGVLEQDRVQSLKDKNEATVSTGKIAKGVLFSSSEVSADNVQSSYPQSANHLDYSSKPFDFASSVGKYGLSHNSSVPTHCLLHRKKKLDTRKSEKKLESCKLTKELSLANLIHDMSRDSCESQPSVRLSSTDSLESLLSKNLDADLLRPHASECISKDDSAFKEIPDLKTIIIKGTTPNNSLYIQNNSLSDFQNIPVQDSLGSSNNPLYLTSSLENMTVDNLNASKETEVGNVSLVEQSAKNHTFKNDNLQFSQCESPSLTELFQEHKENNISQCFTLSDLCNQSSASFTDLSLGSFPLSQLANRCQSSPGISELTGSLSSLAFHKASPTRDLENLSLSELIAETIDVDNSQIKKESFEVSLSEVRSPGIDSNIDLSVLIKNPDFVPKPVVDPSIAPSSRTKVLSSKLGKNSNFAKDNKKNNKGSLTRKPPFSLSWTKALAARPSAFASTLCLRYPLKSCKRRTLDLYKTFLYSRQVQDVKDKEISPLVAITPFDFKSASPDDIVKANQKKAFTRE

SEQ ID NO: 48697 - protein, 520 aa, Homo sapiens
MTVSGKKQTMGFEVPGVSSEENGHSFHTPQKGPPIEDAIASSDVLETASKSANPPHTIQASEEQSSTPAPVKKSGKLRQQIDVKAELEKRQGGKQLLNLVVIGHVDAGKSTLMGHMLYLLGNINKRTMHKYEQESKKAGKASFAYAWVLDETGEERERGVTMDVGMTKFETTTKVITLMDAPGHKDFIPNMITGAAQADVAVLVVDASRGEFEAGFETGGQTREHGLLVRSLGVTQLAVAVNKMDQVNWQQERFQEITGKLGHFLKQAGFKESDVGFIPTSGLSGENLITRSQSSELTKWYKGLCLLEQIDSFKPPQRSIDKPFRLCVSDVFKDQGSGFCITGKIEAGYIQTGDRLLAMPPNETCTVKGITLHDEPVDWAAAGDHVSLTLVGMDIIKINVGCIFCGPKVPIKACTRFRARILIFNIEIPITKGFPVLLHYQTVSEPAVIKRLISVLNKSTGEVTKKKPKFLTKGQNALVELQTQRPIALELYKDFKELGRFMLRYGGSTIAAGVVTEIKE

SEQ ID NO: 48698 - protein, 642 aa, Homo sapiens
MARHRNVRGYNYDEDFEDDDLYGQSVEDDYCISPSTARLYSCLDHMREVLGDAVPDEILIEAVLKNKFDVQKALSGVLEQDRVQSLKDKNEATVSTGKIAKGKPVDSQTSRSESEIVPKVAKMTVSGKKQTMGFEVPGVSSEENGHSFHTPQKGPPIEDAIASSDVLETASKSANPPHTIQASEEQSSTPAPVKKSGKLRQQIDVKAELEKRQGGKQLLNLVVIGHVDAGKSTLMGHMLYLLGNINKRTMHKYEQESKKAGKASFAYAWVLDETGEERERGVTMDVGMTKFETTTKVITLMDAPGHKDFIPNMITGAAQADVAVLVVDASRGEFEAGFETGGQTREHGLLVRSLGVTQLAVAVNKMDQVNWQQERFQEITGKLGHFLKQAGFKESDVGFIPTSGLSGENLITRSQSSELTKWYKGLCLLEQIDSFKPPQRSIDKPFRLCVSDVFKDQGSGFCITGKIEAGYIQTGDRLLAMPPNETCTVKGITLHDEPVDWAAAGDHVSLTLVGMDIIKINVGCIFCGPKVPIKACTRFRARILIFNIEIPITKGFPVLLHYQTVSEPAVIKRLISVLNKSTGEVTKKKPKFLTKGQNALVELQTQRPIALELYKDFKELGRFMLRYGGSTIAAGVVTEIKE

SEQ ID NO: 48699 - protein, 684 aa, Homo sapiens
MARHRNVRGYNYDEDFEDDDLYGQSVEDDYCISPSTAAQFIYSRRDKPSVEPVEEYDYEDLKESSNSVSNHQLSGFDQARLYSCLDHMREVLGDAVPDEILIEAVLKNKFDVQKALSGVLEQDRVQSLKDKNEATVSTGKIAKGKPVDSQTSRSESEIVPKVAKMTVSGKKQTMGFEVPGVSSEENGHSFHTPQKGPPIEDAIASSDVLETASKSANPPHTIQASEEQSSTPAPVKKSGKLRQQIDVKAELEKRQGGKQLLNLVVIGHVDAGKSTLMGHMLYLLGNINKRTMHKYEQESKKAGKASFAYAWVLDETGEERERGVTMDVGMTKFETTTKVITLMDAPGHKDFIPNMITGAAQADVAVLVVDASRGEFEAGFETGGQTREHGLLVRSLGVTQLAVAVNKMDQVNWQQERFQEITGKLGHFLKQAGFKESDVGFIPTSGLSGENLITRSQSSELTKWYKGLCLLEQIDSFKPPQRSIDKPFRLCVSDVFKDQGSGFCITGKIEAGYIQTGDRLLAMPPNETCTVKGITLHDEPVDWAAAGDHVSLTLVGMDIIKINVGCIFCGPKVPIKACTRFRARILIFNIEIPITKGFPVLLHYQTVSEPAVIKRLISVLNKSTGEVTKKKPKFLTKGQNALVELQTQRPIALELYKDFKELGRFMLRYGGSTIAAGVVTEIKE

SEQ ID NO: 48700 - protein, 408 aa, Homo sapiens
MGHMLYLLGNINKRTMHKYEQESKKAGKASFAYAWVLDETGEERERGVTMDVGMTKFETTTKVITLMDAPGHKDFIPNMITGAAQADVAVLVVDASRGEFEAGFETGGQTREHGLLVRSLGVTQLAVAVNKMDQVNWQQERFQEITGKLGHFLKQAGFKESDVGFIPTSGLSGENLITRSQSSELTKWYKGLCLLEQIDSFKPPQRSIDKPFRLCVSDVFKDQGSGFCITGKIEAGYIQTGDRLLAMPPNETCTVKGITLHDEPVDWAAAGDHVSLTLVGMDIIKINVGCIFCGPKVPIKACTRFRARILIFNIEIPITKGFPVLLHYQTVSEPAVIKRLISVLNKSTGEVTKKKPKFLTKGQNALVELQTQRPIALELYKDFKELGRFMLRYGGSTIAAGVVTEIKE

SEQ ID NO: 48701 - protein, 279 aa, Homo sapiens
MSLFDLFRGFFGFPGPRSHRDPFFGGMTRDEDDDEEEEEEGGSWGRGNPRFHSPQHPPEEFGFGFSFSPGGGIRFHDNFGFDDLVRDFNSIFSDMGAWTLPSHPPELPGPESETPGERLREGQTLRDSMLKYPDSHQPRIFGGVLESDARSESPQPAPDWGSQRPFHRFDDVWPMDPHPRTREDNDLDSQVSQEGLGPVLQPQPKSYFKSISVTKITKPDGIVEERRTVVDSEGRTETTVTRHEADSSPRGDPESPRPPALDDAFSILDLFLGRWFRSR

SEQ ID NO: 48702 - protein, 231 aa, Homo sapiens
MSLFDLFRGFFGFPGPRSFSPGGGIRFHDNFGFDDLVRDFNSIFSDMGAWTLPSHPPELPGPESETPGERLREGQTLRDSMLKYPDSHQPRIFGGVLESDARSESPQPAPDWGSQRPFHRFDDVWPMDPHPRTREDNDLDSQVSQEGLGPVLQPQPKSYFKSISVTKITKPDGIVEERRTVVDSEGRTETTVTRHEADSSPRGDPESPRPPALDDAFSILDLFLGRWFRSR

SEQ ID NO: 48703 - protein, 287 aa, Homo sapiens
MSLFDLFRGFFGFPGPRSHRDPFFGGMTRDEDDDEEEEEEGGSWGRGNPRFHSPQHPPEEFGFGFSFSPGGGIRFHDNFGFDDLVRDFNSIFSDMGAWTLPSHPPANTCHLSAELPGPESETPGERLREGQTLRDSMLKYPDSHQPRIFGGVLESDARSESPQPAPDWGSQRPFHRFDDVWPMDPHPRTREDNDLDSQVSQEGLGPVLQPQPKSYFKSISVTKITKPDGIVEERRTVVDSEGRTETTVTRHEADSSPRGDPESPRPPALDDAFSILDLFLGRWFRSR

SEQ ID NO: 48704 - protein, 392 aa, Homo sapiens
MQSPAVLVTSRRLQNAHTGLDLTVPQHQEVRGKMMSGHVEYQILVVTRLAAFKSAKHRPEDVVQFLVSKKYSEIEEFYQKLSSRYAAASLPPLPRKVLFVGESDIRERRAVFNEILRCVSKDAELAGSPELLEFLGTRSPGAAGLTSRDSSVLDGTDSQTGNDEEAFDFFEEQDQVAEEGPPVQSLKGEDAEESLEEEEALDPLGIMRSKKPKKHPKVAVKAKPSPRLTIFDEEVDPDEGLFGPGRKLSPQDPSEDVSSVDPLKLFDDPDLGGAIPLGDSLLLPAACESGGPTPSLSHRDASKELFRVEEDLDQILNLGAEPKPKPQLKPKPPVAAKPVIPRKPAVPPKAGPAEAVAGQQKPQEQIQAMDEMDILQYIQDHDTPAQAAPSLF

SEQ ID NO: 48705 - protein, 217 aa, Homo sapiens
MSLVGGFPHHPVVHHEGYPFAAAAAAAAAAAASRCSHEENPYFHGWLIGHPEMSPPDYSMALSYSPEYASGAAGLDHSHYGGVPPGAGPPGLGGPRPVKRRGTANRKERRRTQSINSAFAELRECIPNVPADTKLSKIKTLRLATSYIAYLMDLLAKDDQNGEAEAFKAEIKKTDVKEEKRKKELNEILKSTVSSNDKKTKGRTGWPQHVWALELKQ

SEQ ID NO: 48706 - protein, 186 aa, Homo sapiens
MSLVGGFPHHPVVHHEGYPFAAAAAAAAAAAASRCSHEENPYFHGWLIGHPEMSPPDYSMALSYSPEYASGTANRKERRRTQSINSAFAELRECIPNVPADTKLSKIKTLRLATSYIAYLMDLLAKDDQNGEAEAFKAEIKKTDVKEEKRKKELNEILKSTVSSNDKKTKGRTGWPQHVWALELKQ

SEQ ID NO: 48707 - protein, 165 aa, Homo sapiens
MSPPDYSMALSYSPEYASGAAGLDHSHYGGVPPGAGPPGLGGPRPVKRRGTANRKERRRTQSINSAFAELRECIPNVPADTKLSKIKTLRLATSYIAYLMDLLAKDDQNGEAEAFKAEIKKTDVKEEKRKKELNEILKSTVSSNDKKTKGRTGWPQHVWALELKQ

SEQ ID NO: 48708 - protein, 858 aa, Homo sapiens
MSVVGLDVGSQSCYIAVARAGGIETIANEFSDRCTPSVISFGSKNRTIGVAAKNQQITHANNTVSNFKRFHGRAFNDPFIQKEKENLSYDLVPLKNGGVGIKVMYMGEEHLFSVEQITAMLLTKLKETAENSLKKPVTDCVISVPSFFTDAERRSVLDAAQIVGLNCLRLMNDMTAVALNYGIYKQDLPSLDEKPRIVVFVDMGHSAFQVSACAFNKGKLKVLGTAFDPFLGGKNFDEKLVEHFCAEFKTKYKLDAKSKIRALLRLYQECEKLKKLMSSNSTDLPLNIECFMNDKDVSGKMNRSQFEELCAELLQKIEVPLYSLLEQTHLKVEDVSAVEIVGGATRIPAVKERIAKFFGKDISTTLNADEAVARGCALQCAILSPAFKVREFSVTDAVPFPISLIWNHDSEDTEGVHEVFSRNHAAPFSKVLTFLRRGPFELEAFYSDPQGVPYPEAKIGRFVVQNVSAQKDGEKSRVKVKVRVNTHGIFTISTASMVEKVPTEENEMSSEADMECLNQRPPENPDTDKNVQQDNSEAGTQPQVQTDAQQTSQSPPSPELTSEENKIPDADKANEKKVDQPPEAKKPKIKVVNVELPIEANLVWQLGKDLLNMYIETEGKMIMQDKLEKERNDAKNAVEEYVYEFRDKLCGPYEKFICEQDHQNFLRLLTETEDWLYEEGEDQAKQAYVDKLEELMKIGTPVKVRFQEAEERPKMFEELGQRLQHYAKIAADFRNKDEKYNHIDESEMKKVEKSVNEVMEWMNNVMNAQAKKSLDQDPVVRAQEIKTKIKELNNTCEPVVTQPKPKIESPKLERTPNGPNIDKKEEDLEDKNNFGAEPPHQNGECYPNEKNSVNMDLD

SEQ ID NO: 48709 - protein, 137 aa, Homo sapiens
MFEELGQRLQHYAKIAADFRNKDEKYNHIDESEMKKVEKSVNEVMEWMNNVMNAQAKKSLDQDPVVRAQEIKTKIKELNNTCEPVVTQPKPKIESPKLERTPNGPNIDKKEEDLEDKNNFGAEPPHQNDSCGIVNSY

SEQ ID NO: 48710 - protein, 677 aa, Homo sapiens
MYMGEEHLFSVEQITAMLLTKLKETAENSLKKPVTDCVISVLGTAFDPFLGGKNFDEKLVEHFCAEFKTKYKLDAKSKIRALLRLYQECEKLKKLMSSNSTDLPLNIECFMNDKDVSGKMNRSQFEELCAELLQKIEVPLYSLLEQTHLKVEDVSAVEIVGGATRIPAVKERIAKFFGKDISTTLNADEAVARGCALQCAILSPAFKVREFSVTDAVPFPISLIWNHDSEDTEGVHEVFSRNHAAPFSKVLTFLRRGPFELEAFYSDPQGVPYPEAKIGRFVVQNVSAQKDGEKSRVKVKVRVNTHGIFTISTASMVEKVPTEENEMSSEADMECLNQRPPENPDTDKNVQQDNSEAGTQPQVQTDAQQTSQSPPSPELTSEENKIPDADKANEKKVDQPPEAKKPKIKVVNVELPIEANLVWQLGKDLLNMYIETEGKMIMQDKLEKERNDAKNAVEEYVYEFRDKLCGPYEKFICEQDHQNFLRLLTETEDWLYEEGEDQAKQAYVDKLEELMKIGTPVKVRFQEAEERPKMFEELGQRLQHYAKIAADFRNKDEKYNHIDESEMKKVEKSVNEVMEWMNNVMNAQAKKSLDQDPVVRAQEIKTKIKELNNTCEPVVTQPKPKIESPKLERTPNGPNIDKKEEDLEDKNNFGAEPPHQNGECYPNEKNSVNMDLD

SEQ ID NO: 48711 - protein, 639 aa, Homo sapiens
MARERPCRCHGNGGRSPGTGCPLGRIFPEGSRRRKRKWHVEGPVEAPRNGQTPRAGAERGQGRKRRQEKQAGGIETIANEFSDRCTPSVISFGSKNRTIGVAAKNQQITHANNTVSNFKRFHGRAFNDPFIQKEKENLSYDLVPLKNGGVGIKVMYMGEEHLFSVEQITAMLLTKLKETAENSLKKPVTDCVISVPSFFTDAERRSVLDAAQIVGLNCLRLMNDMTAVALNYGIYKQDLPSLDEKPRIVVFVDMGHSAFQVSACAFNKGKLKVLGTAFDPFLGGKNFDEKLVEHFCAEFKTKYKLDAKSKIRALLRLYQECEKLKKLMSSNSTDLPLNIECFMNDKDVSGKMNRSQFEELCAELLQKIEVPLYSLLEQTHLKVEDVSAVEIVGGATRIPAVKERIAKFFGKDISTTLNADEAVARGCALQCAILSPAFKVREFSVTDAVPFPISLIWNHDSEDTEGVHEVFSRNHAAPFSKVLTFLRRGPFELEAFYSDPQGVPYPEAKIGRFVVQNVSAQKDGEKSRVKVKVRVNTHGIFTISTASMVEKVPTEENEMSSEADMECLNQRPPENPDTDKNVQQDNSEAGTQPQVQTDAQQTSQSPPSPELTSEENKIPDADKQMKKKLTSLQKLKSPK

SEQ ID NO: 48712 - protein, 860 aa, Homo sapiens
MATAAVLRGPAAHWVESFQKAREEGSGSGTWRGRWRRRSVISFGSKNRTIGVAAKNQQITHANNTVSNFKRFHGRAFNDPFIQKEKENLSYDLVPLKNGGVGIKVMYMGEEHLFSVEQITAMLLTKLKETAENSLKKPVTDCVISVPSFFTDAERRSVLDAAQIVGLNCLRLMNDMTAVALNYGIYKQDLPSLDEKPRIVVFVDMGHSAFQVSACAFNKGKLKVLGTAFDPFLGGKNFDEKLVEHFCAEFKTKYKLDAKSKIRALLRLYQECEKLKKLMSSNSTDLPLNIECFMNDKDVSGKMNRSQFEELCAELLQKIEVPLYSLLEQTHLKVEDVSAVEIVGGATRIPAVKERIAKFFGKDISTTLNADEAVARGCALQCAILSPAFKVREFSVTDAVPFPISLIWNHDSEDTEGVHEVFSRNHAAPFSKVLTFLRRGPFELEAFYSDPQGVPYPEAKIGRFVVQNVSAQKDGEKSRVKVKVRVNTHGIFTISTASMVEKVPTEENEMSSEADMECLNQRPPENPDTDKNVQQDNSEAGTQPQVQTDAQQTSQSPPSPELTSEENKIPDADKANEKKVDQPPEAKKPKIKVVNVELPIEANLVWQLGKDLLNMYIETEGKMIMQDKLEKERNDAKNAVEEYVYEFRDKLCGPYEKFICEQDHQNFLRLLTETEDWLYEEGEDQAKQAYVDKLEELMKIGTPVKVRFQEAEERPKMFEELGQRLQHYAKIAADFRNKDEKYNHIDESEMKKVEKSVNEVMEWMNNVMNAQAKKSLDQDPVVRAQEIKTKIKELNNTCEPVVTQPKPKIESPKLERTPNGPNIDKKEEDLEDKNNFGAEPPHQNGECYPNEKNSVNMDLD

SEQ ID NO: 48713 - protein, 102 aa, Homo sapiens
MAGQAFRKFLPLFDRVLVERSAAETVTKGGIMLPEKSQGKVLQATVVAVGSGSKGKGGEIQPVSVKVGDKVLLPEYGGTKVVLDDKDYFLFRDGDILGKYVD

SEQ ID NO: 48714 - protein, 101 aa, Homo sapiens
MAGQAFRKFLPLFDRVLVERSAAETVTKGGIMLPEKSQGKVLQATVVAVGSGSKGKGGEIQPVSVKVGDKVLLPEYGGTKVVLDDKVCKLNNSKKKSDICN

SEQ ID NO: 48715 - protein, 47 aa, Homo sapiens
MGGEIQPVSVKVGDKVLLPEYGGTKVVLDDKDYFLFRDGDILGKYVD

SEQ ID NO: 48716 - protein, 196 aa, Homo sapiens
MADGQMPFSCHYPSRLRRDPFRDSPLSSRLLDDGFGMDPFPDDLTASWPDWALPRLSSAWPGTLRSGMVPRGPTATARFGVPAEGRTPPPFPGEPWKVCVNVHSFKPEELMVKTKDGYVEVSGKHEEKQQEGGIVSKNFTKKIQLPAEVDPVTVFASLSPEGLLIIEAPQVPPYSTFGESSFNNELPQDSQEVTCT

SEQ ID NO: 48717 - protein, 150 aa, Homo sapiens
MAKIILRHLIEIPVRYQEEFEARGLEDCRLDHALYALPGPTIVDLRKTRAAQSPPVDSAAETPPREGKSHFQILLDVVQFLPEDIIIQTFEGWLLIKAQHGTRMDEHGFISRSFTRQYKLPDGVEIKDLSAVLCHDGILVVEVKDPVGTK

SEQ ID NO: 48718 - protein, 170 aa, Homo sapiens
MSHRTSSTFRAERSFHSSSSSSSSSTSSSASRALPAQDPPMEKALSMFSDDFGSFMRPHSEPLAFPARPGGAGNIKTLGDAYEFAVDVRDFSPEDIIVTTSNNHIEVRAEKLAADGTVMNTFAHKCQLPEDVDPTSVTSALREDGSLTIRARRHPHTEHVQQTFRTEIKI

SEQ ID NO: 48719 - protein, 263 aa, Homo sapiens
MSGCELSPLGLRVGLSAGPAHGRRFPAPSGPWRGLNLASRQGAGPKPRDSRPYKAAAVGAWHARPEACAHTLSCPALARLGRARRRPWMSHRTSSTFRAERSFHSSSSSSSSSTSSSASRALPAQDPPMEKALSMFSDDFGSFMRPHSEPLAFPAAHPTARPGGAGNIKTLGDAYEFAVDVRDFSPEDIIVTTSNNHIEVRAEKLAADGTVMNTFAHKCQLPEDVDPTSVTSALREDGSLTIRARRHPHTEHVQQTFRTEIKI

SEQ ID NO: 48720 - protein, 175 aa, Homo sapiens
MSHRTSSTFRAERSFHSSSSSSSSSTSSSASRALPAQDPPMEKALSMFSDDFGSFMRPHSEPLAFPAAHPTARPGGAGNIKTLGDAYEFAVDVRDFSPEDIIVTTSNNHIEVRAEKLAADGTVMNTFAHKCQLPEDVDPTSVTSALREDGSLTIRARRHPHTEHVQQTFRTEIKI

SEQ ID NO: 48721 - protein, 68 aa, Homo sapiens
MSHRTSSTFRAERSFHSSSSSSSSSTSSSASRALPAQDPPMEKALSMFSDDFGSFMRPHSEPLAFPGK

SEQ ID NO: 48722 - protein, 573 aa, Homo sapiens
MLRLPTVFRQMRPVSRVLAPHLTRAYAKDVKFGADARALMLQGVDLLADAVAVTMGPKGRTVIIEQSWGSPKVTKDGVTVAKSIDLKDKYKNIGAKLVQDVANNTNEEAGDGTTTATVLARSIAKEGFEKISKGANPVEIRRGVMLAVDAVIAELKKQSKPVTTPEEIAQVATISANGDKEIGNIISDAMKKVGRKGVITVKDGKTLNDELEIIEGMKFDRGYISPYFINTSKGQKCEFQDAYVLLSEKKISSIQSIVPALEIANAHRKPLVIIAEDVDGEALSTLVLNRLKVGLQVVAVKAPGFGDNRKNQLKDMAIATGGAVFGEEGLTLNLEDVQPHDLGKVGEVIVTKDDAMLLKGKGDKAQIEKRIQEIIEQLDVTTSEYEKEKLNERLAKLSDGVAVLKVGGTSDVEVNEKKDRVTDALNATRAAVEEGIVLGGGCALLRCIPALDSLTPANEDQKIGIEIIKRTLKIPAMTIAKNAGVEGSLIVEKIMQSSSEVGYDAMAGDFVNMVEKGIIDPTKVVRTALLDAAGVASLLTTAEVVVTEIPKEEKDPGMGAMGGMGGGMGGGMF

SEQ ID NO: 48723 - protein, 573 aa, Homo sapiens; identical to SEQ ID NO: 48722

SEQ ID NO: 48724 - protein, 58 aa, Homo sapiens
MLRLPTVFRQMRPVSRVLAPHLTRAYAKDVKFGADARALMLQGVDLLADAVAVTMGPK

SEQ ID NO: 48725 - protein, 94 aa, Homo sapiens
MLRLPTVFRQMRPVSRVLAPHLTRAYAKDVKFGADARALMLQGVDLLADAVAVTMGPKGRTVIIEQSWGSPKVTKDGVTVAKSIDLKDKYKNIG

SEQ ID NO: 48726 - protein, 234 aa, Homo sapiens [sequence omitted]

SEQ ID NO: 48727 - protein, 83 aa, Homo sapiens
MLRLPTVFRQMRPVSRVLAPHLTRAYAKDVKFGADARALMLQGVDLLADAVAVTMGPKGRTVIIEQSWGSPKVTKDGVTVAKS

SEQ ID NO: 48728 - protein, 221 aa, Homo sapiens
MLRLPTVFRQMRPVSRVLAPHLTRAYAKDVKFGADARALMLQGVDLLADAVAVTMGPKGRTVIIEQSWGSPKVTKDGVTVAKSIDLKDKYKNIGAKLVQDVANNTNEEAGDGTTTATVLARSIAKEGFEKISKGANPVEIRRGVMLAVDAVIAELKKQSKPVTTPEEIAQVATISANGDKEIGNIISDAMKKVGRKGVITVKDGKTLNDELEIIEGMKFDR

SEQ ID NO: 48729 - protein, 245 aa, Homo sapiens
MLAVDAVIAELKKQSKPVTTPEEIAQVATISANGDKEIGNIISDAMKKVGRKGVITVKDGKTLNDELEIIEGMKFDRGYISPYFINTSKGQKCEFQDAYVLLSEKKISSIQSIVPALEIANAHRKPLVIIAEDVDGEALSTLVLNRLKVGLQVVAVKAPGFGDNRKNQLKDMAIATGGAVFGEEGLTLNLEDVQPHDLGKVGEVIVTKDDAMLLKGKGDKAQIEKRIQEIIEQLDVTTSEYEKEN

SEQ ID NO: 48730 - protein, 158 aa, Homo sapiens
MLRLPTVFRQMRPVSRVLAPHLTRAYAKDVKFGADARALMLQGVDLLADAVAVTMGPKGRTVIIEQSWGSPKVTKDGVTVAKSIDLKDKYKNIGAKLVQDVANNTNEEAGDGTTTATVLARSIAKEGFEKISKGANPVEIRRGRNVCCHHSVLNFSVL

SEQ ID NO: 48731 - protein, 686 aa, Homo sapiens
MLAVPEMGLQGLYIGSSPERSPVPSPPGSPRTQESCGIAPLTPSQSPKPEVRAPQQASFSVVVAIDFGTTSSGYAFSFASDPEAIHMMRKWEGGDPGVAHQKTPTCLLLTPEGAFHSFGYTARDYYHDLDPEEARDWLYFEKFKMKIHSATDLTLKTQLEAVNGKTMPALEVFAHALRFFREHALQELREQSPSLPEKDTVRWVLTVPAIWKQPAKQFMREAAYLAGLVSRENAEQLLIALEPEAASVYCRKLRLHQLLDLSGRAPGGGRLGERRSIDSSFRQAREQLRRSRHSRTFLVESGVGELWAEMQAGDRYVVADCGGGTVDLTVHQLEQPHGTLKELYKASGGPYGAVGVDLAFEQLLCRIFGEDFIATFKRQRPAAWVDLTIAFEARKRTAGPHRAGALNISLPFSFIDFYRKQRGHNVETALRRSSVNFVKWSSQGMLRMSCEAMNELFQPTVSGIIQHIEALLARPEVQGVKLLFLVGGFAESAVLQHAVQAALGARGLRVVVPHDVGLTILKGAVLFGQAPGVVRVRRSPLTYGVGVLNRFVPGRHPPEKLLVRDGRRWCTDVFERFVAAEQSVALGEEVRRSYCPARPGQRRVLINLYCCAAEDARFITDPGVRKCGALSLELEPADCGQDTAGAPPGRREIRAAMQFGDTEIKVTAVDVSTNRSVRASIDFLSN

SEQ ID NO: 48732 - protein, 600 aa, Homo sapiens
MMRKWEGGDPGVAHQKTPTCLLLTPEGAFHSFGYTARDYYHDLDPEEARDWLYFEKFKMKIHSATDLTLKTQLEAVNGKTMPALEVFAHALRFFREHALQELREQSPSLPEKDTVRWVLTVPAIWKQPAKQFMREAAYLAGLVSRENAEQLLIALEPEAASVYCRKLRLHQLLDLSGRAPGGGRLGERRSIDSSFRQAREQLRRSRHSRTFLVESGVGELWAEMQAGDRYVVADCGGGTVDLTVHQLEQPHGTLKELYKASGGPYGAVGVDLAFEQLLCRIFGEDFIATFKRQRPAAWVDLTIAFEARKRTAGPHRAGALNISLPFSFIDFYRKQRGHNVETALRRSSVNFVKWSSQGMLRMSCEAMNELFQPTVSGIIQHIEALLARPEVQGVKLLFLVGGFAESAVLQHAVQAALGARGLRVVVPHDVGLTILKGAVLFGQAPGVVRVRRSPLTYGVGVLNRFVPGRHPPEKLLVRDGRRWCTDVFERFVAAEQSVALGEEVRRSYCPARPGQRRVLINLYCCAAEDARFITDPGVRKCGALSLELEPADCGQDTAGAPPGRREIRAAMQFGDTEIKVTAVDVSTNRSVRASIDFLSN

SEQ ID NO: 48733 - protein, 520 aa, Homo sapiens
MPALEVFAHALRFFREHALQELREQSPSLPEKDTVRWVLTVPAIWKQPAKQFMREAAYLAGLVSRENAEQLLIALEPEAASVYCRKLRLHQLLDLSGRAPGGGRLGERRSIDSSFRQAREQLRRSRHSRTFLVESGVGELWAEMQAGDRYVVADCGGGTVDLTVHQLEQPHGTLKELYKASGGPYGAVGVDLAFEQLLCRIFGEDFIATFKRQRPAAWVDLTIAFEARKRTAGPHRAGALNISLPFSFIDFYRKQRGHNVETALRRSSVNFVKWSSQGMLRMSCEAMNELFQPTVSGIIQHIEALLARPEVQGVKLLFLVGGFAESAVLQHAVQAALGARGLRVVVPHDVGLTILKGAVLFGQAPGVVRVRRSPLTYGVGVLNRFVPGRHPPEKLLVRDGRRWCTDVFERFVAAEQSVALGEEVRRSYCPARPGQRRVLINLYCCAAEDARFITDPGVRKCGALSLELEPADCGQDTAGAPPGRREIRAAMQFGDTEIKVTAVDVSTNRSVRASIDFLSN

SEQ ID NO: 48734 - protein, 675 aa, Homo sapiens
MADKEAGGSDGPRETAPTSAYSSPARSLGDTGITPLSPSHIVNDTDSNVSEQQSFLVVVAVDFGTTSSGYAYSFTKEPECIHVMRRWEGGDPGVSNQKTPTTILLTPERKFHSFGYAARDFYHDLDPNEAKQWLYLEKFKMKLHTTGDLTMDTDLTAANGKKVKALEIFAYALQYFKEQALKELSDQAGSEFENSDVRWVITVPAIWKQPAKQFMRQAAYQAGLASPENSEQLIIALEPEAASIYCRKLRLHQMIELSSKAAVNGYSGSDTVGAGFTQAKEHIRRNRQSRTFLVENVIGEIWSELEEGDKYVVVDSGGGTVDLTVHQIRLPEGHLKELYKATGGPYGSLGVDYEFEKLLYKIFGEDFIEQFKIKRPAAWVDLMIAFESRKRAAAPDRTNPLNITLPFSFIDYYKKFRGHSVEHALRKSNVDFVKWSSQGMLRMSPDAMNALFKPTIDSIIEHLRDLFQKPEVSTVKFLFLVGGFAEAPLLQQAVQAAFGDQCRIIIPQDVGLTILKGAVLFGLDPAVIKVRRSPLTYGVGVLNRYVEGKHPPEKLLVKDGTRWCTDVFDKFISADQSVALGELVKRSYTPAKPSQLVIVINIYSSEHDNVSFITDPGVKKCGTLRLDLTGTSGTAVPARREIQTLMQFGDTEIKATAIDIATSKSVKVGIDFLNY

SEQ ID NO: 48735 - protein, 272 aa, Homo sapiens [sequence omitted]

SEQ ID NO: 48736 - protein, 509 aa, Homo sapiens
MAAIGVHLGCTSACVAVYKDGRAGVVANDAGDRVTPAVVAYSENEEIVGLAAKQSRIRNISNTVMKVKQILGRSSSDPQAQKYIAESKCLVIEKNGKLRYEIDTGEETKFVNPEDVARLIFSKMKETAHSVLGSDANDVVITVPFDFGEKQKNALGEAARAAGFNVLRLIHEPSAALLAYGIGQDSPTGKSNILVFKLGGTSLSLSVMEVNSGIYRVLSTNTDDNIGGAHFTETLAQYLASEFQRSFKHDVRGNARAMMKLTNSAEVAKHSLSTLGSANCFLDSLYEGQDFDCNVSRARFELLCSPLFNKCIEAIRGLLDQNGFTADDINKVVLCGGSSRIPKLQQLIKDLFPAVELLNSIPPDEVIPIGAAIEAGILIGKENLLVEDSLMIECSARDILVKGVDESGASRFTVLFPSGTPLPARRQHTLQAPGSISSVCLELYESDGKNSAKEETKFAQVVLQDLDKKENGLRDILAVLTMKRDGSLHVTCTDQETGKCEAISIEIAS

SEQ ID NO: 48737 - protein, 143 aa, Homo sapiens
MAAIGVHLGCTSACVAVYKDGRAGVVANDAGDRVTPAVVAYSENEEIVGLAAKQSRIRNISNTVMKVKQILGRRVLSRDPQLQQLPQPFQRCSCSLSEQPHGQTGCVRGAQPLHQHQPQHSWGSLHTADSSLLFESWFCFWWG

SEQ ID NO: 48738 - protein, 128 aa, Homo sapiens
  VARIANT 1: note = MOD_RES - Any amino acid
XACVAVYKDGRAGVVANDAGDRVTPAVVAYSENEEIVGLAAKQSRIRNISNTVMKVKQILGRSSSDPQAQKYIAESKCLVIEKNGKLRYEIDTGEETKFVNPEDVARLIFSKMKGAYSPWSQSNSEDG

SEQ ID NO: 48739 - protein, 641 aa, Homo sapiens
MAKAAAIGIDLGTTYSCVGVFQHGKVEIIANDQGNRTTPSYVAFTDTERLIGDAAKNQVALNPQNTVFDAKRLIGRKFGDPVVQSDMKHWPFQVINDGDKPKVQVSYKGETKAFYPEEISSMVLTKMKEIAEAYLGYPVTNAVITVPAYFNDSQRQATKDAGVIAGLNVLRIINEPTAAAIAYGLDRTGKGERNVLIFDLGGGTFDVSILTIDDGIFEVKATAGDTHLGGEDFDNRLVNHFVEEFKRKHKKDISQNKRAVRRLRTACERAKRTLSSSTQASLEIDSLFEGIDFYTSITRARFEELCSDLFRSTLEPVEKALRDAKLDKAQIHDLVLVGGSTRIPKVQKLLQDFFNGRDLNKSINPDEAVAYGAAVQAAILMGDKSENVQDLLLLDVAPLSLGLETAGGVMTALIKRNSTIPTKQTQIFTTYSDNQPGVLIQVYEGERAMTKDNNLLGRFELSGIPPAPRGVPQIEVTFDIDANGILNVTATDKSTGKANKITITNDKGRLSKEEIERMVQEAEKYKAEDEVQRERVSAKNALESYAFNMKSAVEDEGLKGKISEADKKKVLDKCQEVISWLDANTLAEKDEFEHKRKELEQVCNPIISGLYQGAGGPGPGGFGAQGPKGGSGSGPTIEEVD

SEQ ID NO: 48740 - protein, 476 aa, Homo sapiens
MAKAAAIGIDLGTTYSCVGVFQHGKGERNVLIFDLGGGTFDVSILTIDDGIFEVKATAGDTHLGGEDFDNRLVNHFVEEFKRKHKKDISQNKRAVRRLRTACERAKRTLSSSTQASLEIDSLFEGIDFYTSITRARFEELCSDLFRSTLEPVEKALRDAKLDKAQIHDLVLVGGSTRIPKVQKLLQDFFNGRDLNKSINPDEAVAYGAAVQAAILMGDKSENVQDLLLLDVAPLSLGLETAGGVMTALIKRNSTIPTKQTQIFTTYSDNQPGVLIQVYEGERAMTKDNNLLGRFELSGIPPAPRGVPQIEVTFDIDANGILNVTATDKSTGKANKITITNDKGRLSKEEIERMVQEAEKYKAEDEVQRERVSAKNALESYAFNMKSAVEDEGLKGKISEADKKKVLDKCQEVISWLDANTLAEKDEFEHKRKELEQVCNPIISGLYQGAGGPGPGGFGAQGPKGGSGSGPTIEEVD

SEQ ID NO: 48741 - protein, 476 aa, Homo sapiens; identical to SEQ ID NO: 48740

SEQ ID NO: 48742 - protein, 641 aa, Homo sapiens
MAKAAAIGIDLGTTYSCVGVFQHGKVEIIANDQGNRTTPSYVAFTDTERLIGDAAKNQVALNPQNTVFDAKRLIGRKFGDPVVQSDMKHWPFQVINDGDKPKVQVSYKGDTKAFYPEEISSMVLTKMKEIAEAYLGYPVTNAVITVPAYFNDSQRQATKDAGVIAGLNVLRIINEPTAAAIAYGLDRTGKGERNVLIFDLGGGTFDVSILTIDDGIFEVKATAGDTHLGGEDFDNRLVNHFVEEFKRKHKKDISQNKRAVRRLRTACERAKRTLSSSTQASLEIDSLFEGIDFYTSITRARFEELCSDLFRSTLEPVEKALRDAKLDKAQIHDLVLVGGSTRIPKVQKLLQDFFNGRDLNKSINPDEAVAYGAAVQAAILMGDKSENVQDLLLLDVAPLSLGLETAGGVMTALIKRNSTIPTKQTQIFTTYSDNQPGVLIQVYEGERAMTKDNNLLGRFELSGIPPAPRGVPQIEVTFDIDANGILNVTATDKSTGKANKITITNDKGRLSKEEIERMVQEAEKYKAEDEVQRERVSAKNALESYAFNMKSAVEDEGLKGKISEADKKKVLDKCQEVISWLDANTLAEKDEFEHKRKELEQVCNPIISGLYQGAGGPGPGGFGAQGPKGGSGSGPTIEEVD

SEQ ID NO: 48743 - protein, 476 aa, Homo sapiens; identical to SEQ ID NO: 48740

SEQ ID NO: 48744 - protein, 641 aa, Homo sapiens; identical to SEQ ID NO: 48739

SEQ ID NO: 48745 - protein, 641 aa, Homo sapiens; identical to SEQ ID NO: 48739

SEQ ID NO: 48746 - protein, 232 aa, Homo sapiens
MAKAAAIGIDLGTTYSCVGVFQHGKVEIIANDQGNRTTPSYVAFTDTERLIGDAGVIAGLNVLRIINEPTAAAIAYGLDRTGKGERNVLIFDLGGGTFDVSILTIDDGIFEVKATAGDTHLGGEDFDNRLVNHFVEEFKRKHKKDISQNKRAVRRLRTACERAKRTLSSSTQASLEIDSLFEGIDFYTSITRARFEELCSDLFRSTLEPVEKAPPASPRCRSCCRTSSTGAT

SEQ ID NO: 48747 - protein, 641 aa, Homo sapiens; identical to SEQ ID NO: 48739

SEQ ID NO: 48748 - protein, 476 aa, Homo sapiens; identical to SEQ ID NO: 48740

SEQ ID NO: 48749 - protein, 476 aa, Homo sapiens; identical to SEQ ID NO: 48740

SEQ ID NO: 48750 - protein, 550 aa, Homo sapiens
MAKAAAIGIDLGTTYSCVGVFQHGKVQISSMVLTKMKEIAEAYLGYPVTNAVITVPAYFNDSQRQATKDAGVIAGLNVLRIINEPTAAAIAYGLDRTGKGERNVLIFDLGGGTFDVSILTIDDGIFEVKATAGDTHLGGEDFDNRLVNHFVEEFKRKHKKDISQNKRAVRRLRTACERAKRTLSSSTQASLEIDSLFEGIDFYTSITRARFEELCSDLFRSTLEPVEKALRDAKLDKAQIHDLVLVGGSTRIPKVQKLLQDFFNGRDLNKSINPDEAVAYGAAVQAAILMGDKSENVQDLLLLDVAPLSLGLETAGGVMTALIKRNSTIPTKQTQIFTTYSDNQPGVLIQVYEGERAMTKDNNLLGRFELSGIPPAPRGVPQIEVTFDIDANGILNVTATDKSTGKANKITITNDKGRLSKEEIERMVQEAEKYKAEDEVQRERVSAKNALESYAFNMKSAVEDEGLKGKISEADKKKVLDKCQEVISWLDANTLAEKDEFEHKRKELEQVCNPIISGLYQGAGGPGPGGFGAQGPKGGSGSGPTIEEVD

SEQ ID NO: 48751 - protein, 623 aa, Homo sapiens
MAKAAAIGIDLGTTYSCVGVFQHGKVEIIANDQGNRTTPSYVAFTDTERLIGDAAKNQVALNPVVQSDMKHWPFQVINDGDKPKVQVSYKGETKAFYPEEISSMVLTKMKEIAEAYLGYPVTNAVITVPAYFNDSQRQATKDAGVIAGLNVLRIINEPTAAAIAYGLDRTGKGERNVLIFDLGGGTFDVSILTIDDGIFEVKATAGDTHLGGEDFDNRLVNHFVEEFKRKHKKDISQNKRAVRRLRTACERAKRTLSSSTQASLEIDSLFEGIDFYTSITRARFEELCSDLFRSTLEPVEKALRDAKLDKAQIHDLVLVGGSTRIPKVQKLLQDFFNGRDLNKSINPDEAVAYGAAVQAAILMGDKSENVQDLLLLDVAPLSLGLETAGGVMTALIKRNSTIPTKQTQIFTTYSDNQPGVLIQVYEGERAMTKDNNLLGRFELSGIPPAPRGVPQIEVTFDIDANGILNVTATDKSTGKANKITITNDKGRLSKEEIERMVQEAEKYKAEDEVQRERVSAKNALESYAFNMKSAVEDEGLKGKISEADKKKVLDKCQEVISWLDANTLAEKDEFEHKRKELEQVCNPIISGLYQGAGGPGPGGFGAQGPKGGSGSGPTIEEVD

SEQ ID NO: 48752 - protein, 550 aa, Homo sapiens; identical to SEQ ID NO: 48750

SEQ ID NO: 48753 - protein, 550 aa, Homo sapiens; identical to SEQ ID NO: 48750

SEQ ID NO: 48754 - protein, 550 aa, Homo sapiens; identical to SEQ ID NO: 48750

SEQ ID NO: 48755 - protein, 232 aa, Homo sapiens; identical to SEQ ID NO: 48746

SEQ ID NO: 48756 - protein, 550 aa, Homo sapiens; identical to SEQ ID NO: 48750

SEQ ID NO: 48757 - protein, 232 aa, Homo sapiens; identical to SEQ ID NO: 48746

SEQ ID NO: 48758 - protein, 232 aa, Homo sapiens; identical to SEQ ID NO: 48746

SEQ ID NO: 48759 - protein, 232 aa, Homo sapiens; identical to SEQ ID NO: 48746

SEQ ID NO: 48760 - protein, 641 aa, Homo sapiens; identical to SEQ ID NO: 48739

SEQ ID NO: 48761 - protein, 641 aa, Homo sapiens; identical to SEQ ID NO: 48739

SEQ ID NO: 48762 - protein, 641 aa, Homo sapiens; identical to SEQ ID NO: 48739

SEQ ID NO: 48763 - protein, 232 aa, Homo sapiens; identical to SEQ ID NO: 48746

SEQ ID NO: 48764 - protein, 641 aa, Homo sapiens; identical to SEQ ID NO: 48739

SEQ ID NO: 48765 - protein, 641 aa, Homo sapiens; identical to SEQ ID NO: 48739

SEQ ID NO: 48766 - protein, 708 aa, Homo sapiens
LRSCCEGPLRLSRVTPAVPRLSRANLCGCRHRRVEFPAFRRTELLSRIPSAVSSPQSQSGAHRQGTGMAKAAAIGIDLGTTYSCVGVFQHGKVEIIANDQGNRTTPSYVAFTDTERLIGDAAKNQVALNPQNTVFDAKRLIGRKFGDPVVQSDMKHWPFQVINDGDKPKVQVSYKGETKAFYPEEISSMVLTKMKEIAEAYLGYPVTNAVITVPAYFNDSQRQATKDAGVIAGLNVLRIINEPTAAAIAYGLDRTGKGERNVLIFDLGGGTFDVSILTIDDGIFEVKATAGDTHLGGEDFDNRLVNHFVEEFKRKHKKDISQNKRAVRRLRTACERAKRTLSSSTQASLEIDSLFEGIDFYTSITRARFEELCSDLFRSTLEPVEKALRDAKLDKAQIHDLVLVGGSTRIPKVQKLLQDFFNGRDLNKSINPDEAVAYGAAVQAAILMGDKSENVQDLLLLDVAPLSLGLETAGGVMTALIKRNSTIPTKQTQIFTTYSDNQPGVLIQVYEGERAMTKDNNLLGRFELSGIPPAPRGVPQIEVTFDIDANGILNVTATDKSTGKANKITITNDKGRLSKEEIERMVQEAEKYKAEDEVQRERVSAKNALESYAFNMKSAVEDEGLKGKISEADKKKVLDKCQEVISWLDANTLAEKDEFEHKRKELEQVCNPIISGLYQGAGGPGPGGFGAQGPKGGSGSGPTIEEVD

SEQ ID NO: 48767 - protein, 550 aa, Homo sapiens; identical to SEQ ID NO: 48750

SEQ ID NO: 48768 - protein, 624 aa, Homo sapiens
MAKAAAIGIDLGTTYSCVGVFQHGKVEIIANDQGNRTTPSYVAFTDTERLIGDAAKNQVALNPPVVQSDMKHWPFQVINDGDKPKVQVSYKGETKAFYPEEISSMVLTKMKEIAEAYLGYPVTNAVITVPAYFNDSQRQATKDAGVIAGLNVLRIINEPTAAAIAYGLDRTGKGERNVLIFDLGGGTFDVSILTIDDGIFEVKATAGDTHLGGEDFDNRLVNHFVEEFKRKHKKDISQNKRAVRRLRTACERAKRTLSSSTQASLEIDSLFEGIDFYTSITRARFEELCSDLFRSTLEPVEKALRDAKLDKAQIHDLVLVGGSTRIPKVQKLLQDFFNGRDLNKSINPDEAVAYGAAVQAAILMGDKSENVQDLLLLDVAPLSLGLETAGGVMTALIKRNSTIPTKQTQIFTTYSDNQPGVLIQVYEGERAMTKDNNLLGRFELSGIPPAPRGVPQIEVTFDIDANGILNVTATDKSTGKANKITITNDKGRLSKEEIERMVQEAEKYKAEDEVQRERVSAKNALESYAFNMKSAVEDEGLKGKISEADKKKVLDKCQEVISWLDANTLAEKDEFEHKRKELEQVCNPIISGLYQGAGGPGPGGFGAQGPKGGSGSGPTIEEVD

SEQ ID NO: 48769 - protein, 618 aa, Homo sapiens
MAKAAAIGIDLGTTYSCVGVFQHGKVEIIANDQGNRTTPSYVAFTDTERLIGDAAKNQVVQSDMKHWPFQVINDGDKPKVQVSYKGETKAFYPEEISSMVLTKMKEIAEAYLGYPVTNAVITVPAYFNDSQRQATKDAGVIAGLNVLRIINEPTAAAIAYGLDRTGKGERNVLIFDLGGGTFDVSILTIDDGIFEVKATAGDTHLGGEDFDNRLVNHFVEEFKRKHKKDISQNKRAVRRLRTACERAKRTLSSSTQASLEIDSLFEGIDFYTSITRARFEELCSDLFRSTLEPVEKALRDAKLDKAQIHDLVLVGGSTRIPKVQKLLQDFFNGRDLNKSINPDEAVAYGAAVQAAILMGDKSENVQDLLLLDVAPLSLGLETAGGVMTALIKRNSTIPTKQTQIFTTYSDNQPGVLIQVYEGERAMTKDNNLLGRFELSGIPPAPRGVPQIEVTFDIDANGILNVTATDKSTGKANKITITNDKGRLSKEEIERMVQEAEKYKAEDEVQRERVSAKNALESYAFNMKSAVEDEGLKGKISEADKKKVLDKCQEVISWLDANTLAEKDEFEHKRKELEQVCNPIISGLYQGAGGPGPGGFGAQGPKGGSGSGPTIEEVD

SEQ ID NO: 48770 - protein, 618 aa, Homo sapiens; identical to SEQ ID NO: 48769

SEQ ID NO: 48771 - protein, 550 aa, Homo sapiens; identical to SEQ ID NO: 48750

SEQ ID NO: 48772 - protein, 618 aa, Homo sapiens; identical to SEQ ID NO: 48769

SEQ ID NO: 48773 - protein, 550 aa, Homo sapiens; identical to SEQ ID NO: 48750

SEQ ID NO: 48774 - protein, 586 aa, Homo sapiens
MATAKGIAIGIDLGTTYSCVGVFQHGKVEIIANDQGNRTTPSYVAFTDTERLIGDAAKNQVAMNPQNTVFDAKRLIGRKFNDPVVQADMKLWPFQVINDSQRQATKDAGVIAGLNVLRIINEPTAAAIAYGLDKGGQGERHVLIFDLGGGTFDVSILTIDDGIFEVKATAGDTHLGGEDFDNRLVSHFVEEFKRKHKKDISQNKRAVRRLRTACERAKRTLSSSTQANLEIDSLYEGIDFYTSITRARFEELCADLFRGTLEPVEKALRDAKMDKAKIHDIVLVGGSTRIPKVQRLLQDYFNGRDLNKSINPDEAVAYGAAVQAAILMGDKSEKVQDLLLLDVAPLSLGLETAGGVMTALIKRNSTIPTKQTQIFTTYSDNQPGVLIQVYEGERAMTKDNNLLGRFDLTGIPPAPRGVPQIEVTFDIDANGILNVTATDKSTGKVNKITITNDKGRLSKEEIERMVLDAEKYKAEDEVQREKIAAKNALESYAFNMKSVVSDEGLKGKISESDKNKILDKCNELLSWLEVNQLAEKDEFDHKRKELEQMCNPIITKLYQGGCTGPACGTGYVPGRPATGPTIEEVD

SEQ ID NO: 48775 - protein, 641 aa, Homo sapiens
MATAKGIAIGIDLGTTYSCVGVFQHGKVEIIANDQGNRTTPSYVAFTDTERLIGDAAKNQVAMNPQNTVFDAKRLIGRKFNDPVVQADMKLWPFQVINEGGKPKVLVSYKGENKAFYPEEISSMVLTKLKETAEAFLGHPVTNAVITVPAYFNDSQRQATKDAGVIAGLNVLRIINEPTAAAIAYGLDKGGQGERHVLIFDLGGGTFDVSILTIDDGIFEVKATAGDTHLGGEDFDNRLVSHFVEEFKRKHKKDISQNKRAVRRLRTACERAKRTLSSSTQANLEIDSLYEGIDFYTSITRARFEELCADLFRGTLEPVEKALRDAKMDKAKIHDIVLVGGSTRIPKVQRLLQDYFNGRDLNKSINPDEAVAYGAAVQAAILMGDKSEKVQDLLLLDVAPLSLGLETAGGVMTALIKRNSTIPTKQTQIFTTYSDNQPGVLIQVYEGERAMTKDNNLLGRFDLTGIPPAPRGVPQIEVTFDIDANGILNVTATDKSTGKVNKITITNDKGRLSKEEIERMVLDAEKYKAEDEVQREKIAAKNALESYAFNMKSVVSDEGLKGKISESDKNKILDKCNELLSWLEVNQLAEKDEFDHKRKELEQMCNPIITKLYQGGCTGPACGTGYVPGRPATGPTIEEVD

SEQ ID NO: 48776 - protein, 641 aa, Homo sapiens
MATAKGIAIGIDLGTTYSCVGVFQHGKVEIIANDQGNRTTPSYVAFTDTERLIGDAAKNQVAMNPQNTVFDAKRLIGRKFNDPVVQADMKLWPFQVINEGGKPKVLVSYKGENKAFYPEEISSMVLTKLKETAEAFLGHPVTNAVITVPAYFNDSQRQATKDAGVIAGLNVLRIINEPTAAAIAYGLDKGGQGERHVLIFDLGGGTFDVSILTIDDGIFEVKATAGDTHLGGEDFDNRLVSHFVEEFKRKHKKDISQNKRAVRRLRTACERAKRTLSSSTQANLEIDSLYEGIDFYTSITRARFEELCADLFRGTLEPVEKALRDAKMDKAKIHDIVLVGGSTRIPKVQRLLQDYFNGRDLNKSINPDEAVAYGAAVQAAILMGDKSEKVQDLLLLDVAPLSLGLETAGGVMTALIKRNSTIPTKQTQIFTTYSDNQPGVLIQVYEGERAMTKDNNLLGRFDLTGIPPAPRGVPQIEVTFDIDANGILNVTAMDKSTGKVNKITITNDKGRLSKEEIERMVLDAEKYKAEDEVQREKIAAKNALESYAFNMKSVVSDEGLKGKISESDKNKILDKCNELLSWLEVNQLAEKDEFDHKRKELEQMCNPIITKLYQGGCTGPACGTGYVPGRPATGPTIEEVD

SEQ ID NO: 48777 - protein, 641 aa, Homo sapiens; identical to SEQ ID NO: 48775

SEQ ID NO: 48778 - protein, 641 aa, Homo sapiens; identical to SEQ ID NO: 48775

SEQ ID NO: 48779 - protein, 232 aa, Homo sapiens
AKGIAIGIDLGTTYSCVGVFQHGKVEIIANDQGNRTTPSYVAFTDTERLIGDAGVIAGLNVLRIINEPTAAAIAYGLDKGGQGERHVLIFDLGGGTFDVSILTIDDGIFEVKATAGDTHLGGEDFDNRLVSHFVEEFKRKHKKDISQNKRAVRRLRTACERAKRTLSSSTQANLEIDSLYEGIDFYTSITRARFEELCADLFRGTLEPVEKGAPPASPRCSGCFRTTSMDVI

SEQ ID NO: 48780 - protein, 641 aa, Homo sapiens; identical to SEQ ID NO: 48776

SEQ ID NO: 48781 - protein, 532 aa, Homo sapiens [sequence omitted]

SEQ ID NO: 48782 - protein, 232 aa, Homo sapiens; identical to SEQ ID NO: 48779

SEQ ID NO: 48783 - protein, 641 aa, Homo sapiens; identical to SEQ ID NO: 48775

SEQ ID NO: 48784 - protein, 532 aa, Homo sapiens [sequence omitted]

SEQ ID NO: 48785 - protein, 532 aa, Homo sapiens
MATAKGIAIGIDLGTTYSCVGVFQHGKVEIIANDQGNRTTPSYVAFTDTERLIGDAAKNQVAMNPQNTVFDAKRLIGRKFNDPVVQADMKLWPFQVINEGGKPKVLVSYKGENKAFYPEEISSMVLTKLKETAEAFLGHPVTNAVITVPAYFNDSQRQATKDAGVIAGLNVLRIINEPTAAAIAYGLDKGGQGERHVLIFDLGGGTFDVSILTIDDGIFEVKATAGDTHLGGEDFDNRLVSHFVEEFKRKHKKDISQNKRAVRRLRTACERAKRTLSSSTQANLEIDSLYEGIDFYTSITRARFEELCADLFRGTLEPVEKALRDAKMDKAKIHDIVLVGGSTRIPKVQRLLQDYFNGRDLNKSINPDEAVAYGAAVQAAILMGDKSEKVQDLLLLDVAPLSLGLETAGGVMTALIKRNSTIPTKQTQIFTTYSDNQPGVLIQVYEGERAMTKDNNLLGRFDLTGIPPAPRGVPQIEVTFDIDANGILNVTATDKSTGKVNKITITNDKGRLSKEEIERMVLDAEKYKAEDV

SEQ ID NO: 48786 - protein, 641 aa, Homo sapiens; identical to SEQ ID NO: 48776

SEQ ID NO: 48787 - protein, 232 aa, Homo sapiens; identical to SEQ ID NO: 48779

SEQ ID NO: 48788 - protein, 232 aa, Homo sapiens; identical to SEQ ID NO: 48779

SEQ ID NO: 48789 - protein, 641 aa, Homo sapiens; identical to SEQ ID NO: 48776

SEQ ID NO: 48790 - protein, 639 aa, Homo sapiens
MSARGPAIGIDLGTTYSCVGVFQHGKVEIIANDQGNRTTPSYVAFTDTERLIGDAAKNQVAMNPTNTIFDAKRLIGRKFEDATVQSDMKHWPFRVVSEGGKPKVQVEYKGETKTFFPEEISSMVLTKMKEIAEAYLGGKVHSAVITVPAYFNDSQRQATKDAGTITGLNVLRIINEPTAAAIAYGLDKKGCAGGEKNVLIFDLGGGTFDVSILTIEDGIFEVKSTAGDTHLGGEDFDNRMVSHLAEEFKRKHKKDIGPNKRAVRRLRTACERAKRTLSSSTQASIEIDSLYEGVDFYTSITRARFEELNADLFRGTLEPVEKALRDAKLDKGQIQEIVLVGGSTRIPKIQKLLQDFFNGKELNKSINPDEAVAYGAAVQAAILIGDKSENVQDLLLLDVTPLSLGIETAGGVMTPLIKRNTTIPTKQTQTFTTYSDNQSSVLVQVYEGERAMTKDNNLLGKFDLTGIPPAPRGVPQIEVTFDIDANGILNVTAADKSTGKENKITITNDKGRLSKDDIDRMVQEAERYKSEDEANRDRVAAKNALESYTYNIKQTVEDEKLRGKISEQDKNKILDKCQEVINWLDRNQMAEKDEYEHKQKELERVCNPIISKLYQGGPGGGSGGGGSGASGGPTIEEVD

SEQ ID NO: 48791 - protein, 639 aa, Homo sapiens; identical to SEQ ID NO: 48790

SEQ ID NO: 48792 - protein, 413 aa, Homo sapiens
MSARGPAIGIDLGTTYSCVGVFQHGKVEIIANDQGNRTTPSYVAFTDTERLIGDAAKNQVAMNPTNTIFDAKRLIGRKFEELNADLFRGTLEPVEKALRDAKLDKGQIQEIVLVGGSTRIPKIQKLLQDFFNGKELNKSINPDEAVAYGAAVQAAILIGDKSENVQDLLLLDVTPLSLGIETAGGVMTPLIKRNTTIPTKQTQTFTTYSDNQSSVLVQVYEGERAMTKDNNLLGKFDLTGIPPAPRGVPQIEVTFDIDANGILNVTAADKSTGKENKITITNDKGRLSKDDIDRMVQEAERYKSEDEANRDRVAAKNALESYTYNIKQTVEDEKLRGKISEQDKNKILDKCQEVINWLDRNQMAEKDEYEHKQKELERVCNPIISKLYQGGPGGGSGGGGSGASGGPTIEEVD

SEQ ID NO: 48793 - protein, 840 aa, Homo sapiens
MSVVGIDLGFQSCYVAVARAGGIETIANEYSDRCTPACISFGPKNRSIGAAAKSQVISNAKNTVQGFKRFHGRAFSDPFVEAEKSNLAYDIVQLPTGLTGIKVTYMEEERNFTTEQVTAMLLSKLKETAESVLKKPVVDCVVSVPCFYTDAERRSVMDATQIAGLNCLRLMNETTAVALAYGIYKQDLPALEEKPRNVVFVDMGHSAYQVSVCAFNRGKLKVLATAFDTTLGGRKFDEVLVNHFCEEFGKKYKLDIKSKIRALLRLSQECEKLKKLMSANASDLPLSIECFMNDVDVSGTMNRGKFLEMCNDLLARVEPPLRSVLEQTKLKKEDIYAVEIVGGATRIPAVKEKISKFFGKELSTTLNADEAVTRGCALQCAILSPAFKVREFSITDVVPYPISLRWNSPAEEGSSDCEVFSKNHAAPFSKVLTFYRKEPFTLEAYYSSPQDLPYPDPAIAQFSVQKVTPQSDGSSSKVKVKVRVNVHGIFSVSSASLVEVHKSEENEEPMETDQNAKEEEKMQVDQEEPHVEEQQQQTPAENKAESEEMETSQAGSKDKKMDQPPQAKKAKVKTSTVDLPIENQLLWQIDREMLNLYIENEGKMIMQDKLEKERNDAKNAVEEYVYEMRDKLSGEYEKFVSEDDRNSFTLKLEDTENWLYEDGEDQPKQVYVDKLAELKNLGQPIKIRFQESEERPKLFEELGKQIQQYMKIISSFKNKEDQYDHLDAADMTKVEKSTNEAMEWMNNKLNLQNKQSLTMDPVVKSKEIEAKIKELTSTCSPIISKPKPKVEPPKEEQKNAEQNGPVDGQGDNPGPQAAEQGTDTAVPSDSDKKLPEMDID

SEQ ID NO: 48794 - protein, 148 aa, Homo sapiens
MSVVGIDLGFQSCYVAVARAGGIETIANEYSDRCTPACISFGPKNRSIGAAAKSQVISNAKNTVQGFKRFHGRAFSDPFVEAEKSNLAYDIVQLPTGLTGIKVTYMEEEQNGPVDGQGDNPGPQAAEQGTDTAVPSDSDKKLPEMDID

SEQ ID NO: 48795 - protein, 473 aa, Homo sapiens
MSVVGIDLGFQSCYVAVARAGGIETIANEYSDRCTPACISFGPKNRSIGAAAKSQVISNAKNTVQGFKRFHGRAFSDPFVEAEKSNLAYDIVQLPTGLTGIKVTYMEEERNFTTEQVTAMLLSKLKETAESVLKKPVVDCVVSVPCFYTDAERRSVMDATQIAGLNCLRLMNETTAVALAYGIYKQDLPALEEKPRNVVFVDMGHSAYQVSVCAFNRGKLKVLATAFDTTLGGRKFDEVLVNHFCEEFGKKYKLDIKSKIRALLRLSQECEKLKKLMSANASDLPLSIECFMNDVDVSGTMNRGKFLEMCNDLLARVEPPLRSVLEQTKLKKEDIYAVEIVGGATRIPAVKEKISKFFGKELSTTLNADEAVTRGCALQCAILSPAFKVREFSITDVVPYPISLRWNSPAEEGSSDCEVFSKNHAAPFSKVLTFYRKEPFTLEAYYSSPGFALSRSCYSIIKSLLSLMAPVQK

SEQ ID NO: 48796 - protein, 654 aa, Homo sapiens
MKLSLVAAMLLLLSAARAEEEDKKEDVGTVVGIDLGTTYSCVGVFKNGRVEIIANDQGNRITPSYVAFTPEGERLIGDAAKNQLTSNPENTVFDAKRLIGRTWNDPSVQQDIKFLPFKVVEKKTKPYIQVDIGGGQTKTFAPEEISAMVLTKMKETAEAYLGKKVTHAVVTVPAYFNDAQRQATKDAGTIAGLNVMRIINEPTAAAIAYGLDKREGEKNILVFDLGGGTFDVSLLTIDNGVFEVVATNGDTHLGGEDFDQRVMEHFIKLYKKKTGKDVRKDNRAVQKLRREVEKAKRALSSQHQARIEIESFYEGEDFSETLTRAKFEELNMDLFRSTMKPVQKVLEDSDLKKSDIDEIVLVGGSTRIPKIQQLVKEFFNGKEPSRGINPDEAVAYGAAVQAGVLSGDQDTGDLVLLDVCPLTLGIETVGGVMTKLIPRNTVVPTKKSQIFSTASDNQPTVTIKVYEGERPLTKDNHLLGTFDLTGIPPAPRGVPQIEVTFEIDVNGILRVTAEDKGTGNKNKITITNDQNRLTPEEIERMVNDAEKFAEEDKKLKERIDTRNELESYAYSLKNQIGDKEKLGGKLSSEDKETMEKAVEEKIEWLESHQDADIEDFKAKKKELEEIVQPIISKLYGSAGPPPTGEEDTAEKDEL

SEQ ID NO: 48797 - protein, 278 aa, Homo sapiens [sequence omitted]

SEQ ID NO: 48798 - protein, 643 aa, Homo sapiens
MQAPRELAVGIDLGTTYSCVGVFQQGRVEILANDQGNRTTPSYVAFTDTERLVGDAAKSQAALNPHNTVFDAKRLIGRKFADTTVQSDMKHWPFRVVSEGGKPKVRVCYRGEDKTFYPEEISSMVLSKMKETAEAYLGQPVKHAVITVPAYFNDSQRQATKDAGAIAGLNVLRIINEPTAAAIAYGLDRRGAGERNVLIFDLGGGTFDVSVLSIDAGVFEVKATAGDTHLGGEDFDNRLVNHFMEEFRRKHGKDLSGNKRALRRLRTACERAKRTLSSSTQATLEIDSLFEGVDFYTSITRARFEELCSDLFRSTLEPVEKALRDAKLDKAQIHDVVLVGGSTRIPKVQKLLQDFFNGKELNKSINPDEAVAYGAAVQAAVLMGDKCEKVQDLLLLDVAPLSLGLETAGGVMTTLIQRNATIPTKQTQTFTTYSDNQPGVFIQVYEGERAMTKDNNLLGRFELSGIPPAPRGVPQIEVTFDIDANGILSVTATDRSTGKANKITITNDKGRLSKEEVERMVHEAEQYKAEDEAQRDRVAAKNSLEAHVFHVKGSLQEESLRDKIPEEDRRKMQDKCREVLAWLEHNQLAEKEEYEHQKRELEQICRPIFSRLYGGPGVPGGSSCGTQARQGDPSTGPIIEEVD

SEQ ID NO: 48799 - protein, 619 aa, Homo sapiens
MQAPRELAVGIDLGTTYSCVAFTDTERLVGDAAKSQAALNPHNTVFDAKRLIGRKFADTTVQSDMKHWPFRVVSEGGKPKVRVCYRGEDKTFYPEEISSMVLSKMKETAEAYLGQPVKHAVITVPAYFNDSQRQATKDAGAIAGLNVLRIINEPTAAAIAYGLDRRGAGERNVLIFDLGGGTFDVSVLSIDAGVFEVKATAGDTHLGGEDFDNRLVNHFMEEFRRKHGKDLSGNKRALRRLRTACERAKRTLSSSTQATLEIDSLFEGVDFYTSITRARFEELCSDLFRSTLEPVEKALRDAKLDKAQIHDVVLVGGSTRIPKVQKLLQDFFNGKELNKSINPDEAVAYGAAVQAAVLMGDKCEKVQDLLLLDVAPLSLGLETAGGVMTTLIQRNATIPTKQTQTFTTYSDNQPGVFIQVYEGERAMTKDNNLLGRFELSGIPPAPRGVPQIEVTFDIDANGILSVTATDRSTGKANKITITNDKGRLSKEEVERMVHEAEQYKAEDEAQRDRVAAKNSLEAHVFHVKGSLQEESLRDKIPEEDRRKMQDKCREVLAWLEHNQLAEKEEYEHQKRELEQICRPIFSRLYGGPGVPGGSSCGTQARQGDPSTGPIIEEVD

SEQ ID NO: 48800 - protein, 646 aa, Homo sapiens
MSKGPAVGIDLGTTYSCVGVFQHGKVEIIANDQGNRTTPSYVAFTDTERLIGDAAKNQVAMNPTNTVFDAKRLIGRRFDDAVVQSDMKHWPFMVVNDAGRPKVQVEYKGETKSFYPEEVSSMVLTKMKEIAEAYLGKTVTNAVVTVPAYFNDSQRQATKDAGTIAGLNVLRIINEPTAAAIAYGLDKKVGAERNVLIFDLGGGTFDVSILTIEDGIFEVKSTAGDTHLGGEDFDNRMVNHFIAEFKRKHKKDISENKRAVRRLRTACERAKRTLSSSTQASIEIDSLYEGIDFYTSITRARFEELNADLFRGTLDPVEKALRDAKLDKSQIHDIVLVGGSTRIPKIQKLLQDFFNGKELNKSINPDEAVAYGAAVQAAILSGDKSENVQDLLLLDVTPLSLGIETAGGVMTVLIKRNTTIPTKQTQTFTTYSDNQPGVLIQVYEGERAMTKDNNLLGKFELTGIPPAPRGVPQIEVTFDIDANGILNVSAVDKSTGKENKITITNDKGRLSKEDIERMVQEAEKYKAEDEKQRDKVSSKNSLESYAFNMKATVEDEKLQGKINDEDKQKILDKCNEIINWLDKNQTAEKEEFEHQQKELEKVCNPIITKLYQSAGGMPGGMPGGFPGGGAPPSGGASSGPTIEEVD

SEQ ID NO: 48801 - protein, 493 aa, Homo sapiens
MSKGPAVGIDLGTTYSCVGVFQHGKVEIIANDQGNRTTPSYVAFTDTERLIGDAAKNQVAMNPTNTVFDAKRLIGRRFDDAVVQSDMKHWPFMVVNDAGRPKVQVEYKGETKSFYPEEVSSMVLTKMKEIAEAYLGKTVTNAVVTVPAYFNDSQRQATKDAGTIAGLNVLRIINEPTAAAIAYGLDKKVGAERNVLIFDLGGGTFDVSILTIEDGIFEVKSTAGDTHLGGEDFDNRMVNHFIAEFKRKHKKDISENKRAVRRLRTACERAKRTLSSSTQASIEIDSLYEGIDFYTSITRARFEELNADLFRGTLDPVEKALRDAKLDKSQIHDIVLVGGSTRIPKIQKLLQDFFNGKELNKSINPDEAVAYGAAVQAAILSGDKSENVQDLLLLDVTPLSLGIETAGGVMTVLIKRNTTIPTKQTQTFTTYSDNQPGVLIQVYEGERAMTKDNNLLGKFELTGMPGGMPGGFPGGGAPPSGGASSGPTIEEVD

SEQ ID NO: 48802 - protein, 627 aa, Homo sapiens
MSKGPAVGIDLGTTYSCVGVFQHGKVEIIANDQGNRTTPSYVAFTDTERLIGDAAKNQVAMNPTNTVFDAKRLIGRRFDDAVVQSDMKHWPFMVVNDAGRPKVQVEYKGETKSFYPEEVSSMVLTKMKEIAEAYLGKATKDAGTIAGLNVLRIINEPTAAAIAYGLDKKVGAERNVLIFDLGGGTFDVSILTIEDGIFEVKSTAGDTHLGGEDFDNRMVNHFIAEFKRKHKKDISENKRAVRRLRTACERAKRTLSSSTQASIEIDSLYEGIDFYTSITRARFEELNADLFRGTLDPVEKALRDAKLDKSQIHDIVLVGGSTRIPKIQKLLQDFFNGKELNKSINPDEAVAYGAAVQAAILSGDKSENVQDLLLLDVTPLSLGIETAGGVMTVLIKRNTTIPTKQTQTFTTYSDNQPGVLIQVYEGERAMTKDNNLLGKFELTGIPPAPRGVPQIEVTFDIDANGILNVSAVDKSTGKENKITITNDKGRLSKEDIERMVQEAEKYKAEDEKQRDKVSSKNSLESYAFNMKATVEDEKLQGKINDEDKQKILDKCNEIINWLDKNQTAEKEEFEHQQKELEKVCNPIITKLYQSAGGMPGGMPGGFPGGGAPPSGGASSGPTIEEVD

SEQ ID NO: 48803 - protein, 646 aa, Homo sapiens; identical to SEQ ID NO: 48800

SEQ ID NO: 48804 - protein, 500 aa, Homo sapiens
MSKGPAVGIDLGTTYSCVGVFQHGKVEIIANDQGNRTTPSYVAFTDTERLIGDAAKNQVAMNPTNTVFDAKRLIGRRFDDAVVQSDMKHWPFMVVNDAGRPKHKKDISENKRAVRRLRTACERAKRTLSSSTQASIEIDSLYEGIDFYTSITRARFEELNADLFRGTLDPVEKALRDAKLDKSQIHDIVLVGGSTRIPKIQKLLQDFFNGKELNKSINPDEAVAYGAAVQAAILSGDKSENVQDLLLLDVTPLSLGIETAGGVMTVLIKRNTTIPTKQTQTFTTYSDNQPGVLIQVYEGERAMTKDNNLLGKFELTGIPPAPRGVPQIEVTFDIDANGILNVSAVDKSTGKENKITITNDKGRLSKEDIERMVQEAEKYKAEDEKQRDKVSSKNSLESYAFNMKATVEDEKLQGKINDEDKQKILDKCNEIINWLDKNQTAEKEEFEHQQKELEKVCNPIITKLYQSAGGMPGGMPGGFPGGGAPPSGGASSGPTIEEVD

SEQ ID NO: 48805 - protein, 410 aa, Homo sapiens
MVNHFIAEFKRKHKKDISENKRAVRRLRTACERAKRTLSSSTQASIEIDSLYEGIDFYTSITRARFEELNADLFRGTLDPVEKALRDAKLDKSQIHDIVLVGGSTRIPKIQKLLQDFFNGKELNKSINPDEAVAYGAAVQAAILSGDKSENVQDLLLLDVTPLSLGIETAGGVMTVLIKRNTTIPTKQTQTFTTYSDNQPGVLIQVYEGERAMTKDNNLLGKFELTGIPPAPRGVPQIEVTFDIDANGILNVSAVDKSTGKENKITITNDKGRLSKEDIERMVQEAEKYKAEDEKQRDKVSSKNSLESYAFNMKATVEDEKLQGKINDEDKQKILDKCNEIINWLDKNQTAEKEEFEHQQKELEKVCNPIITKLYQSAGGMPGGMPGGFPGGGAPPSGGASSGPTIEEVD

SEQ ID NO: 48806 - protein, 646 aa, Homo sapiens; identical to SEQ ID NO: 48800

SEQ ID NO: 48807 - protein, 679 aa, Homo sapiens
MISASRAAAARLVGAAASRGPTAARHQDSWNGLSHEAFRLVSRRDYASEAIKGAVVGIDLGTTNSCVAVMEGKQAKVLENAEGARTTPSVVAFTADGERLVGMPAKRQAVTNPNNTFYATKRLIGRRYDDPEVQKDIKNVPFKIVRASNGDAWVEAHGKLYSPSQIGAFVLMKMKETAENYLGHTAKNAVITVPAYFNDSQRQATKDAGQISGLNVLRVINEPTAAALAYGLDKSEDKVIAVYDLGGGTFDISILEIQKGVFEVKSTNGDTFLGGEDFDQALLRHIVKEFKRETGVDLTKDNMALQRVREAAEKAKCELSSSVQTDINLPYLTMDSSGPKHLNMKLTRAQFEGIVTDLIRRTIAPCQKAMQDAEVSKSDIGEVILVGGMTRMPKVQQTVQDLFGRAPSKAVNPDEAVAIGAAIQGGVLAGDVTDVLLLDVTPLSLGIETLGGVFTKLINRNTTIPTKKSQVFSTAADGQTQVEIKVCQGEREMAGDNKLLGQFTLIGIPPAPRGVPQIEVTFDIDANGIVHVSAKDKGTGREQQIVIQSSGGLSKDDIENMVKNAEKYAEEDRRKKERVEAVNMAEGIIHDTETKMEEFKDQLPADECNKLKEEISKMRELLARKDSETGENIRQAASSLQQASLKLFEMAYKKMASEREGSGSSGTGEQKEDQKEEKQ

SEQ ID NO: 48808 - protein, 665 aa, Homo sapiens
MISASRAAAARHQDSWNGLSHEAFRLVSRRDYASEAIKGAVVGIDLGTTNSCVAVMEGKQAKVLENAEGARTTPSVVAFTADGERLVGMPAKRQAVTNPNNTFYATKRLIGRRYDDPEVQKDIKNVPFKIVRASNGDAWVEAHGKLYSPSQIGAFVLMKMKETAENYLGHTAKNAVITVPAYFNDSQRQATKDAGQISGLNVLRVINEPTAAALAYGLDKSEDKVIAVYDLGGGTFDISILEIQKGVFEVKSTNGDTFLGGEDFDQALLRHIVKEFKRETGVDLTKDNMALQRVREAAEKAKCELSSSVQTDINLPYLTMDSSGPKHLNMKLTRAQFEGIVTDLIRRTIAPCQKAMQDAEVSKSDIGEVILVGGMTRMPKVQQTVQDLFGRAPSKAVNPDEAVAIGAAIQGGVLAGDVTDVLLLDVTPLSLGIETLGGVFTKLINRNTTIPTKKSQVFSTAADGQTQVEIKVCQGEREMAGDNKLLGQFTLIGIPPAPRGVPQIEVTFDIDANGIVHVSAKDKGTGREQQIVIQSSGGLSKDDIENMVKNAEKYAEEDRRKKERVEAVNMAEGIIHDTETKMEEFKDQLPADECNKLKEEISKMRELLARKDSETGENIRQAASSLQQASLKLFEMAYKKMASEREGSGSSGTGEQKEDQKEEKQ

SEQ ID NO: 48809 - protein, 632 aa, Homo sapiens
MALVMRLLDLFQGGIMHQKQSREQLLVLIWVLPTPAWQLWKVNKQRCWRMPKVPEPPLQLWPLQQMVSDLLECRPSDRLSPTQTIHFMLPSVSLAGDMMILKYRKTLKMFPLKLSVPPMVMPVLMKMKETAENYLGHTAKNAVITVPAYFNDSQRQATKDAGQISGLNVLRVINEPTAAALAYGLDKSEDKVIAVYDLGGGTFDISILEIQKGVFEVKSTNGDTFLGGEDFDQALLRHIVKEFKRETGVDLTKDNMALQRVREAAEKAKCELSSSVQTDINLPYLTMDSSGPKHLNMKLTRAQFEGIVTDLIRRTIAPCQKAMQDAEVSKSDIGEVILVGGMTRMPKVQQTVQDLFGRAPSKAVNPDEAVAIGAAIQGGVLAGDVTDVLLLDVTPLSLGIETLGGVFTKLINRNTTIPTKKSQVFSTAADGQTQVEIKVCQGEREMAGDNKLLGQFTLIGIPPAPRGVPQIEVTFDIDANGIVHVSAKDKGTGREQQIVIQSSGGLSKDDIENMVKNAEKYAEEDRRKKERVEAVNMAEGIIHDTETKMEEFKDQLPADECNKLKEEISKMRELLARKDSETGENIRQAASSLQQASLKLFEMAYKKMASEREGSGSSGTGEQKEDQKEEKQ

SEQ ID NO: 48810 - protein, 724 aa, Homo sapiens
MPEEVHHGEEEVETFAFQAEIAQLMSLIINTFYSNKEIFLRELISNASDALDKIRYESLTDPSKLDSGKELKIDIIPNPQERTLTLVDTGIGMTKADLINNLGTIAKSGTKAFMEALQAGADISMIGQFGVGFYSAYLVAEKVVVITKHNDDEQYAWESSAGGSFTVRADHGEPIGRGTKVILHLKEDQTEYLEERRVKEVVKKHSQFIGYPITLYLEKEREKEISDDEAEEEKGEKEEEDKDDEEKPKIEDVGSDEEDDSGKDKKKKTKKIKEKYIDQEELNKTKPIWTRNPDDITQEEYGEFYKSLTNDWEDHLAVKHFSVEGQLEFRALLFIPRRAPFDLFENKKKKNNIKLYVRRVFIMDSCDELIPEYLNFIRGVVDSEDLPLNISREMLQQSKILKVIRKNIVKKCLELFSELAEDKENYKKFYEAFSKNLKLGIHEDSTNRRRLSELLRYHTSQSGDEMTSLSEYVSRMKETQKSIYYITGESKEQVANSAFVERVRKRGFEVVYMTEPIDEYCVQQLKEFDGKSLVSVTKEGLELPEDEEEKKKMEESKAKFENLCKLMKEILDKKVEKVTISNRLVSSPCCIVTSTYGWTANMERIMKAQALRDNSTMGYMMAKKHLEINPDHPIVETLRQKAEADKNDKAVKDLVVLLFETALLSSGFSLEDPQTHSNRIYRMIKLGLGIDEDEVAAEEPNAAVPDEIPPLEGDEDASRMEEVD

SEQ ID NO: 48811 - protein, 724 aa, Homo sapiens; identical to SEQ ID NO: 48810

SEQ ID NO: 48812 - protein, 154 aa, Homo sapiens
MDSCDELIPEYLNFIRGVVDSEDLPLNISREMLQQSKILKVIRKNIVKKCLELFSELAEDKENYKKFYEAFSKNLKLGIHEDSTNRRRLSELLRYHTSQSGDEMTSLSEYVSRMKETQKSIYYITGESKEQVCPCPTWLPLLVSSVFFPLLSLC

SEQ ID NO: 48813 - protein, 162 aa, Homo sapiens
MDSCDELIPEYLNFIRGVVDSEDLPLNISREMLQQSKILKVIRKNIVKKCLELFSELAEDKENYKKFYEAFSKNLKLGIHEDSTNRRRLSELLRYHTSQSGDEMTSLSEYVSRMKETQKSIYYITGESKEQVANSAFVERCPCPTWLPLLVSSVFFPLLSLC

SEQ ID NO: 48814 - protein, 183 aa, Homo sapiens
MDSCDELIPEYLNFIRGVVDSEDLPLNISREMLQQSKILKVIRKNIVKKCLELFSELAEDKENYKKFYEAFSKNLKLGIHEDSTNRRRLSELLRYHTSQSGDEMTSLSEYVSRMKETQKSIYYITGSPCWCLVFFSLSCPCVEGSKLRVSSPIPSLLLTAGLDVVYCGLFYFLHFVLKLKYAK

SEQ ID NO: 48815 - protein, 724 aa, Homo sapiens; identical to SEQ ID NO: 48810

SEQ ID NO: 48816 - protein, 142 aa, Homo sapiens
  VARIANT 1: note = MOD_RES - Any amino acid
XFIRGVVDSEDLPLNISREMLQQSKILKVIRKNIVKKCLELFSELAEDKENYKKFYEAFSKNLKLGIHEDSTNRRRLSELLRYHTSQSGDEMTSLSEYVSRMKETQKSIYYITGESKEQVCPCPTWLPLLVSSVFFPLLSLC

SEQ ID NO: 48817 - protein, 150 aa, Homo sapiens
  VARIANT 1: note = MOD_RES - Any amino acid
XFIRGVVDSEDLPLNISREMLQQSKILKVIRKNIVKKCLELFSELAEDKENYKKFYEAFSKNLKLGIHEDSTNRRRLSELLRYHTSQSGDEMTSLSEYVSRMKETQKSIYYITGESKEQVANSAFVERCPCPTWLPLLVSSVFFPLLSLC

SEQ ID NO: 48818 - protein, 171 aa, Homo sapiens
  VARIANT 1: note = MOD_RES - Any amino acid
XFIRGVVDSEDLPLNISREMLQQSKILKVIRKNIVKKCLELFSELAEDKENYKKFYEAFSKNLKLGIHEDSTNRRRLSELLRYHTSQSGDEMTSLSEYVSRMKETQKSIYYITGSPCWCLVFFSLSCPCVEGSKLRVSSPIPSLLLTAGLDVVYCGLFYFLHFVLKLKYAK

SEQ ID NO: 48819 - protein, 168 aa, Homo sapiens
MPEEVHHGEEEVETFAFQAEIAQLMSLIINTFYSNKEIFLRELISNASDALDKIRYESLTDPSKLDSGKELKIDISMIGQFGVGFYSAYLVAEKVVVITKHNDDEQYAWESSAGGSFTVRADHGEPIGRGTKVILHLKEDQTEYLEERRVKEVVKKHSQFIGYPITLY

SEQ ID NO: 48820 - protein, 160 aa, Homo sapiens
MEIPVPVQPSWLRRASAPLPGLSAPGRLFDQRFGEGLLEAELAALCPTTLAPYYLRAPSVALPVAQVPTDPGHFSVLLDVKHFSPEEIAVKVVGEHVEVHARHEERPDEHGFVAREFHRRYRLPPGVDPAAVTSALSPEGVLSIQAAPASAQAPPPAAAK

SEQ ID NO: 48821 - protein, 160 aa, Homo sapiens; identical to SEQ ID NO: 48820

SEQ ID NO: 48822 - protein, 196 aa, Homo sapiens
MEIPVPVQPSWLRRASAPLPGLSAPGRLFDQRFGEGLLEAELAALCPTTLAPYYLRAPSVALPVAQVPTDPGHFSVLLDVKHFSPEEIAVKVVGEHVEVHARHEERPDEHGFVAREFHRRYRLPPGVDPAAVTSALSPEGVLSIQAAPAPREPPQAPSIKADLTPPSQMSRVRQGLSSHPLLDSALTSILDTALIT

SEQ ID NO: 48823 - protein, 529 aa, Homo sapiens
MDLPVGPGAAGPSNVPAFLTKLWTLVSDPDTDALICWSPSGNSFHVFDQGQFAKEVLPKYFKHNNMASFVRQLNMYGFRKVVHIEQGGLVKPERDDTEFQHPCFLRGQEQLLENIKRKVTSVSTLKSEDIKIRQDSVTKLLTDVQLMKGKQECMDSKLLAMKHENEALWREVASLRQKHAQQQKVVNKLIQFLISLVQSNRILGVKRKIPLMLNDSGSAHSMPKYSRQFSLEHVHGSGPYSAPSPAYSSSSLYAPDAVASSGPIISDITELAPASPMASPGGSIDERPLSSSPLVRVKEEPPSPPQSPRVEEASPGRPSSVDTLLSPTALIDSILRESEPAPASVTALTDARGHTDTEGRPPSPPPTSTPEKCLSVACLDKNELSDHLDAMDSNLDNLQTMLSSHGFSVDTSALLDLFSPSVTVPDMSLPDLDSSLASIQELLSPQEPPRPPEAENSSPDSGKQLVHYTAQPLFLLDPGSVDTGSNDLPVLFELGEGSYFSEGDGFAEDPTISLLTGSEPPKAKDPTVS

SEQ ID NO: 48824 - protein, 536 aa, Homo sapiens
MKQSSNVPAFLSKLWTLVEETHTNEFITWSQNGQSFLVLDEQRFAKEILPKYFKHNNMASFVRQLNMYGFRKVVHIDSGIVKQERDGPVEFQHPYFKQGQDDLLENIKRKVSSSKPEENKIRQEDLTKIISSAQKVQIKQETIESRLSELKSENESLWKEVSELRAKHAQQQQVIRKIVQFIVTLVQNNQLVSLKRKRPLLLNTNGAQKKNLFQHIVKEPTDNHHHKVPHSRTEGLKPRERISDDIIIYDVTDDNADEENIPVIPETNEDVISDPSNCSQYPDIVIVEDDNEDEYAPVIQSGEQNEPARESLSSGSDGSSPLMSSAVQLNGSSSLTSEDPVTMMDSILNDNINLLGKVELLDYLDSIDCSLEDFQAMLSGRQFSIDPDLLVDLFTSSVQMNPTDYINNTKSENKGLETTKNNVVQPVSEEGRKSKSKPDKQLIQYTAFPLLAFLDGNPASSVEQASTTASSEVLSSVDKPIEVDELLDSSLDPEPTQSKLVRLEPLTEAEASEATLFYLCELAPAPLDSDMPLLDS

SEQ ID NO: 48825 - protein, 518 aa, Homo sapiens
MKQSSNVPAFLSKLWTLVEETHTNEFITWSQNGQSFLVLDEQRFAKEILPKYFKHNNMASFVRQLNMYGFRKVVHIDSGIVKQERDGPVEFQHPYFKQGQDDLLENIKRKVSSSKPEENKIRQEDLTKIISSAQKVQIKQETIESRLSELKSENESLWKEVSELRAKHAQQQQVIRKIVQFIVTLVQNNQLVSLKRKRPLLLNTNGAQKKNLFQHIVKEPTDNHHHKVPHSRTEGLKPRERISDDIIIYDVTDDNADEENIPVIPETNEDVISDPSNCSQYPDIVIVEDDNEDEYAPVIQSGEQNEPARESLSSGSDGSSPLMSSAVQLNGSSSLTSEDPVTMMDSILNDNINLLGKVELLDYLDSIDCSLEDFQAMLSGRQFSIDPDLLVDSENKGLETTKNNVVQPVSEEGRKSKSKPDKQLIQYTAFPLLAFLDGNPASSVEQASTTASSEVLSSVDKPIEVDELLDSSLDPEPTQSKLVRLEPLTEAEASEATLFYLCELAPAPLDSDMPLLDS

SEQ ID NO: 48826 - protein, 334 aa, Homo sapiens
MGEAGAAEEACRHMGTKEEFVKVRKKDLERLTTEVMQIRDFLPRILNGEVLESFQKLKIVEKNLERKEQELEQLKMDCEHFKARLETVQADNIREKKEKLALRQQLNEAKQQLLQQAEYCTEMGAAACTLLWGVSSSEEVVKAILGGDKALKFFSITGQTMESFVKSLDGDVQELDSDESQFVFALAGIVTNVAAIACGREFLVNSSRVLLDTILQLLGDLKPGQCTKLKVLMLMSLYNVSINLKGLKYISESPGFIPLLWWLLSDPDAEVCLHVLRLVQSVVLEPEVFSKSASEFRSSLPLQRILAMSKSRNPRLQTAAQELLEDLRTLEHNV

SEQ ID NO: 48827 - protein, 259 aa, Homo sapiens
MDCEHFKARLETVQADNIREKKEKLALRQQLNEAKQQLLQQAEYCTEMGAAACTLLWGVSSSEEVVKAILGGDKALKFFSITGQTMESFVKSLDGDVQELDSDESQFVFALAGIVTNVAAIACGREFLVNSSRVLLDTILQLLGDLKPGQCTKLKVLMLMSLYNVSINLKGLKYISESPGFIPLLWWLLSDPDAEVCLHVLRLVQSVVLEPEVFSKSASEFRSSLPLQRILAMSKSRNPRLQTAAQELLEDLRTLEHNV

SEQ ID NO: 48828 - protein, 492 aa, Homo sapiens
MQEAPAALPTEPGPSPVPAFLGKLWALVGDPGTDHLIRWSPSGTSFLVSDQSRFAKEVLPQYFKHSNMASFVRQLNMYGFRKVVSIEQGGLLRPERDHVEFQHPSFVRGREQLLERVRRKVPALRGDDGRWRPEDLGRLLGEVQALRGVQESTEARLRELRQQNEILWREVVTLRQSHGQQHRVIGKLIQCLFGPLQAGPSNAGGKRKLSLMLDEGSSCPTPAKFNTCPLPGALLQDPYFIQSPLPETNLGLSPHRARGPIISDIPEDSPSPEGTRLSPSSDGRREKGLALLKEEPASPGGDGEAGLALAPNECDFCVTAPPPLPVAVVQAILEGKGSFSPEGPRNAQQPEPGDPREIPDRGPLGLESGDRSPESLLPPMLLQPPQESVEPAGPLDVLGPSLQGREWTLMDLDMELSLMQPLVPERGEPELAVKGLNSPSPGKDPTLGAPLLLDVQAALGGPALGLPGALTIYSTPESRTASYLGPEASPSP

SEQ ID NO: 48829 - protein, 462 aa, Homo sapiens
MQEAPAALPTEPGPSPVPAFLGKLWALVGDPGTDHLIRWSPSGTSFLVSDQSRFAKEVLPQYFKHSNMASFVRQLNMYGFRKVVSIEQGGLLRPERDHVEFQHPSFVRGREQLLERVRRKVPALRGDDGRWRPEDLGRLLGEVQALRGVQESTEARLRELRQQNEILWREVVTLRQSHGQQHRVIGKLIQCLFGPLQAGPSNAGGKRKLSLMLDEGSSCPTPAKFNTCPLPGALLQDPYFIQSPSTYSLSQRQIWALALTGPGAPSSLTSQKTLHPLRGPGFLPPVMAGAPPPLPVAVVQAILEGKGSFSPEGPRNAQQPEPGDPREIPDRGPLGLESGDRSPESLLPPMLLQPPQESVEPAGPLDVLGPSLQGREWTLMDLDMELSLMQPLVPERGEPELAVKGLNSPSPGKDPTLGAPLLLDVQAALGGPALGLPGALTIYSTPESRTASYLGPEASPSP

SEQ ID NO: 48830 - protein, 416 aa, Homo sapiens
MQEAPAALPTEPGPSPVPAFLGKLWALVGDPGTDHLIRWSPSGTSFLVSDQSRFAKEVLPQYFKHSNMASFVRQLNMYGFRKVVSIEQGGLLRPERDHVEFQHPSFVRGREQLLERVRRKVPALRGDDGRWRPEDLGRLLGEVQALRGVQESTEARLRELRQQNEILWREVVTLRQSHGQQHRVIGKLIQCLFGPLQAGPSNAGGKRKLSLMLDEGSSCPTPAKFNTCPLPGALLQDPYFIQSPLPETNLGLSPHRARGPIISDIPEDSPSPEGTRLSPSSDGRRGPLGLESGDRSPESLLPPMLLQPPQESVEPAGPLDVLGPSLQGREWTLMDLDMELSLMQPLVPERGEPELAVKGLNSPSPGKDPTLGAPLLLDVQAALGGPALGLPGALTIYSTPESRTASYLGPEASPSP

SEQ ID NO: 48831 - protein, 492 aa, Homo sapiens; identical to SEQ ID NO: 48828

SEQ ID NO: 48832 - skipped

SEQ ID NO: 48833 - protein, 137 aa, Homo sapiens
MSSLIRRVISTAKAPGAIGPYSQAVLVDRTIYISGQIGMDPSSGQLVSGGVAEEAKQALKNMGEILKAAGCDFTNVVKTTVLLADINDFNTVNEIYKQYFKSNFPARAAYQVAALPKGSRIEIEAVAIQGPLTTASL

SEQ ID NO: 48834 - protein, 4834 aa, Homo sapiens
MPSESFCLAAQARLDSKWLKTDIQLAFTRDGLCGLWNEMVKDGEIVYTGTESTQNGELPPRKDDSVEPSGTKKEDLNDKEKKDEEETPAPIYRAKSILDSWVWGKQPDVNELKECLSVLVKEQQALAVQSATTTLSALRLKQRLVILERYFIALNRTVFQENVKVKWKSSGISLPPVDKKSSRPAGKGVEGLARVGSRAALSFAFAFLRRAWRSGEDADLCSELLQESLDALRALPEASLFDESTVSSVWLEVVERATRFLRSVVTGDVHGTPATKGPGSIPLQDQHLALAILLELAVQRGTLSQMLSAILLLLQLWDSGAQETDNERSAQGTSAPLLPLLQRFQSIICRKDAPHSEGDMHLLSGPLSPNESFLRYLTLPQDNELAIDLRQTAVVVMAHLDRLATPCMPPLCSSPTSHKGSLQEVIGWGLIGWKYYANVIGPIQCEGLANLGVTQIACAEKRFLILSRNGRVYTQAYNSDTLAPQLVQGLASRNIVKIAAHSDGHHYLALAATGEVYSWGCGDGGRLGHGDTVPLEEPKVISAFSGKQAGKHVVHIACGSTYSAAITAEGELYTWGRGNYGRLGHGSSEDEAIPMLVAGLKGLKVIDVACGSGDAQTLAVTENGQVWSWGDGDYGKLGRGGSDGCKTPKLIEKLQDLDVVKVRCGSQFSIALTKDGQVYSWGKGDNQRLGHGTEEHVRYPKLLEGLQGKKVIDVAAGSTHCLALTEDSEVHSWGSNDQCQHFDTLRVTKPEPAALPGLDTKHIVGIACGPAQSFAWSSCSEWSIGLRVPFVVDICSMTFEQLDLLLRQVSEGMDGSADWPPPQEKECVAVATLNLLRLQLHAAISHQVDPEFLGLGLGSILLNSLKQTVVTLASSAGVLSTVQSAAQAVLQSGWSVLLPTAEERARALSALLPCAVSGNEVNISPGRRFMIDLLVGSLMADGGLESALHAAITAEIQDIEAKKEAQKEKEIDEQEANASTFHRSRTPLDKDLINTGICESSGKQCLPLVQLIQQLLRNIASQTVARLKDVARRISSCLDFEQHSRERSASLDLLLRFQRLLISKLYPGESIGQTSDISSPELMGVGSLLKKYTALLCTHIGDILPVAASIASTSWRHFAEVAYIVEGDFTGVLLPELVVSIVLLLSKNAGLMQEAGAVPLLGGLLEHLDRFNHLAPGKERDDHEELAWPGIMESFFTGQNCRNNEEVTLIRKADLENHNKDGGFWTVIDGKVYDIKDFQTQSLTGNSILAQFAGEDPVVALEAALQFEDTRESMHAFCVGQYLEPDQEIVTIPDLGSLSSPLIDTERNLGLLLGLHASYLAMSTPLSPVEIECAKWLQSSIFSGGLQTSQIHYSYNEEKDEDHCSSPGGTPASKSRLCSHRRALGDHSQAFLQAIADNNIQDHNVKDFLCQIERYCRQCHLTTPIMFPPEHPVEEVGRLLLCCLLKHEDLGHVALSLVHAGALGIEQVKHRTLPKSVVDVCRVVYQAKCSLIKTHQEQGRSYKEVCAPVIERLRFLFNELRPAVCNDLSIMSKFKLLSSLPRWRRIAQKIIRERRKKRVPKKPESTDDEEKIGNEESDLEEACILPHSPINVDKRPIAIKSPKDKWQPLLSTVTGVHKYKWLKQNVQGLYPQSPLLSTIAEFALKEEPVDVEKMRKCLLKQLERAEVRLEGIDTILKLASKNFLLPSVQYAMFCGWQRLIPEGIDIGEPLTDCLKDVDLIPPFNRMLLEVTFGKLYAWAVQNIRNVLMDASAKFKELGIQPVPLQTITNENPSGPSLGTIPQARFLLVMLSMLTLQHGANNLDLLLNSGMLALTQTALRLIGPSCDNVEEDMNASAQGASATVLEETRKETAPVQLPVSGPELAAMMKIGTRVMRGVDWKWGDQDGPPPGLGRVIGELGEDGWIRVQWDTGSTNSYRMGKEGKYDLKLAELPAAAQPSAEDSDTEDDSEAEQTERNIHPTAMMFTSTINLLQTLCLSAGVHAEIMQSEATKTLCGLLRMLVESGTTDKTSSPNRLVYREQHRSWCTLGFVRSIALTPQVCGALSSPQWITLLMKVVEGHAPFTATSLQRQILAVHLLQAVLPSWDKTERARDMKCLVEKLFDFLGSLLTTCSSDVPLLRESTLRRRRVRPQASLTATHSSTLAEEVVALLRTLHSLTQWNGLINKYINSQLRSITHSFVGRPSEGAQLEDYFPDSENPEVGGLMAVLAVIGGIDGRLRLGGQVMHDEFGEGTVTRITPKGKITVQFSDMRTCRVCPLNQLKPLPAVAFNVNNLPFTEPMLSVWAQLVNLAGSKLEKHKIKKSTKQAFAGQVDLDLLRCQQLKLYILKAGRALLSHQDKLRQILSQPAVQETGTVHTDDGAVVSPDLGDMSPEGPQPPMILLQQLLASATQPSPVKAIFDKQELEAAALAVCQCLAVESTHPSSPGFEDCSSSEATTPVAVQHIRPARVKRRKQSPVPALPIVVQLMEMGFSRRNIEFALKSLTGASGNASSLPGVEALVGWLLDHSDIQVTELSDADTVSDEYSDEEVVEDVDDAAYSMSTGAVVTESQTYKKRADFLSNDDYAVYVRENIQVGMMVRCCRAYEEVCEGDVGKVIKLDRDGLHDLNVQCDWQQKGGTYWVRYIHVELIGYPPPSSSSHIKIGDKVRVKASVTTPKYKWGSVTHQSVGVVKAFSANGKDIIVDFPQQSHWTGLLSEMELVPSIHPGVTCDGCQMFPINGSRFKCRNCDDFDFCETCFKTKKHNTRHTFGRINEPGQSAVFCGRSGKQLKRCHSSQPGMLLDSWSRMVKSLNVSSSVNQASRLIDGSEPCWQSSGSQGKHWIRLEIFPDVLVHRLKMIVDPADSSYMPSLVVVSGGNSLNNLIELKTININPSDTTVPLLNDCTEYHRYIEIAIKQCRSSGIDCKIHGLILLGRIRAEEEDLAAVPFLASDNEEEEDEKGNSGSLIRKKAAGLESAATIRTKVFVWGLNDKDQLGGLKGSKIKVPSFSETLSALNVVQVAGGSKSLFAVTVEGKVYACGEATNGRLGLGISSGTVPIPRQITALSSYVVKKVAVHSGGRHATALTVDGKVFSWGEGDDGKLGHFSRMNCDKPRLIEALKTKRIRDIACGSSHSAALTSSGELYTWGLGEYGRLGHGDNTTQLKPKMVKVLLGHRVIQVACGSRDAQTLALTDEGLVFSWGDGDFGKLGRGGSEGCNIPQNIERLNGQGVCQIECGAQFSLALTKSGVVWTWGKGDYFRLGHGSDVHVRKPQVVEGLRGKKIVHVAVGALHCLAVTDSGQVYAWGDNDHGQQGNGTTTVNRKPTLVQGLEGQKITRVACGSSHSVAWTTVDVATPSVHEPVLFQTARDPLGASYLGVPSDADSSAASNKISGASNSKPNRPSLAKILLSLDGNLAKQQALSHILTALQIMYARDAVVGALMPAAMIAPVECPSFSSAAPSDASAMASPMNGEECMLAVDIEDRLSPNPWQEKREIVSSEDAVTPSAVTPSAPSASARPFIPVTDDLGAASIIAETMTKTKEDVESQNKAAGPEPQALDEFTSLLIADDTRVVVDLLKLSVCSRAGDRGRDVLSAVLSGMGTAYPQVADMLLELCVTELEDVATDSQSGRLSSQPVVVESSHPYTDDTSTSGTVKIPGAEGLRVEFDRQCSTERRHDPLTVMDGVNRIVSVRSGREWSDWSSELRIPGDELKWKFISDGSVNGWGWRFTVYPIMPAAGPKELLSDRCVLSCPSMDLVTCLLDFRLNLASNRSIVPRLAASLAACAQLSALAASHRMWALQRLRKLLTTEFGQSININRLLGENDGETRALSFTGSALAALVKGLPEALQRQFEYEDPIVRGGKQLLHSPFFKVLVALACDLELDTLPCCAETHKWAWFRRYCMASRVAVALDKRTPLPRLFLDEVAKKIRELMADSENMDVLHESHDIFKREQDEQLVQWMNRRPDDWTLSAGGSGTIYGWGHNHRGQLGGIEGAKVKVPTPCEALATLRPVQLIGGEQTLFAVTADGKLYATGYGAGGRLGIGGTESVSTPTLLESIQHVFIKKVAVNSGGKHCLALSSEGEVYSWGEAEDGKLGHGNRSPCDRPRVIESLRGIEVVDVAAGGAHSACVTAAGDLYTWGKGRYGRLGHSDSEDQLKPKLVEALQGHRVVDIACGSGDAQTLCLTDDDTVWSWGDGDYGKLGRGGSDGCKVPMKIDSLTGLGVVKVECGSQFSVALTKSGAVYTWGKGDYHRLGHGSDDHVRRPRQVQGLQGKKVIAIATGSLHCVCCTEDGEVYTWGDNDEGQLGDGTTNAIQRPRLVAALQGKKVNRVACGSAHTLAWSTSKPASAGKLPAQVPMEYNHLQEIPIIALRNRLLLLHHLSELFCPCIPMFDLEGSLDETGLGPSVGFDTLRGILISQGKEAAFRKVVQATMVRDRQHGPVVELNRIQVKRSRSKGGLAGPDGTKSVFGQMCAKMSSFGPDSLLLPHRVWKVKFVGESVDDCGGGYSESIAEICEELQNGLTPLLIVTPNGRDESGANRDCYLLSPAARAPVHSSMFRFLGVLLGIAIRTGSPLSLNLAEPVWKQLAGMSLTIADLSEVDKDFIPGLMYIRDNEATSEEFEAMSLPFTVPSASGQDIQLSSKHTHITLDNRAEYVRLAINYRLHEFDEQVAAVREGMARVVPVPLLSLFTGYELETMVCGSPDIPLHLLKSVATYKGIEPSASLIQWFWEVMESFSNTERSLFLRFVWGRTRLPRTIADFRGRDFVIQVLDKYNPPDHFLPESYTCFFLLKLPRYSCKQVLEEKLKYAIHFCKSIDTDDYARIALTGEPAADDSSDDSDNEDVDSFASDSTQDYLTGH

SEQ ID NO: 48835 - protein, 1024 aa, Homo sapiens
MERRSRRKSRRNGRSTAGKAAATQPAKSPGAQLWLFPSAAGLHRALLRRVEVTRQLCCSPGRLAVLERGGAGVQVHQLLAGSGGARTPKCIKLGKNMKIHSVDQGAEHMLILSSDGKPFEYDNYSMKHLRFESILQEKKIIQITCGDYHSLALSKGGELFAWGQNLHGQLGVGRKFPSTTTPQIVEHLAGVPLAQISAGEAHSMALSMSGNIYSWGKNECGQLGLGHTESKDDPSLIEGLDNQKVEFVACGGSHSALLTQDGLLFTFGAGKHGQLGHNSTQNELRPCLVAELVGYRVTQIACGRWHTLAYVSDLGKVFSFGSGKDGQLGNGGTRDQLMPLPVKVSSSEELKLESHTSEKELIMIAGGNQSILLWIKKENSYVNLKRTIPTLNEGTVKRWIADVETKRWQSTKREIQEIFSSPACLTGSFLRKRRTTEMMPVYLDLNKARNIFKELTQKDWITNMITTCLKDNLLKRLPFHSPPQEALEIFFLLPECPMMHISNNWESLVVPFAKVVCKMSDQSSLVLEEYWATLQESTFSKLVQMFKTAVICQLDYWDESAEENGNVQALLEMLKKLHRVNQVKCQLPESIFQVDELLHRLNFFVEVCRRYLWKMTVDASENVQCCVIFSHFPFIFNNLSKIKLLHTDTLLKIESKKHKAYLRSAAIEEERESEFALRPTFDLTVRRNHLIEDVLNQLSQFENEDLRKELWVSFSGEIGYDLGGVKKEFFYCLFAEMIQPEYGMFMYPEGASCMWFPVKPKFEKKRYFFFGVLCGLSLFNCNVANLPFPLALFKKLLDQMPSLEDLKELSPDLGKNLQTLLDDEGDNFEEVFYIHFNVHWDRNDTNLIPNGSSITVNQTNKRDYVSKYINYIFNDSVKAVYEEFRRGFYKMCDEDIIKLFHPEELKDVIVGNTDYDWKTFEKNARYEPGYNSSHPTIVMFWKAFHKLTLEEKKKFLVFLTGTDRLQMKDLNNMKITFCCPESWNERDPIRALTCFSVLFLPKYSTMETVEEALQEAINNNRGFG

SEQ ID NO: 48836 - protein, 1672 aa, Homo sapiens
MKVDRTKLKKTPTEAPADCRALIDKLKVCNDEQLLLELQQIKTWNIGKCELYHWVDLLDRFDGILADAGQTVENMSWMLVCDRPEREQLKMLLLAVLNFTALLIEYSFSRHLYSSIEHLTTLLASSDMQVVLAVLNLLYVFSKRSNYITRLGSDKRTPLLTRLQHLAESWGGKENGFGLAECCRDLHMMKYPPSATTLHFEFYADPGAEVKIEKRTTSNTLHYIHIEQLDKISESPSEIMESLTKMYSIPKDKQMLLFTHIRLAHGFSNHRKRLQAVQARLHAISILVYSNALQESANSILYNGLIEELVDVLQITDKQLMEIKAASLRTLTSIVHLERTPKLSSIIDCTGTASYHGFLPVLVRNCIQAMIDPSMDPYPHQFATALFSFLYHLASYDAGGEALVSCGMMEALLKVIKFLGDEQDQITFVTRAVRVVDLITNLDMAAFQSHSGLSIFIYRLEHEVDLCRKECPFVIKPKIQRPNTTQEGEEMETDMDGVQCIPQRAALLKSMLNFLKKAIQDPAFSDGIRHVMDGSLPTSLKHIISNAEYYGPSLFLLATEVVTVFVFQEPSLLSSLQDNGLTDVMLHALLIKDVPATREVLGSLPNVFSALCLNARGLQSFVQCQPFERLFKVLLSPDYLPAMRRRRSSDPLGDTASNLGSAVDELMRHQPTLKTDATTAIIKLLEEICNLGRDPKYICQKPSIQKADGTATAPPPRSNHAAEEASSEDEEEEEVQAMQSFNSTQQNETEPNQQVVGTEERIPIPLMDYILNVMKFVESILSNNTTDDHCQEFVNQKGLLPLVTILGLPNLPIDFPTSAACQAVAGVCKSILTLSHEPKVLQEGLLQLDSILSSLEPLHRPIESPGGSVLLRELACAGNVADATLSAQATPLLHALTAAHAYIMMFVHTCRVGQSEIRSISVNQWGSQLGLSVLSKLSQLYCSLVWESTVLLSLCTPNSLPSGCEFGQADMQKLVPKDEKAGTTQGGKRSDGEQDGAAGSMDASTQGLLEGIGLDGDTLAPMETDEPTASDSKGKSKITPAMAARIKQIKPLLSASSRLGRALAELFGLLVKLCVGSPVRQRRSHHAASTTTAPTPAARSTASALTKLLTKGLSWQPPPYTPTPRFRLTFFICSVGFTSPMLFDERKYPYHLMLQKFLCSGGHNALFETFNWALSMGGKVPVSEGLEHSDLPDGTGEFLDAWLMLVEKMVNPTTVLESPHSLPAKLPGGVQNFPQFSALRFLVVTQKAAFTCIKNLWNRKPLKVYGGRMAESMLAILCHILRGEPVIRERLSKEKEGSRGEEDTGQEEGGSRREPQVNQQQLQQLMDMGFTREHAMEALLNTSTMEQATEYLLTHPPPIMGGVVRDLSMSEEDQMMRAIAMSLGQDIPMDQRAESPEEVACRKEEEERKAREKQEEEEAKCLEKFQDADPLEQDELHTFTDTMLPGCFHLLDELPDTVYRVCDLIMTAIKRNGADYRDMILKQVVNQVWEAADVLIKAALPLTTSDTKTVSEWISQMATLPQASNLATRILLLTLLFEELKLPCAWVVESSGILNVLIKLLEVVQPCLQAAKEQKEVQTPKWITPVLLLIDFYEKTAISSKRRAQMTKYLQSNSNNWRWFDDRSGRWCSYSASNNSTIDSAWKSGETSVRFTAGRRRYTVQFTTMVQGTSAE

SEQ ID NO: 48837 - protein, 4374 aa, Homo sapiens
MKVDRTKLKKTPTEAPADCRALIDKLKVCNDEQLLLELQQIKTWNIGKCELYHWVDLLDRFDGILADAGQTVENMSWMLVCDRPEREQLKMLLLAVLNFTALLIEYSFSRHLYSSIEHLTTLLASSDMQVVLAVLNLLYVFSKRSNYITRLGSDKRTPLLTRLQHLAESWGGKENGFGLAECCRDLHMMKYPPSATTLHFEFYADPGAEVKIEKRTTSNTLHYIHIEQLDKISESPSEIMESLTKMYSIPKDKQMLLFTHIRLAHGFSNHRKRLQAVQARLHAISILVYSNALQESANSILYNGLIEELVDVLQITDKQLMEIKAASLRTLTSIVHLERTPKLSSIIDCTGTASYHGFLPVLVRNCIQAMIDPSMDPYPHQFATALFSFLYHLASYDAGGEALVSCGMMEALLKVIKFLGDEQDQITFVTRAVRVVDLITNLDMAAFQSHSGLSIFIYRLEHEVDLCRKECPFVIKPKIQRPNTTQEGEEMETDMDGVQCIPQRAALLKSMLNFLKKAIQDPAFSDGIRHVMDGSLPTSLKHIISNAEYYGPSLFLLATEVVTVFVFQEPSLLSSLQDNGLTDVMLHALLIKDVPATREVLGSLPNVFSALCLNARGLQSFVQCQPFERLFKVLLSPDYLPAMRRRRSSDPLGDTASNLGSAVDELMRHQPTLKTDATTAIIKLLEEICNLGRDPKYICQKPSIQKADGTATAPPPRSNHAAEEASSEDEEEEEVQAMQSFNSTQQNETEPNQQVVGTEERIPIPLMDYILNVMKFVESILSNNTTDDHCQEFVNQKGLLPLVTILGLPNLPIDFPTSAACQAVAGVCKSILTLSHEPKVLQEGLLQLDSILSSLEPLHRPIESPGGSVLLRELACAGNVADATLSAQATPLLHALTAAHAYIMMFVHTCRVGQSEIRSISVNQWGSQLGLSVLSKLSQLYCSLVWESTVLLSLCTPNSLPSGCEFGQADMQKLVPKDEKAGTTQGGKRSDGEQDGAAGSMDASTQGLLEGIGLDGDTLAPMETDEPTASDSKGKSKITPAMAARIKQIKPLLSASSRLGRALAELFGLLVKLCVGSPVRQRRSHHAASTTTAPTPAARSTASALTKLLTKGLSWQPPPYTPTPRFRLTFFICSVGFTSPMLFDERKYPYHLMLQKFLCSGGHNALFETFNWALSMGGKVPVSEGLEHSDLPDGTGEFLDAWLMLVEKMVNPTTVLESPHSLPAKLPGGVQNFPQFSALRFLVVTQKAAFTCIKNLWNRKPLKVYGGRMAESMLAILCHILRGEPVIRERLSKEKEGSRGEEDTGQEEGGSRREPQVNQQQLQQLMDMGFTREHAMEALLNTSTMEQATEYLLTHPPPIMGGVVRDLSMSEEDQMMRAIAMSLGQDIPMDQRAESPEEVACRKEEEERKAREKQEEEEAKCLEKFQDADPLEQDELHTFTDTMLPGCFHLLDELPDTVYRVCDLIMTAIKRNGADYRDMILKQVVNQVWEAADVLIKAALPLTTSDTKTVSEWISQMATLPQASNLATRILLLTLLFEELKLPCAWVVESSGILNVLIKLLEVVQPCLQAAKEQKEVQTPKWITPVLLLIDFYEKTAISSKRRAQMTKYLQSNSNNWRWFDDRSGRWCSYSASNNSTIDSAWKSGETSVRFTAGRRRYTVQFTTMVQVNEETGNRRPVMLTLLRVPRLNKNSKNSNGQELEKTLEESKEMDIKRKENKGNDTPLALESTNTEKETSLEETKIGEILIQGLTEDMVTVLIRACVSMLGVPVDPDTLHATLRLCLRLTRDHKYAMMFAELKSTRMILNLTQSSGFNGFTPLVTLLLRHIIEDPCTLRHTMEKVVRSAATSGAGSTTSGVVSGSLGSREINYILRVLGPAACRNPDIFTEVANCCIRIALPAPRGSGTASDDEFENLRIKGPNAVQLVKTTPLKPSPLPVIPDTIKEVIYDMLNALAAYHAPEEADKSDPKPGVMTQEVGQLLQDMGDDVYQQYRSLTRQSSDFDTQSGFSINSQVFAADGASTETSASGTSQGEASTPEESRDGKKDKEGDRASEEGKQKGKGSKPLMPTSTILRLLAELVRSYVGIATLIANYSYTVGQSELIKEDCSVLAFVLDHLLPHTQNAEDKDTPALARLFLASLAAAGSGTDAQVALVNEVKAALGRALAMAESTEKHARLQAVMCIISTIMESCPSTSSFYSSATAKTQHNGMNNIIRLFLKKGLVNDLARVPHSLDLSSPNMANTVNAALKPLETLSRIVNQPSSLFGSKSASSKNKSEQDAQGASQDSSSNQQDPGEPGEAEVQEEDHDVTQTEVADGDIMDGEAETDSVVIAGQPEVLSSQEMQVENELEDLIDELLERDGGSGNSTIIVSRSGEDESQEDVLMDEAPSNLSQASTLQANREDSMNILDPEDEEEHTQEEDSSGSNEDEDDSQDEEEEEEEDEEDDQEDDEGEEGDEDDDDDGSEMELDEDYPDMNASPLVRFERFDREDDLIIEFDNMFSSATDIPPSPGNIPTTHPLMVRHADHSSLTLGSGSSTTRLTQGIGRSQRTLRQLTANTGHTIHVHYPGNRQPNPPLILQRLLGPSAAADILQLSSSLPLQSRGRARLLVGNDDVHIIARSDDELLDDFFHDQSTATSQAGTLSSIPTALTRWTEECKVLDAESMHDCVSVVKVSIVNHLEFLRDEELEERREKRRKQLAEEETKITDKGKEDKENRDQSAQCTASKSNDSTEQNLSDGTPMPDSYPTTPSSTDAATSESKETLGTLQSSQQQPTLPTPPALGEVPQELQSPAGEGGSSTQLLMPVEPEELGPTRPSGEAETTQMELSPAPTITSLSPERAEDSDALTAVSSQLEGSPMDTSSLASCTLEEAVGDTSAAGSSEQPRAGSSTPGDAPPAVAEVQGRSDGSGESAQPPEDSSPPASSESSSTRDSAVAISGADSRGILEEPLPSTSSEEEDPLAGISLPEGVDPSFLAALPDDIRREVLQNQLGIRPPTRTAPSTNSSAPAVVGNPGVTEVSPEFLAALPPAIQEEVLAQQRAEQQRRELAQNASSDTPMDPVTFIQTLPSDLRRSVLEDMEDSVLAVMPPDIAAEAQALRREQEARQRQLMHERLFGHSSTSALSAILRSPAFTSRLSGNRGVQYTRLAVQRGGTFQMGGSSSHNRPSGSNVDTLLRLRGRLLLDHEALSCLLVLLFVDEPKLNTSRLHRVLRNLCYHAQTRHWVIRSLLSILQRSSESELCIETPKLTTSEEKGKKSSKSCGSSSHENRPLDLLHKMESKSSNQLSWLSVSMDAALGCRTNIFQIQRSGGRKHTEKHASGGSTVHIHPQAAPVVCRHVLDTLIQLAKVFPSHFTQQRTKETNCESDRERGNKACSPCSSQSSSSGICTDFWDLLVKLDNMNVSRKGKNSVKSVPVSAGGEGETSPYSLEASPLGQLMNMLSHPVIRRSSLLTEKLLRLLSLISIALPENKVSEAQANSGSGASSTTTATSTTSTTTTTAASTTPTPPTAPTPVTSAPALVAATAISTIVVAASTTVTTPTTATTTVSISPTTKGSKSPAKVSDGGSSSTDFKMVSSGLTENQLQLSVEVLTSHSCSEEGLEDAANVLLQLSRGDSGTRDTVLKLLLNGARHLGYTLCKQIGTLLAELREYNLEQQRRAQCETLSPDGLPEEQPQTTKLKGKMQSRFDMAENVVIVASQKRPLGGRELQLPSMSMLTSKTSTQKFFLRVLQVIIQLRDDTRRANKKAKQTGRLGSSGLGSASSIQAAVRQLEAEADAIIQMVREGQRARRQQQAATSESSQSEASVRREESPMDVDQPSPSAQDTQSIASDGTPQGEKEKEERPPELPLLSEQLSLDELWDMLGECLKELEESHDQHAVLVLQPAVEAFFLVHATERESKPPVRDTRESQLAHIKDEPPPLSPAPLTPATPSSLDPFFSREPSSMHISSSLPPDTQKFLRFAETHRTVLNQILRQSTTHLADGPFAVLVDYIRVLDFDVKRKYFRQELERLDEGLRKEDMAVHVRRDHVFEDSYRELHRKSPEEMKNRLYIVFEGEEGQDAGGLLREWYMIISREMFNPMYALFRTSPGDRVTYTINPSSHCNPNHLSYFKFVGRIVAKAVYDNRLLECYFTRSFYKHILGKSVRYTDMESEDYHFYQGLVYLLENDVSTLGYDLTFSTEVQEFGVCEVRDLKPNGANILVTEENKKEYVHLVCQMRMTGAIRKQLAAFLEGFYEIIPKRLISIFTEQELELLISGLPTIDIDDLKSNTEYHKYQSNSIQIQWFWRALRSFDQADRAKFLQFVTGTSKVPLQGFAALEGMNGIQKFQIHRDDRSTDRLPSAHTCFNQLDLPAYESFEKLRHMLLLAIQECSEGFGLA

SEQ ID NO: 48838 - protein, 4374 aa, Homo sapiens; identical to SEQ ID NO: 48837

SEQ ID NO: 48839 - protein, 256 aa, Homo sapiens
MDPYPHQFATALFSFLYHLASYDAGGEALVSCGMMEALLKVIKFLGDEQDQITFVTRAVRVVDLITNLDMAAFQSHSGLSIFIYRLEHEVDLCRKECPFVIKPKIQRPNTTQEGEEMETDMDVADVAMESSPGSSISMEHRLDVELRASGSSSSTNISSGPSPGPSPGTGPGPGPGPGPGPGPGPGPGPGPGPGPGPGPGPRPGVQCIPQRAALLKSMLNFLKKAIQDPAFSDGIRHVMDGSLPTSLKHIISNAEY

SEQ ID NO: 48840 - protein, 228 aa, Homo sapiens
  VARIANT 1: note = MOD_RES - Any amino acid
XVSCGMMEALLKVIKFLGDEQDQITFVTRAVRVVDLITNLDMAAFQSHSGLSIFIYRLEHEVDLCRKECPFVIKPKIQRPNTTQEGEEMETDMDVADVAMESSPGSSISMEHRLDVELRASGSSSSTNISSGPSPGPSPGTGPGPGPGPGPGPGPGPGPGPGPGPGPGPGPGPRPGVQCIPQRAALLKSMLNFLKKAIQDPAFSDGIRHVMDGSLPTSLKHIISNAEY

SEQ ID NO: 48841 - protein, 1197 aa, Homo sapiens
  VARIANT 1: note = MOD_RES - Any amino acid
XPSGSNVDTLLRLRGRLLLDHEALSCLLVLLFVDEPKLNTSRLHRVLRNLCYHAQTRHWVIRSLLSILQRSSESELCIETPKLTTSEEKGKKSSKSCGSSSHENRPLDLLHKMESKSSNQLSWLSVSMDAALGCRTNIFQIQRSGGRKHTEKHASGGSTVHIHPQAAPVVCRHVLDTLIQLAKVFPSHFTQQRTKETNCESDRERGNKACSPCSSQSSSSGICTDFWDLLVKLDNMNVSRKGKNSVKSVPVSAGGEGETSPYSLEASPLGQLMNMLSHPVIRRSSLLTEKLLRLLSLISIALPENKVSEAQANSGSGASSTTTATSTTSTTTTTAASTTPTPPTAPTPVTSAPALVAATAISTIVVAASTTVTTPTTATTTVSISPTTKGSKSPAKVSDGGSSSTDFKMVSSGLTENQLQLSVEVLTSHSCSEEGLEDAANVLLQLSRGDSGTRDTVLKLLLNGARHLGYTLCKQIGTLLAELREYNLEQQRRAQCETLSPDGLPEEQPQTTKLKGKMQSRFDMAENVVIVASQKRPLGGRELQLPSMSMLTSKTSTQKFFLRVLQVIIQLRDDTRRANKKAKQTGRLGSSGLGSASSIQAAVRQLEAEADAIIQMSESSQSEASVRREESPMDVDQPSPSAQDTQSIASDGTPQGEKEKEERPPELPLLSEQLSLDELWDMLGECLKELEESHDQHAVLVLQPAVEAFFLVHATERESKPPVRDTRESQLAHIKDEPPPLSPAPLTPATPSSLDPFFSREPSSMHISSSLPPDTQKFLRFAETHRTVLNQILRQSTTHLADGPFAVLVDYIRVLDFDVKRKYFRQELERLDEGLRKEDMAVHVRRDHVFEDSYRELHRKSPEEMKNRLYIVFEGEEGQDAGGLLREWYMIISREMFNPMYALFRTSPGDRVTYTINPSSHCNPNHLSYFKFVGRIVAKAVYDNRLLECYFTRSFYKHILGKSVRYTDMESEDYHFYQGLVYLLENDVSTLGYDLTFSTEVQEFGVCEVRDLKPNGANILVTEENKKEYVHLVCQMRMTGAIRKQLAAFLEGFYEIIPKRLISIFTEQELELLISGLPTIDIDDLKSNTEYHKYQSNSIQIQWFWRALRSFDQADRAKFLQFVTGTSKVPLQGFAALEGMNGIQKFQIHRDDRSTDRLPSAHTCFNQLDLPAYESFEKLRHMLLLAIQECSEGFGLA

SEQ ID NO: 48842 - protein, 3408 aa, Homo sapiens
  VARIANT 1: note = MOD_RES - Any amino acid
XSLPSGCEFGQADMQKLVPKDEKADGEQDGAAGSMDASTQGLLEGIGLDGDTLAPMETDEPTASDSKGKSKITPAMAARIKQIKPLLSASSRLGRALAELFGLLVKLCVGSPVRQRRSHHAASTTTAPTPAARSTASALTKLLTKGLSWQPPPYTPTPRFRLTFFICSVGFTSPMLFDERKYPYHLMLQKFLCSGGHNALFETFNWALSMGGKVPVSEGLEHSDLPDGTGEFLDAWLMLVEKMVNPTTVLESPHSLPAKLPGGVQNFPQFSALRFLVVTQKAAFTCIKNLWNRKPLKVYGGRMAESMLAILCHILRGEPVIRERLSKEKEGSRGEEDTGQEEGGSRREPQVNQQQLQQLMDMGFTREHAMEALLNTSTMEQATEYLLTHPPPIMGGVVRDLSMSEEDQMMRAIAMSLGQDIPMDQRAESPEEVACRKEEEERKAREKQEEEEAKCLEKFQDADPLEQDELHTFTDTMLPGCFHLLDELPDTVYRVCDLIMTAIKRNGADYRDMILKQVVNQVWEAADVLIKAALPLTTSDTKTVSEWISQMATLPQASNLATRILLLTLLFEELKLPCAWVVESSGILNVLIKLLEVVQPCLQAAKEQKEVQTPKWITPVLLLIDFYEKTAISSKRRAQMTKYLQSNSNNWRWFDDRSGRWCSYSASNNSTIDSAWKSGETSVRFTAGRRRYTVQFTTMVQVNEETGNRRPVMLTLLRVPRLNKNSKNSNGQELEKTLEESKEMDIKRKENKGNDTPLALESTNTEKETSLEETKIGEILIQGLTEDMVTVLIRACVSMLGVPVDPDTLHATLRLCLRLTRDHKYAMMFAELKSTRMILNLTQSSGFNGFTPLVTLLLRHIIEDPCTLRHTMEKVVRSAATSGAGSTTSGVVSGSLGSREINYILRVLGPAACRNPDIFTEVANCCIRIALPAPRGSGTASDDEFENLRIKGPNAVQLVKTTPLKPSPLPVIPDTIKEVIYDMLNALAAYHAPEEADKSDPKPGVMTQEVGQLLQDMGDDVYQQYRSLTRQSSDFDTQSGFSINSQVFAADGASTETSASGTSQGEASTPEESRDGKKDKEGDRASEEGKQKGKGSKPLMPTSTILRLLAELVRSYVGIATLIANYSYTVGQSELIKEDCSVLAFVLDHLLPHTQNAEDKDTPALARLFLASLAAAGSGTDAQVALVNEVKAALGRALAMAESTEKHARLQAVMCIISTIMESCPSTSSFYSSATAKTQHNGMNNIIRLFLKKGLVNDLARVPHSLDLSSPNMANTVNAALKPLETLSRIVNQPSSLFGSKSASSKNKSEQDAQGASQDSSSNQQDPGEPGEAEVQEEDHDVTQTEVADGDIMDGEAETDSVVIAGQPEVLSSQEMQVENELEDLIDELLERDGGSGNSTIIVSRSGEDESQEDVLMDEAPSNLSQASTLQANREDSMNILDPEDEEEHTQEEDSSGSNEDEDDSQDEEEEEEEDEEDDQEDDEGEEGDEDDDDDGSEMELDEDYPDMNASPLVRFERFDREDDLIIEFDNMFSSATDIPPSPGNIPTTHPLMVRHADHSSLTLGSGSSTTRLTQGIGRSQRTLRQLTANTGHTIHVHYPGNRQPNPPLILQRLLGPSAAADILQLSSSLPLQSRGRARLLVGNDDVHIIARSDDELLDDFFHDQSTATSQAGTLSSIPTALTRWTEECKVLDAESMHDCVSVVKVSIVNHLEFLRDEELEERREKRRKQLAEEETKITDKGKEDKENRDQSAQCTASKSNDSTEQNLSDGTPMPDSYPTTPSSTDAATSESKETLGTLQSSQQQPTLPTPPALGEVPQELQSPAGEGGSSTQLLMPVEPEELGPTRPSGEAETTQMELSPAPTITSLSPERAEDSDALTAVSSQLEGSPMDTSSLASCTLEEAVGDTSAAGSSEQPRAGSSTPGDAPPAVAEVQGRSDGSGESAQPPEDSSPPASSESSSTRDSAVAISGADSRGILEEPLPSTSSEEEDPLAGISLPEGVDPSFLAALPDDIRREVLQNQLGIRPPTRTAPSTNSSAPAVVGNPGVTEVSPEFLAALPPAIQEEVLAQQRAEQQRRELAQNASSDTPMDPVTFIQTLPSDLRRSVLEDMEDSVLAVMPPDIAAEAQALRREQEARQRQLMHERLFGHSSTSALSAILRSPAFTSRLSGNRGVQYTRLAVQRGGTFQMGGSSSHNRPSGSNVDTLLRLRGRLLLDHEALSCLLVLLFVDEPKLNTSRLHRVLRNLCYHAQTRHWVIRSLLSILQRSSESELCIETPKLTTSEEKGKKSSKSCGSSSHENRPLDLLHKMESKSSNQLSWLSVSMDAALGCRTNIFQIQRSGGRKHTEKHASGGSTVHIHPQAAPVVCRHVLDTLIQLAKVFPSHFTQQRTKETNCESDRERGNKACSPCSSQSSSSGICTDFWDLLVKLDNMNVSRKGKNSVKSVPVSAGGEGETSPYSLEASPLGQLMNMLSHPVIRRSSLLTEKLLRLLSLISIALPENKVSEAQANSGSGASSTTTATSTTSTTTTTAASTTPTPPTAPTPVTSAPALVAATAISTIVVAASTTVTTPTTATTTVSISPTTKGSKSPAKVSDGGSSSTDFKMVSSGLTENQLQLSVEVLTSHSCSEEGLEDAANVLLQLSRGDSGTRDTVLKLLLNGARHLGYTLCKQIGTLLAELREYNLEQQRRAQCETLSPDGLPEEQPQTTKLKGKMQSRFDMAENVVIVASQKRPLGGRELQLPSMSMLTSKTSTQKFFLRVLQVIIQLRDDTRRANKKAKQTGRLGSSGLGSASSIQAAVRQLEAEADAIIQMVREGQRARRQQQAATSESSQSEASVRREESPMDVDQPSPSAQDTQSIASDGTPQGEKEKEERPPELPLLSEQLSLDELWDMLGECLKELEESHDQHAVLVLQPAVEAFFLVHATERESKPPVRDTRESQLAHIKDEPPPLSPAPLTPATPSSLDPFFSREPSSMHISSSLPPDTQKFLRFAETHRTVLNQILRQSTTHLADGPFAVLVDYIRVLDFDVKRKYFRQELERLDEGLRKEDMAVHVRRDHVFEDSYRELHRKSPEEMKNRLYIVFEGEEGQDAGGLLREWYMIISREMFNPMYALFRTSPGDRVTYTINPSSHCNPNHLSYFKFVGRIVAKAVYDNRLLECYFTRSFYKHILGKSVRYTDMESEDYHFYQGLVYLLENDVSTLGYDLTFSTEVQEFGVCEVRDLKPNGANILVTEENKKEYVHLVCQMRMTGAIRKQLAAFLEGFYEIIPKRLISIFTEQELELLISGLPTIDIDDLKSNTEYHKYQSNSIQIQWFWRALRSFDQADRAKFLQFVTGTSKVPLQGFAALEGMNGIQKFQIHRDDRSTDRLPSAHTCFNQLDLPAYESFEKLRHMLLLAIQECSEGFGLA

SEQ ID NO: 48843 - protein, 216 aa, Homo sapiens
MKVDRTKLKKTPTEAPADCRALIDKLKVCNDEQLLLELQQIKTWNIGKCELYHWVDLLDRFDGILADAGQTVENMSWMLVCDRPEREQLKMLLLAVLNFTALLIEYSFSRHLYSSIEHLTTLLASSDMQVVLAVLNLLYVFSKRSNYITRLGSDKRTPLLTRLQHLAESWGGKENGFGLAECCRDLHMMKYPPSATTLHFEFYADPGAEVKIEKRK

SEQ ID NO: 48844 - protein, 93 aa, Homo sapiens
MKVDRTKLKKTPTEAPADCRALIDKLKVCNDEQLLLELQQIKTWNIGKCELYHWVDLLDRFDGILADAGQTVENMSWMLVCDRPEREQLKMLL

SEQ ID NO: 48845 - protein, 493 aa, Homo sapiens
MLPRWELALYLLASLGFHFYSFYEVYKVSREHEEELDQEFELETDTLFGGLKKDATDFEWSFWMEWGKQWLVWLLLGHMVVSQMATLLARKHRPWILMLYGMWACWCVLGTPGVAMVLLHTTISFCVAQFRSQLLTWLCSLLLLSTLRLQGVEEVKRRWYKTENEYYLLQFTLTVRCLYYTSFSLELCWQQLPAASTSYSFPWMLAYVFYYPVLHNGPILSFSEFIKQMQQQEHDSLKASLCVLALGLGRLLCWWWLAELMAHLMYMHAIYSSIPLLETVSCWTLGGLALAQVLFFYVKYLVLFGVPALLMRLDGLTPPALPRCVSTMFSFTGMWRYFDVGLHNFLIRYVYIPVGGSQHGLLGTLFSTAMTFAFVSYWHGGYDYLWCWAALNWLGVTVENGVRRLVETPCIQDSLARYFSPQARRRFHAALASCSTSMLILSNLVFLGGNEVGKTYWNRIFIQGWPWVTLSVLGFLYCYSHVGIAWAQTYATD

SEQ ID NO: 48846 - protein, 448 aa, Homo sapiens
MKFTKSPEDATDFEWSFWMEWGKQWLVWLLLGHMVVSQMATLLARKHRPWILMLYGMWACWCVLGTPGVAMVLLHTTISFCVAQFRSQLLTWLCSLLLLSTLRLQGVEEVKRRWYKTENEYYLLQFTLTVRCLYYTSFSLELCWQQLPAASTSYSFPWMLAYVFYYPVLHNGPILSFSEFIKQMQQQEHDSLKASLCVLALGLGRLLCWWWLAELMAHLMYMHAIYSSIPLLETVSCWTLGGLALAQVLFFYVKYLVLFGVPALLMRLDGLTPPALPRCVSTMFSFTGMWRYFDVGLHNFLIRYVYIPVGGSQHGLLGTLFSTAMTFAFVSYWHGGYDYLWCWAALNWLGVTVENGVRRLVETPCIQDSLARYFSPQARRRFHAALASCSTSMLILSNLVFLGGNEVGKTYWNRIFIQGWPWVTLSVLGFLYCYSHVGIAWAQTYATD

SEQ ID NO: 48847 - protein, 183 aa, Homo sapiens
MRLDGLTPPALPRCVSTMFSFTGMWRYFDVGLHNFLIRYVYIPVGGSQHGLLGTLFSTAMTFAFVSYWHGGYDYLWCWAALNWLGVTVENGVRRLVETPCIQDSLARYFSPQARRRFHAALASCSTSMLILSNLVFLGGNEVGKTYWNRIFIQGWPWVTLSVLGFLYCYSHVGIAWAQTYATD

SEQ ID NO: 48848 - protein, 493 aa, Homo sapiens; identical to SEQ ID NO: 48845

SEQ ID NO: 48849 - protein, 518 aa, Homo sapiens
MLPRWELALYLLASLGFHFYSFYEVYKVSREHEEELDQEFELETDTLFGGLKKDATDFEWSFWMEWGKQWLVWLLLGHMVVSQMATLLARKHRPWILMLYGMWACWCVLGTPGVAMVLLHTTISFCVAQFRSQLLTWLCSLLLLSTLRLQGVEEVKRRWYKTENEYYLLQFTLTVRCLYYTSFSLELCWQQLPAASTSYSFPWMLAYVFYYPVLHNGPILSFSEFIKQMQQQEHDSLKASLCVLALGLGRLLCWWWLAELMAHLMYMHAIYSSIPLLETVSCWTLGGLALAQVLFFYVKYLVLFGVPALLMRLDGLTPPALPRCVSTMFSFTGMWRYFDVGLHNFLIRYVYIPVGGSQHGLLGTLFSTAMTFAFVSYWHGGYDYLWCWAALNWLGVTVENGVRRLVETPCIQDSLARYFSPQARRRFHAALASCSTSMLILSNLVFLGGNEVGKTYWNRIFIQGGLFLFFLLNPCWETAFQGFPVFLHFLQTEVLATFVPNYFSWNICIENTSELSSY

SEQ ID NO: 48850 - protein, 493 aa, Homo sapiens; identical to SEQ ID NO: 48845

SEQ ID NO: 48851 - protein, 207 aa, Homo sapiens
MEWGKQWLVWLLLGHMVVSQMATLLARKRRWYKTENEYYLLQFTLTVRCLYYTSFSLELCWQQLPAASTSYSFPWMLAYVFYYPVLHNGPILSFSEFIKQMQQQEHDSLKASLCVLALGLGRLLCWWWLAELMAHLMYMHAIYSSIPLLETVSCWTLGGLALAQVLFFYVKYLVLFGVPALLMRLDGLTPPALPRCVSTMFSFTGMW

SEQ ID NO: 48852 - protein, 428 aa, Homo sapiens
MLPRWELALYLLASLGFHFYSFYEVYKVSREHEEELDQEFELETDTLFGGLKKDATDFEWSFWMEWGKQWLVWLLLGHMVVSQMATLLARKRRWYKTENEYYLLQFTLTVRCLYYTSFSLELCWQQLPAASTSYSFPWMLAYVFYYPVLHNGPILSFSEFIKQMQQQEHDSLKASLCVLALGLGRLLCWWWLAELMAHLMYMHAIYSSIPLLETVSCWTLGGLALAQVLFFYVKYLVLFGVPALLMRLDGLTPPALPRCVSTMFSFTGMWRYFDVGLHNFLIRYVYIPVGGSQHGLLGTLFSTAMTFAFVSYWHGGYDYLWCWAALNWLGVTVENGVRRLVETPCIQDSLARYFSPQARRRFHAALASCSTSMLILSNLVFLGGNEVGKTYWNRIFIQGWPWVTLSVLGFLYCYSHVGIAWAQTYATD

SEQ ID NO: 48853 - protein, 356 aa, Homo sapiens
MLPRWELALYLLASLGFHFYSFYEVYKVSREHEEELDQEFELETDTLFGGLKKDATDFEWSFWMEWGKQWLVWLLLGHMVVSQMATLLARKMQQQEHDSLKASLCVLALGLGRLLCWWWLAELMAHLMYMHAIYSSIPLLETVSCWTLGGLALAQVLFFYVKYLVLFGVPALLMRLDGLTPPALPRCVSTMFSFTGMWRYFDVGLHNFLIRYVYIPVGGSQHGLLGTLFSTAMTFAFVSYWHGGYDYLWCWAALNWLGVTVENGVRRLVETPCIQDSLARYFSPQARRRFHAALASCSTSMLILSNLVFLGGNEVGKTYWNRIFIQGWPWVTLSVLGFLYCYSHVGIAWAQTYATD

SEQ ID NO: 48854 - protein, 494 aa, Homo sapiens
MSLGLGSAERGVLGTRGARERCRRRRPGQPGEHEEELDQEFELETDTLFGGLKKDATDFEWSFWMEWGKQWLVWLLLGHMVVSQMATLLARKHRPWILMLYGMWACWCVLGTPGVAMVLLHTTISFCVAQFRSQLLTWLCSLLLLSTLRLQGVEEVKRRWYKTENEYYLLQFTLTVRCLYYTSFSLELCWQQLPAASTSYSFPWMLAYVFYYPVLHNGPILSFSEFIKQMQQQEHDSLKASLCVLALGLGRLLCWWWLAELMAHLMYMHAIYSSIPLLETVSCWTLGGLALAQVLFFYVKYLVLFGVPALLMRLDGLTPPALPRCVSTMFSFTGMWRYFDVGLHNFLIRYVYIPVGGSQHGLLGTLFSTAMTFAFVSYWHGGYDYLWCWAALNWLGVTVENGVRRLVETPCIQDSLARYFSPQARRRFHAALASCSTSMLILSNLVFLGGNEVGKTYWNRIFIQGWPWVTLSVLGFLYCYSHVGIAWAQTYATD

SEQ ID NO: 48855 - protein, 430 aa, Homo sapiens
MEWGKQWLVWLLLGHMVVSQMATLLARKHRPWILMLYGMWACWCVLGTPGVAMVLLHTTISFCVAQFRSQLLTWLCSLLLLSTLRLQGVEEVKRRWYKTENEYYLLQFTLTVRCLYYTSFSLELCWQQLPAASTSYSFPWMLAYVFYYPVLHNGPILSFSEFIKQMQQQEHDSLKASLCVLALGLGRLLCWWWLAELMAHLMYMHAIYSSIPLLETVSCWTLGGLALAQVLFFYVKYLVLFGVPALLMRLDGLTPPALPRCVSTMFSFTGMWRYFDVGLHNFLIRYVYIPVGGSQHGLLGTLFSTAMTFAFVSYWHGGYDYLWCWAALNWLGVTVENGVRRLVETPCIQDSLARYFSPQARRRFHAALASCSTSMLILSNLVFLGGNEVGKTYWNRIFIQGWPWVTLSVLGFLYCYSHVGIAWAQTYATD

SEQ ID NO: 48856 - protein, 700 aa, Homo sapiens
MLKMLSFKLLLLAVALGFFEGDAKFGERNEGSGARRRRCLNGNPPKRLKRRDRRMMSQLELLSGGEMLCGGFYPRLSCCLRSDSPGLGRLENKIFSVTNNTECGKLLEEIKCALCSPHSQSLFHSPEREVLERDLVLPLLCKDYCKEFFYTCRGHIPGFLQTTADEFCFYYARKDGGLCFPDFPRKQVRGPASNYLDQMEEYDKVEEISRKHKHNCFCIQEVVSGLRQPVGALHSGDGSQRLFILEKEGYVKILTPEGEIFKEPYLDIHKLVQSGIKGGDERGLLSLAFHPNYKKNGKLYVSYTTNQERWAIGPHDHILRVVEYTVSRKNPHQVDLRTARVFLEVAELHRKHLGGQLLFGPDGFLYIILGDGMITLDDMEEMDGLSDFTGSVLRLDVDTDMCNVPYSIPRSNPHFNSTNQPPEVFAHGLHDPGRCAVDRHPTDININLTILCSDSNGKNRSSARILQIIKGKDYESEPSLLEFKPFSNGPLVGGFVYRGCQSERLYGSYVFGDRNGNFLTLQQSPVTKQWQEKPLCLGTSGSCRGYFSGHILGFGEDELGEVYILSSSKSMTQTHNGKLYKIVDPKRPLMPEECRATVQPAQTLTSECSRLCRNGYCTPTGKCCCSPGWEGDFCRTAKCEPACRHGGVCVRPNKCLCKKGYLGPQCEQVDRNIRRVTRAGILDQIIDMTSYLLDLTSYIV

SEQ ID NO: 48857 - protein, 320 aa, Homo sapiens
MLKMLSFKLLLLAVALGFFEGDAKFGERNEGSGARRRRCLNGNPPKRLKRRDRRMMSQLELLSGGEMLCGGFYPRLSCCLRSDSPGLGRLENKIFSVTNNTECGKLLEEIKCALCSPHSQSLFHSPEREVLERDLVLPLLCKDYCKEFFYTCRGHIPGFLQTTADEFCFYYARKDGGLCFPDFPRKQVRGPASNYLDQMEEYDKVEEISRKHKHNCFCIQEVVSGLRQPVGALHSGDGSQRLFILEKEGYVKILTPEGEIFKEPYLDIHKLVQSGIKVGFLNFIYFCAGYVNFILVLPSSLKVFLCNKRKNLAGENKGAT

SEQ ID NO: 48858 - protein, 1381 aa, Homo sapiens
MASPRASRWPPPLLLLLLPLLLLPPAAPGTRDPPPSPARRALSLAPLAGAGLELQLERRPEREPPPTPPRERRGPATPGPSYRAPEPGAATQRGPSGRAPRGGSADAAWKHWPESNTEAHVENITFYQNQEDFSTVSSKEGVMVQTSGKSHAASDAPENLTLLAETADARGRSGSSSRTNFTILPVGYSLEIATALTSQSGNLASESLHLPSSSSEFDERIAAFQTKSGTASEMGTERAMGLSEEWTVHSQEATTSAWSPSFLPALEMGELTTPSRKRNSSGPDLSWLHFYRTAASSPLLDLSSSSESTEKLNNSTGLQSSSVSQTKTMHVATVFTDGGPRTLRSLTVSLGPVSKTEGFPKDSRIATTSSSVLLSPSAVESRRNSRVTGNPGDEEFIEPSTENEFGLTSLRWQNDSPTFGEHQLASSSEVQNGSPMSQTETVSRSVAPMRGGEITAHWLLTNSTTSADVTGSSASYPEGVNASVLTQFSDSTVQSGGSHTALGDRSYSESSSTSSSESLNSSAPRGERSIAGISYGQVRGTAIEQRTSSDHTDHTYLSSTFTKGERALLSITDNSSSSDIVESSTSYIKISNSSHSEYSSFFHAQTERSNISSYDGEYAQPSTESPVLHTSNLPSYTPTINMPNTSVVLDTDAEFVSDSSSSSSSSSSSSSSGPPLPLPSVSQSHHLFSSILPSTRASVHLLKSTSDASTPWSSSPSPLPVSLTTSTSAPLSVSQTTLPQSSSTPVLPRARETPVTSFQTSTMTSFMTMLHSSQTADLKSQSTPHQEKVITESKSPSLVSLPTESTKAVTTNSPLPPSLTESSTEQTLPATSTNLAQMSPTFTTTILKTSQPLMTTPGTLSSTASLVTGPIAVQTTAGKQLSLTHPEILVPQISTEGGISTERNRVIVDATTGLIPLTSVPTSAKEMTTKLGVTAEYSPASRSLGTSPSPQTTVVSTAEDLAPKSATFAVQSSTQSPTTVSSSASVNSCAVNPCLHNGECVADNTSRGYHCRCPPSWQGDDCSVDVNECLSNPCPSTAMCNNTQGSFICKCPVGYQLEKGICNLVRTFVTEFKLKRTFLNTTVEKHSDLQEVENEITKTLNMCFSALPSYIRSTVHASRESNAVVISLQTTFSLASNVTLFDLADRMQKCVNSCKSSAEVCQLLGSQRRIFRAGSLCKRKSPECDKDTSICTDLDGVALCQCKSGYFQFNKMDHSCRACEDGYRLENETCMSCPFGLGGLNCGNPYQLITVVIAAAGGGLLLILGIALIVTCCRKNKNDISKLIFKSGDFQMSPYAEYPKNPRSQEWGREAIEMHENGSTKNLLQMTDVYYSPTSVRNPELERNGLYPAYTGLPGSRHSCIFPGQYNPSFISDESRRRDYF

SEQ ID NO: 48859 - protein, 1942 aa, Homo sapiens
MEDRRAEKSCEQACESLKRQDYEMALKHCTEALLSLGQYSMADFTGPCPLEIERIKIESLLYRIASFLQLKNYVQADEDCRHVLGEGLAKGEDAFRAVLCCMQLKGKLQPVSTILAKSLTGESLNGMVTKDLTRLKTLLSETETATSNALSGYHVEDLDEGSCNGWHFRPPPRGITSSEEYTLCKRFLEQGICRYGAQCTSAHSQEELAEWQKRYASRLIKLKQQNENKQLSGSYMETLIEKWMNSLSPEKVLSECIEGVKVEHNPDLSVTVSTKKSHQTWTFALTCKPARMLYRVALLYDAHRPHFSIIAISAGDSTTQVSQEVPENCQEWIGGKMAQNGLDHYVYKVGIAFNTEIFGTFRQTIVFDFGLEPVLMQRVMIDAASTEDLEYLMHAKQQLVTTAKRWDSSSKTIIDFEPNETTDLEKSLLIRYQIPLSADQLFTQSVLDKSLTKSNYQSRLHDLLYIEEIAQYKEISKFNLKVQLQILASFMLTGVSGGAKYAQNGQLFGRFKLTETLSEDTLAGRLVMTKVNAVYLLPVPKQKLVQTQGTKEKVYEATIEEKTKEYIFLRLSRECCEELNLRPDCDTQVELQFQLNRLPLCEMHYALDRIKDNGVLFPDISMTPTIPWSPNRQWDEQLDPRLNAKQKEAVLAITTPLAIQLPPVLIIGPYGTGKTFTLAQAVKHILQQQETRILICTHSNSAADLYIKDYLHPYVEAGNPQARPLRVYFRNRWVKTVHPVVHQYCLISSAHSTFQMPQKEDILKHRVVVVTLNTSQYLCQLDLEPGFFTHILLDEAAQAMECETIMPLALATQNTRIVLAGDHMQLSPFVYSEFARERNLHVSLLDRLYEHYPAEFPCRILLCENYRSHEAIINYTSELFYEGKLMASGKQPAHKDFYPLTFFTARGEDVQEKNSTAFYNNAEVFEVVERVEELRRKWPVAWGKLDDGSIGVVTPYADQVFRIRAELRKKRLSDVNVERVLNVQGKQFRVLFLSTVRTRHTCKHKQTPIKKKEQLLEDSTEDLDYGFLSNYKLLNTAITRAQSLVAVVGDPIALCSIGRCRKFWERFIALCHENSSLHGITFEQIKAQLEALELKKTYVLNPLAPEFIPRALRLQHSGSTNKQQQSPPKGKSLHHTQNDHFQNDGIVQPNPSVLIGNPIRAYTPPPPLGPHPNLGKSPSPVQRIDPHTGTSILYVPAVYGGNVVMSVPLPVPWTGYQGRFAVDPRIITHQAAMAYNMNLLQTHGRGSPIPYGLGHHPPVTIGQPQNQHQEKDQHEQNRNGKSDTNNSGPEINKIRTPEKKPTEPKQVDLESNPQNRSPESRPSVVYPSTKFPRKDNLNPRHINLPLPAPHAQYAIPNRHFHPLPQLPRPPFPIPQQHTLLNQQQNNLPEQPNQIPPQPNQVVQQQSQLNQQPQQPPPQLSPAYQAGPNNAFFNSAVAHRPQSPPAEAVIPEQQPPPMLQEGHSPLRAIAQPGPILPSHLNSFIDENPSGLPIGEALDRIHGSVALETLRQQQARFQQWSEHHAFLSQGSAPYPHHHHPHLQHLPQPPLGLHQPPVRADWKLTSSAEDEVETTYSRFQDLIRELSHRDQSETRELAEMPPPQSRLLQYRQVQSRSPPAVPSPPSSTDHSSHFSNFNDNSRDIEVASNPAFPQRLPPQIFNSPFSLPSEHLAPPPLKYLAPDGAWTFANLQQNHLMGPGFPYGLPPLPHRPPQNPFVQIQNHQHAIGQEPFHPLSSRTVSSSSLPSLEEYEPRGPGRPLYQRRISSSSVQPCSEEVSTPQDSLAQCKELQDHSNQSSFNFSSPESWVNTTSSTPYQNIPCNGSSRTAQPRELIAPPKTVKPPEDQLKSENLEVSSSFNYSVLQHLGQFPPLMPNKQIAESANSSSPQSSAGGKPAMSYASALRAPPKPRPPPEQAKKSSDPLSLFQELSLGSSSGSNGFYSYFK

SEQ ID NO: 48860 - protein, 454 aa, Homo sapiens
MEDRRAEKSCEQACESLKRQDYEMALKHCTEALLSLGQYSMADFTGPCPLEIERIKIESLLYRIASFLQLKNYVQADEDCRHVLGEGLAKGEDAFRAVLCCMQLKGKLQPVSTILAKSLTGESLNGMVTKDLTRLKTLLSETETATSNALSGYHVEDLDEGSCNGWHFRPPPRGITSSEEYTLCKRFLEQGICRYGAQCTSAHSQEELAEWQKRYASRLIKLKQQNENKQLSGSYMETLIEKWMNSLSPEKVLSECIEGVKVEHNPDLSVTVSTKKSHQTWTFALTCKPARMLYRVALLYDAHRPHFSIIAISAGDSTTQVSQEVPENCQEWIGGKMAQNGLDHYVYKVGIAFNTEIFGTFRQTIVFDFGLEPVLMQRVMIDAASTEDLEYLMHAKQQLVTTAKRWDSSSKTIIDFEPNETTDLEKSLLIRYQIPLSEKKKKKKKKKKKKKKKK

SEQ ID NO: 48861 - protein, 97 aa, Homo sapiens
MPAERPAGSGGSEAPAMVEQLDTAVITPAMLEEEEQLEAAGLERERKMLEKARMSWDRESTEIRYRRLQHLLEKSNIYSKFLLTKMEQQQLETVMKI

SEQ ID NO: 48862 - protein, 838 aa, Homo sapiens
MPAERPAGSGGSEAPAMVEQLDTAVITPAMLEEEEQLEAAGLERERKMLEKARMSWDRESTEIRYRRLQHLLEKSNIYSKFLLTKMEQQQLEEQKKKEKLERKKESLKVKKGKNSIDASEEKPVMRKKRGREDESYNISEVMSKEEILSVAKKNKKENEDENSSSTNLCVEDLQKNKDSNSIIKDRLSETVRQNTKFFFDPVRKCNGQPVPFQQPKHFTGGVMRWYQVEGMEWLRMLWENGINGILADEMGLGKTVQCIATIALMIQRGVPGPFLVCGPLSTLPNWMAEFKRFTPDIPTMLYHGTQEERQKLVRNIYKRKGTLQIHPVVITSFEIAMRDRNALQHCYWKYLIVDEGHRIKNMKCRLIRELKRFNADNKLLLTGTPLQNNLSELWSLLNFLLPDVFDDLKSFESWFDITSLSETAEDIIAKEREQNVLHMLHQILTPFLLRRLKSDVALEVPPKREVVVYAPLSKKQEIFYTAIVNRTIANMFGSSEKETIELSPTGRPKRRTRKSINYSKIDDFPNELEKLISQIQPEVDRERAVVEVNIPVESEVNLKLQNIMMLLRKCCNHPYLIEYPIDPVTQEFKIDEELVTNSGKFLILDRMLPELKKRGHKVLLFSQMTSMLDILMDYCHLRDFNFSRLDGSMSYSEREKNMHSFNTDPEVFIFLVSTRAGGLGINLTAADTVIIYDSDWNPQSDLQAQDRCHRIGQTKPVVVYRLVTANTIDQKIVERAAAKRKLEKLIIHKNHFKGGQSGLNLSKNFLDPKELMELLKSRDYEREIKGSREKVISDKDLELLLDRSDLIDQMNASGPIKEKMGIFKILENSEDSSPECLF

SEQ ID NO: 48863 - protein, 884 aa, Homo sapiens
MPAERPAGSGGSEAPAMVEQLDTAVITPAMLEEEEQLEAAGLERERKMLEKARMSWDRESTEIRYRRLQHLLEKSNIYSKFLLTKMEQQQLEEQKKKEKLERKKESLKVKKGKNSIDASEEKPVMRKKRGREDESYNISEVMSKEEILSVAKKNKKENEDENSSSTNLCVEDLQKNKDSNSIIKDRLSETVRQNTKFFFDPVRKCNGQPVPFQQPKHFTGGVMRWYQVEGMEWLRMLWENGINGILADEMGLGKTVQCIATIALMIQRGVPGPFLVCGPLSTLPNWMAEFKRFTPDIPTMLYHGTQEERQKLVRNIYKRKGTLQIHPVVITSFEIAMRDRNALQHCYWKYLIVDEGHRIKNMKCRLIRELKRFNADNKLLLTGTPLQNNLSELWSLLNFLLPDVFDDLKSFESWFDITSLSETAEDIIAKEREQNVLHMLHQERIPRMYVSEFTDEGFFEGKLPSRKDLYDIRPYENTYLLKLHTNFEILTPFLLRRLKSDVALEVPPKREVVVYAPLSKKQEIFYTAIVNRTIANMFGSSEKETIELSPTGRPKRRTRKSINYSKIDDFPNELEKLISQIQPEVDRERAVVEVNIPVESEVNLKLQNIMMLLRKCCNHPYLIEYPIDPVTQEFKIDEELVTNSGKFLILDRMLPELKKRGHKVLLFSQMTSMLDILMDYCHLRDFNFSRLDGSMSYSEREKNMHSFNTDPEVFIFLVSTRAGGLGINLTAADTVIIYDSDWNPQSDLQAQDRCHRIGQTKPVVVYRLVTANTIDQKIVERAAAKRKLEKLIIHKNHFKGGQSGLNLSKNFLDPKELMELLKSRDYEREIKGSREKVISDKDLELLLDRSDLIDQMNASGPIKEKMGIFKILENSEDSSPECLF

SEQ ID NO: 48864 - protein, 129 aa, Homo sapiens
MPAERPAGSGGSEAPAMVEQLDTAVITPAMLEEEEQLEAAGLERERKMLEKARMSWDRESTEIRYRRLQHLLEKSNIYSKFLLTKMEQQQLEEQKKKEKLERKKESLKVKKGKNSIDASEEKPGNFVCG

SEQ ID NO: 48865 - protein, 315 aa, Homo sapiens
MPAERPAGSGGSEAPAMVEQLDTAVITPAMLEEEEQLEAAGLERERKMLEKARMSWDRESTEIRYRRLQHLLEKSNIYSKFLLTKMEQQQLEEQKKKEKLERKKESLKVKKGKNSIDASEEKPVMRKKRGREDESYNISEVMSKEEILSVAKKNKKENEDENSSSTNLCVEDLQKNKDSNSIIKDRLSETVRQNTKFFFDPVRKCNGQPVPFQQPKHFTGGVMRWYQVEGMEWLRMLWENGINGILADEMGLGKTVQCIATIALMIQRGVPGPFLVCGPLSTLPNWMAEFKRFTPDIPTMLYHGTQEERQKLIYL

SEQ ID NO: 48866 - protein, 740 aa, Homo sapiens
MPAERPAGSGGSEAPAMVEQLDTAVITPAMLEEEEQLEAAGLERERKMLEKARMSWDRESTEIRYRRLQHLLEKSNIYSKFLLTKMEQQQLEEQKKKEKLERKKESLKVKKGKNSIDASEEKPVMRKKRGREDESYNISEVMSKEEILSVAKKNKKENEDENSSSTNLCVEDLQKNKDSNSIIKDRLSETVRQNTKFFFDPVRKCNGQPVPFQQPKHFTGGVMRWYQVEGMEWLRMLWENGINGILADEMGLGKTVQCIATIALMIQRGVPGPFLVCGPLSTLPNWMAEFKRFTPDIPTMLYHGTQEERQKLVRNIYKRKGTLQIHPVVITSFEIAMRDRNALQILTPFLLRRLKSDVALEVPPKREVVVYAPLSKKQEIFYTAIVNRTIANMFGSSEKETIELSPTGRPKRRTRKSINYSKIDDFPNELEKLISQIQPEVDRERAVVEVNIPVESEVNLKLQNIMMLLRKCCNHPYLIEYPIDPVTQEFKIDEELVTNSGKFLILDRMLPELKKRGHKVLLFSQMTSMLDILMDYCHLRDFNFSRLDGSMSYSEREKNMHSFNTDPEVFIFLVSTRAGGLGINLTAADTVIIYDSDWNPQSDLQAQDRCHRIGQTKPVVVYRLVTANTIDQKIVERAAAKRKLEKLIIHKNHFKGGQSGLNLSKNFLDPKELMELLKSRDYEREIKGSREKVISDKDLELLLDRSDLIDQMNASGPIKEKMGIFKILENSEDSSPECLF

SEQ ID NO: 48867 - protein, 192 aa, Homo sapiens
MVEQLDTAVITPAMLEEEEQLEAAGLERERKMLEKARMSWDRESTEIRYRRLQHLLEKSNIYSKFLLTKMEQQQLEEQKKKEKLERKKESLKVKKGKNSIDASEEKPVMRKKRGREDESYNISEVMSKEEILSVAKKNKKENEDENSSSTNLCVEDLQKNKDSNSIIKDRLSETVRQNTKFFFDPVRKCNGQ

SEQ ID NO: 48868 - protein, 486 aa, Homo sapiens
MWKSVVGHDVSVSVETQGDDWDTDPDFVNDISEKEQRWGAKTIEGSGRTEHINIHQLRNKVSEEHDVLRKKEMESGPKASHGYGGRFGVERDRMDKSAVGHEYVAEVEKHSSQTDAAKGFGGKYGVERDRADKSAVGFDYKGEVEKHTSQKDYSRGFGGRYGVEKDKWDKAALGYDYKGETEKHESQRDYAKGFGGQYGIQKDRVDKSAVGFNEMEAPTTAYKKTTPIEAASSGTRGLKAKFESMAEEKRKREEEEKAQQVARRQQERKAVTKRSPEAPQPVIAMEEPAVPAPLPKKISSEAWPPVGTPPSSESEPVRTSREHPVPLLPIRQTLPEDNEEPPALPPRTLEGLQVEEEPVYEAEPEPEPEPEPEPENDYEDVEEMDRHEQEDEPEGDYEEVLEPEDSSFSSALAGSSGCPAGAGAGAVALGISAVAVYDYQGEGSDELSFDPDDVITDIEMVDEGWWRGRCHGHFGLFPANYVKLLE

SEQ ID NO: 48869 - protein, 199 aa, Homo sapiens
MPNYKLTYFNMRGRAEIIRYIFAYLDIQYEDHRIEQADWPEIKSTLPFGKIPILEVDGLTLHQSLAIARYLTKNTDLAGNTEMEQCHVDAIVDTLDDFMSCFPWAEKKQDVKEQMFNELLTYNAPHLMQDLDTYLGGREWLIGNSVTWADFYWEICSTTLLVFKPDLLDNHPRLVTLRKKVQAIPAVANWIKRRPQTKL

SEQ ID NO: 48870 - protein, 270 aa, Homo sapiens
MQYPHPGPAAGAVGVPLYAPTPLLQPAHPTPFYIEDILGRGPAAPTPAPTLPSPNSSFTSLVSPYRTPVYEPTPIHPAFSHHSAAALAAAYGPGGFGGPLYPFPRTVNDYTHALLRHDPLGKPLLWSPFLQRPLHKRKGGQVRFSNDQTIELEKKFETQKYLSPPERKRLAKMLQLSERQVKTWFQNRRAKWRRLKQENPQSNKKEELESLDSSCDQRQDLPSEQNKGASLDSSQCSPSPASQEDLESEISEDSDQEVDIEGDKSYFNAG

SEQ ID NO: 48871 - protein, 189 aa, Homo sapiens
MLGMIKNSLFGSVETWPWQVLSKGDKEEVAYEERACEGGKFATVEVTDKPVDEALREAMPKVAKYAGGTNDKGIGMGMTVPISFAVFPNEDGSLQKKLKVWFRIPNQFQSDPPAPSDKSVKIEEREGITVYSMQFGGYAKEADYVAQATRLRAALEGTATYRGDIYFCTGYDPPMKPYGRRNEIWLLKT

SEQ ID NO: 48872 - protein, 316 aa, Homo sapiens
MSAEVETSEGVDESEKKNSGALEKENQMRMADLSELLKEGTKEAHDRAENTQFVKDFLKGNIKKELFKLATTALYFTYSALEEEMERNKDHPAFAPLYFPMELHRKEALTKDMEYFFGENWEEQVQCPKAAQKYVERIHYIGQNEPELLVAHAYTRYMGDLSGGQVLKKVAQRALKLPSTGEGTQFYLFENVDNAQQFKQLYRARMNALDLNMKTKERIVEEANKAFEYNMQIFNELDQAGSTLARETLEDGFPVHDGKGDMRKCPFYAAEQDKGALEGSSCPFRTAMAVLRKPSLQFILAAGVALAAGLLAWYYM

SEQ ID NO: 48873 - protein, 316 aa, Homo sapiens; identical to SEQ ID NO: 48872

SEQ ID NO: 48874 - protein, 316 aa, Homo sapiens; identical to SEQ ID NO: 48872

SEQ ID NO: 48875 - protein, 316 aa, Homo sapiens; identical to SEQ ID NO: 48872

SEQ ID NO: 48876 - protein, 316 aa, Homo sapiens; identical to SEQ ID NO: 48872

SEQ ID NO: 48877 - protein, 316 aa, Homo sapiens; identical to SEQ ID NO: 48872

SEQ ID NO: 48878 - protein, 5635 aa, Homo sapiens
MISWEVVHTVFLFALLYSSLAQDASPQSEIRAEEIPEGASTLAFVFDVTGSMYDDLVQVIEGASKILETSLKRPKRPLFNFALVPFHDPEIGPVTITTDPKKFQYELRELYVQGGGDCPEMSIGAIKIALEISLPGSFIYVFTDARSKDYRLTHEVLQLIQQKQSQVVFVLTGDCDDRTHIGYKVYEEIASTSSGQVFHLDKKQVNEVLKWVEEAVQASKVHLLSTDHLEQAVNTWRIPFDPSLKEVTVSLSGPSPMIEIRNPLGKLIKKGFGLHELLNIHNSAKVVNVKEPEAGMWTVKTSSSGRHSVRITGLSTIDFRAGFSRKPTLDFKKTVSRPVQGIPTYVLLNTSGISTPARIDLLELLSISGSSLKTIPVKYYPHRKPYGIWNISDFVPPNEAFFLKVTGYDKDDYLFQRVSSVSFSSIVPDAPKVTMPEKTPGYYLQPGQIPCSVDSLLPFTLSFVRNGVTLGVDQYLKESASVNLDIAKVTLSDEGFYECIAVSSAGTGRAQTFFDVSEPPPVIQVPNNVTVTPGERAVLTCLIISAVDYNLTWQRNDRDVRLAEPARIRTLANLSLELKSVKFNDAGEYHCMVSSEGGSSAASVFLTVQEPPKVTVMPKNQSFTGGSEVSIMCSATGYPKPKIAWTVNDMFIVGSHRYRMTSDGTLFIKNAAPKDAGIYGCLASNSAGTDKQNSTLRYIEAPKLMVVQSELLVALGDITVMECKTSGIPPPQVKWFKGDLELRPSTFLIIDPLLGLLKIQETQDLDAGDYTCVAINEAGRATGKITLDVGSPPVFIQEPADVSMEIGSNVTLPCYVQGYPEPTIKWRRLDNMPIFSRPFSVSSISQLRTGALFILNLWASDKGTYICEAENQFGKIQSETTVTVTGLVAPLIGISPSVANVIEGQQLTLPCTLLAGNPIPERRWIKNSAMLLQNPYITVRSDGSLHIERVQLQDGGEYTCVASNVAGTNNKTTSVVVHVLPTIQHGQQILSTIEGIPVTLPCKASGNPKPSVIWSKKGELISTSSAKFSAGADGSLYVVSPGGEESGEYVCTATNTAGYAKRKVQLTVYVRPRVFGDQRGLSQDKPVEISVLAGEEVTLPCEVKSLPPPIITWAKETQLISPFSPRHTFLPSGSMKITETRTSDSGMYLCVATNIAGNVTQAVKLNVHVPPKIQRGPKHLKVQVGQRVDIPCNAQGTPLPVITWSKGGSTMLVDGEHHVSNPDGTLSIDQATPSDAGIYTCVATNIAGTDETEITLHVQEPPTVEDLEPPYNTTFQERVANQRIEFPCPAKGTPKPTIKWLHNGRELTGREPGISILEDGTLLVIASVTPYDNGEYICVAVNEAGTTERKYNLKVHVPPVIKDKEQVTNVSVLLNQLTNLFCEVEGTPSPIIMWYKDNVQVTESSTIQTVNNGKILKLFRATPEDAGRYSCKAINIAGTSQKYFNIDVLVPPTIIGTNFPNEVSVVLNRDVALECQVKGTPFPDIHWFKDGKPLFLGDPNVELLDRGQVLHLKNARRNDKGRYQCTVSNAAGKQAKDIKLTIYIPPSIKGGNVTTDISVLINSLIKLECETRGLPMPAITWYKDGQPIMSSSQALYIDKGQYLHIPRAQVSDSATYTCHVANVAGTAEKSFHVDVYVPPMIEGNLATPLNKQVVIAHSLTLECKAAGNPSPILTWLKDGVPVKANDNIRIEAGGKKLEIMSAQEIDRGQYICVATSVAGEKEIKYEVDVLVPPAIEGGDETSYFIVMVNNLLELDCHVTGSPPPTIMWLKDGQLIDERDGFKILLNGRKLVIAQAQVSNTGLYRCMAANTAGDHKKEFEVTVHVPPTIKSSGLSERVVVKYKPVALQCIANGIPNPSITWLKDDQPVNTAQGNLKIQSSGRVLQIAKTLLEDAGRYTCVATNAAGETQQHIQLHVHEPPSLEDAGKMLNETVLVSNPVQLECKAAGNPVPVITWYKDNRLLSGSTSMTFLNRGQIIDIESAQISDAGIYKCVAINSAGATELFYSLQVHVAPSISGSNNMVAVVVNNPVRLECEARGIPAPSLTWLKDGSPVSSFSNGLQVLSGGRILALTSAQISDTGRYTCVAVNAAGEKQRDIDLRVYVPPNIMGEEQNVSVLISQAVELLCQSDAIPPPTLTWLKDGHPLLKKPGLSISENRSVLKIEDAQVQDTGRYTCEATNVAGKTEKNYNVNIWVPPNIGGSDELTQLTVIEGNLISLLCESSGIPPPNLIWKKKGSPVLTDSMGRVRILSGGRQLQISIAEKSDAALYSCVASNVAGTAKKEYNLQVYIRPTITNSGSHPTEIIVTRGKSISLECEVQGIPPPTVTWMKDGHPLIKAKGVEILDEGHILQLKNIHVSDTGRYVCVAVNVAGMTDKKYDLSVHAPPSIIGNHRSPENISVVEKNSVSLTCEASGIPLPSITWFKDGWPVSLSNSVRILSGGRMLRLMQTTMEDAGQYTCVVRNAAGEERKIFGLSVLVPPHIVGENTLEDVKVKEKQSVTLTCEVTGNPVPEITWHKDGQPLQEDEAHHIISGGRFLQITNVQVPHTGRYTCLASSPAGHKSRSFSLNVFVSPTIAGVGSDGNPEDVTVILNSPTSLVCEAYSYPPATITWFKDGTPLESNRNIRILPGGRTLQILNAQEDNAGRYSCVATNEAGEMIKHYEVKVYIPPIINKGDLWGPGLSPKEVKIKVNNTLTLECEAYAIPSASLSWYKDGQPLKSDDHVNIAANGHTLQIKEAQISDTGRYTCVASNIAGEDELDFDVNIQVPPSFQKLWEIGNMLDTGRNGEAKDVIINNPISLYCETNAAPPPTLTWYKDGHPLTSSDKVLILPGGRVLQIPRAKVEDAGRYTCVAVNEAGEDSLQYDVRVLVPPIIKGANSDLPEEVTVLVNKSALIECLSSGSPAPRNSWQKDGQPLLEDDHHKFLSNGRILQILNTQITDIGRYVCVAENTAGSAKKYFNLNVHVPPSVIGPKSENLTVVVNNFISLTCEVSGFPPPDLSWLKNEQPIKLNTNTLIVPGGRTLQIIRAKVSDGGEYTCIAINQAGESKKKFSLTVYVPPSIKDHDSESLSVVNVREGTSVSLECESNAVPPPVITWYKNGRMITESTHVEILADGQMLHIKKAEVSDTGQYVCRAINVAGRDDKNFHLNVYVPPSIEGPEREVIVETISNPVTLTCDATGIPPPTIAWLKNHKRIENSDSLEVRILSGGSKLQIARSQHSDSGNYTCIASNMEGKAQKYYFLSIQVPPSVAGAEIPSDVSVLLGENVELVCNANGIPTPLIQWLKDGKPIASGETERIRVSANGSTLNIYGALTSDTGKYTCVATNPAGEEDRIFNLNVYVTPTIRGNKDEAEKLMTLVDTSINIECRATGTPPPQINWLKNGLPLPLSSHIRLLAAGQVIRIVRAQVSDVAVYTCVASNRAGVDNKHYNLQVFAPPNMDNSMGTEEITVLKGSSTSMACITDGTPAPSMAWLRDGQPLGLDAHLTVSTHGMVLQLLKAETEDSGKYTCIASNEAGEVSKHFILKVLEPPHINGSEEHEEISVIVNNPLELTCIASGIPAPKMTWMKDGRPLPQTDQVQTLGGGEVLRISTAQVEDTGRYTCLASSPAGDDDKEYLVRVHVPPNIAGTDEPRDITVLRNRQVTLECKSDAVPPPVITWLRNGERLQATPRVRILSGGRYLQINNADLGDTANYTCVASNIAGKTTREFILTVNVPPNIKGGPQSLVILLNKSTVLECIAEGVPTPRITWRKDGAVLAGNHARYSILENGFLHIQSAHVTDTGRYLCMATNAAGTDRRRIDLQVHVPPSIAPGPTNMTVIVNVQTTLACEATGIPKPSINWRKNGHLLNVDQNQNSYRLLSSGSLVIISPSVDDTATYECTVTNGAGDDKRTVDLTVQVPPSIADEPTDFLVTKHAPAVITCTASGVPFPSIHWTKNGIRLLPRGDGYRILSSGAIEILATQLNHAGRYTCVARNAAGSAHRHVTLHVHEPPVIQPQPSELHVILNNPILLPCEATGTPSPFITWQKEGINVNTSGRNHAVLPSGGLQISRAVREDAGTYMCVAQNPAGTALGKIKLNVQVPPVISPHLKEYVIAVDKPITLSCEADGLPPPDITWHKDGRAIVESIRQRVLSSGSLQIAFVQPGDAGHYTCMAANVAGSSSTSTKLTVHVPPRIRSTEGHYTVNENSQAILPCVADGIPTPAINWKKDNVLLANLLGKYTAEPYGELILENVVLEDSGFYTCVANNAAGEDTHTVSLTVHVLPTFTELPGDVSLNKGEQLRLSCKATGIPLPKLTWTFNNNIIPAHFDSVNGHSELVIERVSKEDSGTYVCTAENSVGFVKAIGFVYVKEPPVFKGDYPSNWIEPLGGNAILNCEVKGDPTPTIQWNRKGVDIEISHRIRQLGNGSLAIYGTVNEDAGDYTCVATNEAGVVERSMSLTLQSPPIITLEPVETVINAGGKIILNCQATGEPQPTITWSRQGHSISWDDRVNVLSNNSLYIADAQKEDTSEFECVARNLMGSVLVRVPVIVQVHGGFSQWSAWRACSVTCGKGIQKRSRLCNQPLPANGGKPCQGSDLEMRNCQNKPCPVDGSWSEWSLWEECTRSCGRGNQTRTRTCNNPSVQHGGRPCEGNAVEIIMCNIRPCPVHGAWSAWQPWGTCSESCGKGTQTRARLCNNPPPAFGGSYCDGAETQMQVCNERNCPIHGKWATWASWSACSVSCGGGARQRTRGCSDPVPQYGGRKCEGSDVQSDFCNSDPCPTHGNWSPWSGWGTCSRTCNGGQMRRYRTCDNPPPSNGGRACGGPDSQIQRCNTDMCPVDGSWGSWHSWSQCSASCGGGEKTRKRLCDHPVPVKGGRPCPGDTTQVTRCNVQACPGGPQRARGSVIGNINDVEFGIAFLNATITDSPNSDTRIIRAKITNVPRSLGSAMRKIVSILNPIYWTTAKEIGEAVNGFTLTNAVFKRETQVEFATGEILQMSHIARGLDSDGSLLLDIVVSGYVLQLQSPAEVTVKDYTEDYIQTGPGQLYAYSTRLFTIDGISIPYTWNHTVFYDQAQGRMPFLVETLHASSVESDYNQIEETLGFKIHASISKGDRSNQCPSGFTLDSVGPFCADEDECAAGNPCSHSCHNAMGTYYCSCPKGLTIAADGRTCQDIDECALGRHTCHAGQDCDNTIGSYRCVVRCGSGFRRTSDGLSCQDINECQESSPCHQRCFNAIGSFHCGCEPGYQLKGRKCMDVNECRQNVCRPDQHCKNTRGGYKCIDLCPNGMTKAENGTCIDIDECKDGTHQCRYNQICENTRGSYRCVCPRGYRSQGVGRPCMDINECEQVPKPCAHQCSNTPGSFKCICPPGQHLLGDGKSCAGLERLPNYGTQYSSYNLARFSPVRNNYQPQQHYRQYSHLYSSYSEYRNSRTSLSRTRRTIRKTCPEGSEASHDTCVDIDECENTDACQHECKNTFGSYQCICPPGYQLTHNGKTCQDIDECLEQNVHCGPNRMCFNMRGSYQCIDTPCPPNYQRDPVSGFCLKNCPPNDLECALSPYALEYKLVSLPFGIATNQDLIRLVAYTQDGVMHPRTTFLMVDEEQTVPFALRDENLKGVVYTTRPLREAETYRMRVRASSYSANGTIEYQTTFIVYIAVSAYPY

SEQ ID NO: 48879 - protein, 5518 aa, Homo sapiens
MISWEVVHTVFLFALLYSSLAQDASPQSEIRAEEIPEGASTLAFVFDVTGSMYDDLVQVIEGASKILETSLKRPKRPLFNFALVPFHDPEIGPVTITTDPKKFQYELRELYVQGGGDCPEMSIGAIKIALEISLPGSFIYVFTDARSKDYRLTHEVLQLIQQKQSQVVFVLTGDCDDRTHIGYKVYEEIASTSSGQVFHLDKKQVNEVLKWVEEAVQASKVHLLSTDHLEQAVNTWRIPFDPSLKEVTVSLSGPSPMIEIRNPLGKLIKKGFGLHELLNIHNSAKVVNVKEPEAGMWTVKTSSSGRHSVRITGLSTIDFRAGFSRKPTLDFKKTVSRPVQGIPTYVLLNTSGISTPARIDLLELLSISGSSLKTIPVKYYPHRKPYGIWNISDFVPPNEAFFLKVTGYDKDDYLFQRVSSVSFSSIVPDAPKVTMPEKTPGYYLQPGQIPCSVDSLLPFTLSFVRNGVTLGVDQYLKESASVNLDIAKVTLSDEGFYECIAVSSAGTGRAQTFFDVSEPPPVIQVPNNVTVTPGERAVLTCLIISAVDYNLTWQRNDRDVRLAEPARIRTLANLSLELKSVKFNDAGEYHCMVSSEGGSSAASVFLTVQEPPKVTVMPKNQSFTGGSEVSIMCSATGYPKPKIAWTVNDMFIVGSHRYRMTSDGTLFIKNAAPKDAGIYGCLASNSAGTDKQNSTLRYIEAPKLMVVQSELLVALGDITVMECKTSGIPPPQVKWFKGDLELRPSTFLIIDPLLGLLKIQETQDLDAGDYTCVAINEAGRATGKITLDVGSPPVFIQEPADVSMEIGSNVTLPCYVQGYPEPTIKWRRLDNMPIFSRPFSVSSISQLRTGALFILNLWASDKGTYICEAENQFGKIQSETTVTVTGLVAPLIGISPSVANVIEGQQLTLPCTLLAGNPIPERRWIKNSAMLLQNPYITVRSDGSLHIERVQLQDGGEYTCVASNVAGTNNKTTSVVVHVLPTIQHGQQILSTIEGIPVTLPCKASGNPKPSVIWSKKGELISTSSAKFSAGADGSLYVVSPGGEESGEYVCTATNTAGYAKRKVQLTVYVRPRVFGDQRGLSQDKPVEISVLAGEEVTLPCEVKSLPPPIITWAKETQLISPFSPRHTFLPSGSMKITETRTSDSGMYLCVATNIAGNVTQAVKLNVHVPPKIQRGPKHLKVQVGQRVDIPCNAQGTPLPVITWSKGGSTMLVDGEHHVSNPDGTLSIDQATPSDAGIYTCVATNIAGTDETEITLHVQEPPTVEDLEPPYNTTFQERVANQRIEFPCPAKGTPKPTIKWLHNGRELTGREPGISILEDGTLLVIASVTPYDNGEYICVAVNEAGTTERKYNLKVHVPPVIKDKEQVTNVSVLLNQLTNLFCEVEGTPSPIIMWYKDNVQVTESSTIQTVNNGKILKLFRATPEDAGRYSCKAINIAGTSQKYFNIDVLVPPTIIGTNFPNEVSVVLNRDVALECQVKGTPFPDIHWFKDGKPLFLGDPNVELLDRGQVLHLKNARRNDKGRYQCTVSNAAGKQAKDIKLTIYIPPSIKGGNVTTDISVLINSLIKLECETRGLPMPAITWYKDGQPIMSSSQALYIDKGQYLHIPRAQVSDSATYTCHVANVAGTAEKSFHVDVYVPPMIEGNLATPLNKQVVIAHSLTLECKAAGNPSPILTWLKDGVPVKANDNIRIEAGGKKLEIMSAQEIDRGQYICVATSVAGEKEIKYEVDVLVPPAIEGGDETSYFIVMVNNLLELDCHVTGSPPPTIMWLKDGQLIDERDGFKILLNGRKLVIAQAQVSNTGLYRCMAANTAGDHKKEFEVTVHVPPTIKSSGLSERVVVKYKPVALQCIANGIPNPSITWLKDDQPVNTAQGNLKIQSSGRVLQIAKTLLEDAGRYTCVATNAAGETQQHIQLHVHEPPSLEDAGKMLNETVLVSNPVQLECKAAGNPVPVITWYKDNRLLSGSTSMTFLNRGQIIDIESAQISDAGIYKCVAINSAGATELFYSLQVHVAPSISGSNNMVAVVVNNPVRLECEARGIPAPSLTWLKDGSPVSSFSNGLQVLSGGRILALTSAQISDTGRYTCVAVNAAGEKQRDIDLRVYVPPNIMGEEQNVSVLISQAVELLCQSDAIPPPTLTWLKDGHPLLKKPGLSISENRSVLKIEDAQVQDTGRYTCEATNVAGKTEKNYNVNIWVPPNIGGSDELTQLTVIEGNLISLLCESSGIPPPNLIWKKKGSPVLTDSMGRVRILSGGRQLQISIAEKSDAALYSCVASNVAGTAKKEYNLQVYIRPTITNSGSHPTEIIVTRGKSISLECEVQGIPPPTVTWMKDGHPLIKAKGVEILDEGHILQLKNIHVSDTGRYVCVAVNVAGMTDKKYDLSVHAPPSIIGNHRSPENISVVEKNSVSLTCEASGIPLPSITWFKDGWPVSLSNSVRILSGGRMLRLMQTTMEDAGQYTCVVRNAAGEERKIFGLSVLVPPHIVGENTLEDVKVKEKQSVTLTCEVTGNPVPEITWHKDGQPLQEDEAHHIISGGRFLQITNVQVPHTGRYTCLASSPAGHKSRSFSLNVFVSPTIAGVGSDGNPEDVTVILNSPTSLVCEAYSYPPATITWFKDGTPLESNRNIRILPGGRTLQILNAQEDNAGRYSCVATNEAGEMIKHYEVKVYIPPIINKGDLWGPGLSPKEVKIKVNNTLTLECEAYAIPSASLSWYKDGQPLKSDDHVNIAANGHTLQIKEAQISDTGRYTCVASNIAGEDELDFDVNIQVPPSFQKLWEIGNMLDTGRNGEAKDVIINNPISLYCETNAAPPPTLTWYKDGHPLTSSDKVLILPGGRVLQIPRAKVEDAGRYTCVAVNEAGEDSLQYDVRVLVPPIIKGANSDLPEEVTVLVNKSALIECLSSGSPAPRNSWQKDGQPLLEDDHHKFLSNGRILQILNTQITDIGRYVCVAENTAGSAKKYFNLNVHVPPSVIGPKSENLTVVVNNFISLTCEVSGFPPPDLSWLKNEQPIKLNTNTLIVPGGRTLQIIRAKVSDGGEYTCIAINQAGESKKKFSLTVYVPPSIKDHDSESLSVVNVREGTSVSLECESNAVPPPVITWYKNGRMITESTHVEILADGQMLHIKKAEVSDTGQYVCRAINVAGRDDKNFHLNVYVPPSIEGPEREVIVETISNPVTLTCDATGIPPPTIAWLKNHKRIENSDSLEVRILSGGSKLQIARSQHSDSGNYTCIASNMEGKAQKYYFLSIQVPPSVAGAEIPSDVSVLLGENVELVCNANGIPTPLIQWLKDGKPIASGETERIRVSANGSTLNIYGALTSDTGKYTCVATNPAGEEDRIFNLNVYVTPTIRGNKDEAEKLMTLVDTSINIECRATGTPPPQINWLKNGLPLPLSSHIRLLAAGQVIRIVRAQVSDVAVYTCVASNRAGVDNKHYNLQVFAPPNMDNSMGTEEITVLKGSSTSMACITDGTPAPSMAWLRDGQPLGLDAHLTVSTHGMVLQLLKAETEDSGKYTCIASNEAGEVSKHFILKVLEPPHINGSEEHEEISVIVNNPLELTCIASGIPAPKMTWMKDGRPLPQTDQVQTLGGGEVLRISTAQVEDTGRYTCLASSPAGDDDKEYLVRVHVPPNIAGTDEPRDITVLRNRQVTLECKSDAVPPPVITWLRNGERLQATPRVRILSGGRYLQINNADLGDTANYTCVASNIAGKTTREFILTVNVPPNIKGGPQSLVILLNKSTVLECIAEGVPTPRITWRKDGAVLAGNHARYSILENGFLHIQSAHVTDTGRYLCMATNAAGTDRRRIDLQVHVPPSIAPGPTNMTVIVNVQTTLACEATGIPKPSINWRKNGHLLNVDQNQNSYRLLSSGSLVIISPSVDDTATYECTVTNGAGDDKRTVDLTVQVPPSIADEPTDFLVTKHAPAVITCTASGVPFPSIHWTKNGIRLLPRGDGYRILSSGAIEILATQLNHAGRYTCVARNAAGSAHRHVTLHVHEPPVIQPQPSELHVILNNPILLPCEATGTPSPFITWQKEGINVNTSGRNHAVLPSGGLQISRAVREDAGTYMCVAQNPAGTALGKIKLNVQVPPVISPHLKEYVIAVDKPITLSCEADGLPPPDITWHKDGRAIVESIRQRVLSSGSLQIAFVQPGDAGHYTCMAANVAGSSSTSTKLTVHVPPRIRSTEGHYTVNENSQAILPCVADGIPTPAINWKKDNVLLANLLGKYTAEPYGELILENVVLEDSGFYTCVANNAAGEDTHTVSLTVHVLPTFTELPGDVSLNKGEQLRLSCKATGIPLPKLTWTFNNNIIPAHFDSVNGHSELVIERVSKEDSGTYVCTAENSVGFVKAIGFVYVKEPPVFKGDYPSNWIEPLGGNAILNCEVKGDPTPTIQWNRKGVDIEISHRIRQLGNGSLAIYGTVNEDAGDYTCVATNEAGVVERSMSLTLQSPPIITLEPVETVINAGGKIILNCQATGEPQPTITWSRQGHSISWDDRVNVLSNNSLYIADAQKEDTSEFECVARNLMGSVLVRVPVIVQVHGGFSQWSAWRACSVTCGKGIQKRSRLCNQPLPANGGKPCQGSDLEMRNCQNKPCPVDGSWSEWSLWEECTRSCGRGNQTRTRTCNNPSVQHGGRPCEGNAVEIIMCNIRPCPVHGAWSAWQPWGTCSESCGKGTQTRARLCNNPPPAFGGSYCDGAETQMQVCNERNCPIHGKWATWASWSACSVSCGGGARQRTRGCSDPVPQYGGRKCEGSDVQSDFCNSDPCPTHGNWSPWSGWGTCSRTCNGGQMRRYRTCDNPPPSNGGRACGGPDSQIQRCNTDMCPVDGSWGSWHSWSQCSASCGGGEKTRKRLCDHPVPVKGGRPCPGDTTQVTRCNVQACPGGPQRARGSVIGNINDVEFGIAFLNATITDSPNSDTRIIRAKITNVPRSLGSAMRKIVSILNPIYWTTAKEIGEAVNGFTLTNAVFKRETQVEFATGEILQMSHIARGLDSDGSLLLDIVVSGYVLQLQSPAEVTVKDYTEDYIQTGPGQLYAYSTRLFTIDGISIPYTWNHTVFYDQAQGRMPFLVETLHASSVESDYNQIEETLGFKIHASISKGDRSNQCPSGFTLDSVGPFCADEDECAAGNPCSHSCHNAMGTYYCSCPKGLTIAADGRTCQDIDECALGRHTCHAGQDCDNTIGSYRCVVRCGSGFRRTSDGLSCQDINECQESSPCHQRCFNAIGSFHCGCEPGYQLKGRKCMDVNECRQNVCRPDQHCKNTRGGYKCIDLCPNGMTKAENGTCIDIDECKDGTHQCRYNQICENTRGSYRCVCPRGYRSQGVGRPCMDIDECENTDACQHECKNTFGSYQCICPPGYQLTHNGKTCQDIDECLEQNVHCGPNRMCFNMRGSYQCIDTPCPPNYQRDPVSGFCLKNCPPNDLECALSPYALEYKLVSLPFGIATNQDLIRLVAYTQDGVMHPRTTFLMVDEEQTVPFALRDENLKGVVYTTRPLREAETYRMRVRASSYSANGTIEYQTTFIVYIAVSAYPY

SEQ ID NO: 48880 - protein, 240 aa, Homo sapiens
AIGSFHCGCEPGYQLKGRKCMDVNECRQNVCRPDQHCKNTRGGYKCIDLCPNGMTKAENGTCIDIDECKDGTHQCRYNQICENTRGSYRCVCPRGYRSQGVGRPCMDIDECENTDACQHECKNTFGSYQCICPPGYQLTHNGKTCQDIDECLEQNVHCGPNRMCFNMRGSYQCIDTPCPPNYQRDPVSGFCLKNCPPNDLECALSPYALEYKLVSLPFGIATNQDLIRLVAYTQDGVMHP

SEQ ID NO: 48881 - protein, 484 aa, Homo sapiens
MDLGKDQSHLKHHQTPDPHQEENHSPEVIGTWSLRNRELLRKRKAEVHEKETSQWLFGEQKKRKQQRTGKGNRRGRKRQQNTELKVEPQPQIEKEIVEKALAPIEKKTEPPGSITKVFPSVASPQKVVPEEHFSEICQESNIYQENFSEYQEIAVQNHSSETCQHVSEPEDLSPKMYQEISVLQDNSSKICQDMKEPEDNSPNTCQVISVIQDHPFKMYQDMAKREDLAPKMCQEAAVPKILPCPTSEDTADLAGCSLQAYPKPDVPKGYILDTDQNPAEPEEYNETDQGIAETEGLFPKIQEIAEPKDLSTKTHQESAEPKYLPHKTCNEIIVPKAPSHKTIQETPHSEDYSIEINQETPGSEKYSPETYQEIPGLEEYSPEIYQETSQLEEYSPEIYQETPGPEDLSTETYKNKDVPKECFPEPHQETGGPQGQDPKAHQEDAKDAYTFPQEMKEKPKEEPGIPAILNESHPENDVYSYVLF

SEQ ID NO: 48882 - protein, 484 aa, Homo sapiens; identical to SEQ ID NO: 48881

SEQ ID NO: 48883 - protein, 142 aa, Homo sapiens
MVLSPADKTNVKAAWGKVGAHAGEYGAEALERMFLSFPTTKTYFPHFDLSHGSAQVKGHGKKVADALTNAVAHVDDMPNALSALSDLHAHKLRVDPVNFKLLSHCLLVTLAAHLPAEFTPAVHASLDKFLASVSTVLTSKYR

SEQ ID NO: 48884 - protein, 142 aa, Homo sapiens; identical to SEQ ID NO: 48883

SEQ ID NO: 48885 - protein, 110 aa, Homo sapiens
MFLSFPTTKTYFPHFDLSHGSAQVKGHGKKVADALTNAVAHVDDMPNALSALSDLHAHKLRVDPVNFKLLSHCLLVTLAAHLPAEFTPAVHASLDKFLASVSTVLTSKYR

SEQ ID NO: 48886 - protein, 147 aa, Homo sapiens
MVHLTPEEKSAVTALWGKVNVDEVGGEALGRLLVVYPWTQRFFESFGDLSTPDAVMGNPKVKAHGKKVLGAFSDGLAHLDNLKGTFATLSELHCDKLHVDPENFRLLGNVLVCVLAHHFGKEFTPPVQAAYQKVVAGVANALAHKYH

SEQ ID NO: 48887 - protein, 90 aa, Homo sapiens
MVHLTPEEKSAVTALWGKVNVDEVGGEALGRLLVVYPWTQRFFESFGDLSTPDAVMGNPKVKAHGKKVLGAFSDGLAHLDNLKGTFATLS

SEQ ID NO: 48888 - protein, 141 aa, Homo sapiens
MVHLTPEEKTAVNALWGKVNVDAVGGEALGRLLVVYPWTQRFFESFGDLSSPDAVMGNPKVKAHGKKVLGAFSDGLAHLDNLKGTFSQLSELHCDKLHVDPENFRVCKKVPEALQIGSTCLFYKEYMGKEKSKGTVQGING

SEQ ID NO: 48889 - protein, 147 aa, Homo sapiens
MVHLTPEEKTAVNALWGKVNVDAVGGEALGRLLVVYPWTQRFFESFGDLSSPDAVMGNPKVKAHGKKVLGAFSDGLAHLDNLKGTFSQLSELHCDKLHVDPENFRLLGNVLVCVLARNFGKEFTPQMQAAYQKVVAGVANALAHKYH

SEQ ID NO: 48890 - protein, 104 aa, Homo sapiens
MVHLTPEEKTAVNALWGKVNVDAVGGEALGRLLVVYPWTQRFFESFGDLSSPDAVMGNPKVKAHGKKVLGAFSDGLAHLDNLKGTFSQLSELHCDKLHVDPENF

SEQ ID NO: 48891 - protein, 147 aa, Homo sapiens
MVHFTAEEKAAVTSLWSKMNVEEAGGEALGRLLVVYPWTQRFFDSFGNLSSPSAILGNPKVKAHGKKVLTSFGDAIKNMDNLKPAFAKLSELHCDKLHVDPENFKLLGNVMVIILATHFGKEFTPEVQAAWQKLVSAVAIALAHKYH

SEQ ID NO: 48892 - protein, 147 aa, Homo sapiens; identical to SEQ ID NO: 48891

SEQ ID NO: 48893 - protein, 87 aa, Homo sapiens
MVHFTAEEKAAVTSLWSKMNVEEAGGEALGRLLVVYPWTQRFFDSFGNLSSPSAILGNPKVKAHGKKVLTSFGDAIKNMDNLKPAFA

SEQ ID NO: 48894 - protein, 147 aa, Homo sapiens
MGHFTEEDKATITSLWGKVNVEDAGGETLGRLLVVYPWTQRFFDSFGNLSSASAIMGNPKVKAHGKKVLTSLGDATKHLDDLKGTFAQLSELHCDKLHVDPENFKLLGNVLVTVLAIHFGKEFTPEVQASWQKMVTAVASALSSRYH

SEQ ID NO: 48895 - protein, 147 aa, Homo sapiens
MGHFTEEDKATITSLWGKVNVEDAGGETLGRLLVVYPWTQRFFDSFGNLSSASAIMGNPKVKAHGKKVLTSLGDAIKHLDDLKGTFAQLSELHCDKLHVDPENFKLLGNVLVTVLAIHFGKEFTPEVQASWQKMVTGVASALSSRYH

SEQ ID NO: 48896 - protein, 158 aa, Homo sapiens
MGHFTEEDKATITSLWGKVNVEDAGGETLGRLLVVYPWTQRFFDSFGNLSSASAIMGNPKVKAHGKKVLTSLGDAIKHLDDLKGTFAQLSELHCDKLHVDPENFKLLGNVLVTVLAIHFGKEFTPEVQASWQKMDWSGQCPVLQIPLSSLPMMQSFQG

SEQ ID NO: 48897 - protein, 137 aa, Homo sapiens
MVVLGEMKRKVLPLHFLPFMRLLVVYPWTQRFFDSFGNLSSASAIMGNPKVKAHGKKVLTSLGDAIKHLDDLKGTFAQLSELHCDKLHVDPENFKLLGNVLVTVLAIHFGKEFTPEVQASWQKMVTGVASALSSRYH

SEQ ID NO: 48898 - protein, 147 aa, Homo sapiens; identical to SEQ ID NO: 48895

SEQ ID NO: 48899 - protein, 141 aa, Homo sapiens
MLSAQERAQIAQVWDLIAGHEAQFGAELLLRLFTVYPSTKVYFPHLSACQDATQLLSHGQRMLAAVGAAVQHVDNLRAALSPLADLHALVLRVDPANFPLLIQCFHVVLASHLQDEFTVQMQAAWDKFLTGVAVVLTEKYR

SEQ ID NO: 48900 - protein, 142 aa, Homo sapiens
MALSAEDRALVRALWKKLGSNVGVYTTEALERTFLAFPATKTYFSHLDLSPGSSQVRAHGQKVADALSLAVERLDDLPHALSALSHLHACQLRVDPASFQLLGHCLLVTLARHYPGDFSPALQASLDKFLSHVISALVSEYR

SEQ ID NO: 48901 - protein, 142 aa, Homo sapiens
MSLTKTERTIIVSMWAKISTQADTIGTETLERLFLSHPQTKTYFPHFDLHPGSAQLRAHGSKVVAAVGDAVKSIDDIGGALSKLSELHAYILRVDPVNFKLLSHCLLVTLAARFPADFTAEAHAAWDKFLSVVSSVLTEKYR

SEQ ID NO: 48902 - protein, 462 aa, Homo sapiens
MARVLGAPVALGLWSLCWSLAIATPLPPTSAHGNVAEGETKPDPDVTERCSDGWSFDATTLDDNGTMLFFKGEFVWKSHKWDRELISERWKNFPSPVDAAFRQGHNSVFLIKGDKVWVYPPEKKEKGYPKLLQDEFPGIPSPLDAAVECHRGECQAEGVLFFQGDREWFWDLATGTMKERSWPAVGNCSSALRWLGRYYCFQGNQFLRFDPVRGEVPPRYPRDVRDYFMPCPGRGHGHRNGTGHGNSTHHGPEYMRCSPHLVLSALTSDNHGATYAFSGTHYWRLDTSRDGWHSWPIAHQWPQGPSAVDAAFSWEEKLYLVQGTQVYVFLTKGGYTLVSGYPKRLEKEVGTPHGIILDSVDAAFICPGSSRLHIMAGRRLWWLDLKSGAQATWTELPWPHEKVDGALCMEKSLGPNSCSANGPGLYLIHGPNLYCYSDVEKLNAAKALPQPQNVTSLLGCTH

SEQ ID NO: 48903 - protein, 254 aa, Homo sapiens [sequence omitted]

SEQ ID NO: 48904 - protein, 450 aa, Homo sapiens
MWLKVFTTFLSFATGACSGLKVTVPSHTVHGVRGQALYLPVHYGFHTPASDIQIIWLFERPHTMPKYLLGSVNKSVVPDLEYQHKFTMMPPNASLLINPLQFPDEGNYIVKVNIQGNGTLSASQKIQVTVDDPVTKPVVQIHPPSGAVEYVGNMTLTCHVEGGTRLAYQWLKNGRPVHTSSTYSFSPQNNTLHIAPVTKEDIGNYSCLVRNPVSEMESDIIMPIIYYGPYGLQVNSDKGLKVGEVFTVDLGEAILFDCSADSHPPNTYSWIRRTDNTTYIIKHGPRLEVASEKVAQKTMDYVCCAYNNITGRQDETHFTVIITSVGLEKLAQKGKSLSPLASITGISLFLIISMCLLFLWKKYQPYKVIKQKLEGRPETEYRKAQTFSGHEDALDDFGIYEFVAFPDVSGVSRIPSRSVPASDCVSGQDLHSTVYEVIQHIPAQQQDHPE

SEQ ID NO: 48905 - protein, 462 aa, Homo sapiens
MGQDAFMEPFGDTLGVFQCKIYLLLFGACSGLKVTVPSHTVHGVRGQALYLPVHYGFHTPASDIQIIWLFERPHTMPKYLLGSVNKSVVPDLEYQHKFTMMPPNASLLINPLQFPDEGNYIVKVNIQGNGTLSASQKIQVTVDDPVTKPVVQIHPPSGAVEYVGNMTLTCHVEGGTRLAYQWLKNGRPVHTSSTYSFSPQNNTLHIAPVTKEDIGNYSCLVRNPVSEMESDIIMPIIYYGPYGLQVNSDKGLKVGEVFTVDLGEAILFDCSADSHPPNTYSWIRRTDNTTYIIKHGPRLEVASEKVAQKTMDYVCCAYNNITGRQDETHFTVIITSVGLEKLAQKGKSLSPLASITGISLFLIISMCLLFLWKKYQPYKVIKQKLEGRPETEYRKAQTFSGHEDALDDFGIYEFVAFPDVSGVSRIPSRSVPASDCVSGQDLHSTVYEVIQHIPAQQQDHPE

SEQ ID NO: 48906 - protein, 367 aa, Homo sapiens
MAYRVLGRAGPPQPRRARRLLFAFTLSLSCTYLCYSFLCCCDDLGRSRLLGAPRCLRGPSAGGQKLLQKSRPCDPSGPTPSEPSAPSAPAAAVPAPRLSGSNHSGSPKLGTKRLPQALIVGVKKGGTRAVLEFIRVHPDVRALGTEPHFFDRNYGRGLDWYRSLMPRTLESQITLEKTPSYFVTQEAPRRIFNMSRDTKLIVVVRNPVTRAISDYTQTLSKKPDIPTFEGLSFRNRTLGLVDVSWNAIRIGMYVLHLESWLQYFPLAQIHFVSGERLITDPAGEMGRVQDFLGIKRFITDKHFYFNKTKGFPCLKKTESSLLPRCLGKSKGRTHVQIDPEVIDQLREFYRPYNIKFYETVGQDFRWE

SEQ ID NO: 48907 - protein, 344 aa, Homo sapiens
PPARAHGAMAYRVLGRAGPPQPRRARRLLFAFTLSLSCTYLCYSFLCCCDDLGRSRLLGAPRCLRGPSAGGQKLLQKSRPCDPSGPTPSEPSAPSAPAAAVPAPRLSGSNHSGSPKLGTKRLPQALIVGVKKGGTRAVLEFIRVHPDVRALGTEPHFFDRNYGRGLDWYRSLMPRTLESQITLEKTPSYFVTQEAPRRIFNMSRDTKLIVVVRNPVTRAISDYTQTLSKKPDIPTFEGLSFRNRTLGLVDVSWNAIRIGMYVLHLESWLQYFPLAQIHFVSGERLITDPAGEMGRVQDFLGIKRFITDKHFYFNKTKGFPCLKNRIEPPASMLGQIKRENSCTD

SEQ ID NO: 48908 - protein, 406 aa, Homo sapiens
MAPPGPASALSTSAEPLSRSIFRKFLLMLCSLLTSLYVFYCLAERCQTLSGPVVGLSGGGEEAGAPGGGVLAGGPRELAVWPAAAQRKRLLQLPQWRRRRPPAPRDDGEEAAWEEESPGLSGGPGGSGAGSTVAEAPPGTLALLLDEGSKQLPQAIIIGVKKGGTRALLEFLRVHPDVRAVGAEPHFFDRSYDKGLAWYRDLMPRTLDGQITMEKTPSYFVTREAPARISAMSKDTKLIVVVRDPVTRAISDYTQTLSKRPDIPTFESLTFKNRTAGLIDTSWSAIQIGIYAKHLEHWLRHFPIRQMLFVSGERLISDPAGELGRVQDFLGLKRIITDKHFYFNKTKGFPCLKKAEGSSRPHCLGKTKGRTHPEIDREVVRRLREFYRPFNLKFYQMTGHDFGWDG

SEQ ID NO: 48909 - protein, 390 aa, Homo sapiens
MGQRLSGGRSCLDVPGRLLPQPPPPPPPVRRKLALLFAMLCVWLYMFLYSCAGSCAAAPGLLLLGSGSRAAHDPPALATAPDGTPPRLPFRAPPATPLASGKEMAEGAASPEEQSPEVPDSPSPISSFFSGSGSKQLPQAIIIGVKKGGTRALLEFLRVHPDVRAVGAEPHFFDRSYDKGLAWYRDLMPRTLDGQITMEKTPSYFVTREAPARISAMSKDTKLIVVVRDPVTRAISDYTQTLSKRPDIPTFESLTFKNRTAGLIDTSWSAIQIGIYAKHLEHWLRHFPIRQMLFVSGERLISDPAGELGRVQDFLGLKRIITDKHFYFNKTKGFPCLKKAEGSSRPHCLGKTKGRTHPEIDREVVRRLREFYRPFNLKFYQMTGHDFGWD

SEQ ID NO: 48910 - protein, 390 aa, Homo sapiens; identical to SEQ ID NO: 48909

SEQ ID NO: 48911 - protein, 456 aa, Homo sapiens
MARWPAPPPPPPPPPPLAAPPPPGASAKGPPARKLLFMCTLSLSVTYLCYSLLGGSGSLQFPLALQESPGAAAEPPPSPPPPSLLPTPVRLGAPSQPPAPPPLDNASHGEPPEPPEQPAAPGTDGWGLPSGGGGAQDAWLRTPLAPSEMITAQSALPEREAQESSTTDEDLAGRRAANGSSERGGAVSTPDYGEKKLPQALIIGVKKGGTRALLEAIRVHPDVRAVGVEPHFFDRNYEKGLEWYRNVMPKTLDGQITMEKTPSYFVTNEAPKRIHSMAKDIKLIVVVRNPVTRAISDYTQTLSKKPEIPTFEVLAFKNRTLGLIDASWSAIRIGIYALHLENWLQYFPLSQILFVSGERLIVDPAGEMAKVQDFLGLKRVVTEKHFYFNKTKGFPCLKKPEDSSAPRCLGKSKGRTHPRIDPDVIHRLRKFYKPFNLMFYQMTGQDFQWEQEEGDK

SEQ ID NO: 48912 - protein, 346 aa, Homo sapiens
MLFKQQAWLRQKLLVLGSLAVGSLLYLVARVGSLDRLQPICPIEGRLGGARTQAEFPLRALQFKRGLLHEFRKGNASKEQVRLHDLVQQLPKAIIIGVRKGGTRALLEMLNLHPAVVKASQEIHFFDNDENYGKGIEWYRKKMPFSYPQQITIEKSPAYFITEEVPERIYKMNSSIKLLIIVREPTTRAISDYTQVLEGKERKNKTYYKFEKLAIDPNTCEVNTKYKAVRTSIYTKHLERWLKYFPIEQFHVVDGDRLITEPLPELQLVEKFLNLPPRISQYNLYFNATRGFYCLRFNIIFNKCLAGSKGRIHPEVDPSVITKLRKFFHPFNQKFYQITGRTLNWP

SEQ ID NO: 48913 - protein, 346 aa, Homo sapiens; identical to SEQ ID NO: 48912

SEQ ID NO: 48914 - protein, 322 aa, Homo sapiens
MLFIKFIHLEVFSMPERAIARHEVREIEQRHTMDGPRQDATLDEEEDMVIIYNRVPKTASTSFTNIAYDLCAKNKYHVLHINTTKNNPVMSLQDQVRFVKNITSWKEMKPGFYHGHVSYLDFAKFGVKKKPIYINVIRDPIERLVSYYYFLRFGDDYRPGLRRRKQGDKKTFDECVAEGGSDCAPEKLWLQIPFFCGHSSECWNVGSRWAMDQAKYNLINEYFLVGVTEELEDFIMLLEAALPRFFRGATELYRTAPDTATPSHRHGPICGSKSISSLLVKVSPVCKDSHCHCRRGTGTPKGETLATLAPCSQSWSSVTHRW

SEQ ID NO: 48915 - protein, 303 aa, Homo sapiens
MLFIKFIHLEVFSMPERAIARHEVREIEQRHTMDGPRQDATLDEEEDMVIIYNRVPKTASTSFTNIAYDLCAKNKYHVLHINTTKNNPVMSLQDQVRFVKNITSWKEMKPGFYHGHVSYLDFAKFGVKKKPIYINVIRDPIERLVSYYYFLRFGDDYRPGLRRRKQGDKKTFDECVAEGGSDCAPEKLWLQIPFFCGHSSECWNVGSRWAMDQAKYNLINEYFLVGVTEELEDFIMLLEAALPRFFRGATELYRTAPDTATPSHRHGPICGSKSISSLLVKVSPVCKDSHCLGKCSRNGLSAV

SEQ ID NO: 48916 - protein, 356 aa, Homo sapiens
MGLLRIMMPPKLQLLAVVAFAVAMLFLENQIQKLEESRSKLERAIARHEVREIEQRHTMDGPRQDATLDEEEDMVIIYNRVPKTASTSFTNIAYDLCAKNKYHVLHINTTKNNPVMSLQDQVRFVKNITSWKEMKPGFYHGHVSYLDFAKFGVKKKPIYINVIRDPIERLVSYYYFLRFGDDYRPGLRRRKQGDKKTFDECVAEGGSDCAPEKLWLQIPFFCGHSSECWNVGSRWAMDQAKYNLINEYFLVGVTEELEDFIMLLEAALPRFFRGATELYRTGKKSHLRKTTEKKLPTKQTIAKLQQSDIWKMENEFYEFALEQFQFIRAHAVREKDGDLYILAQNFFYEKIYPKSN

SEQ ID NO: 48917 - protein, 229 aa, Homo sapiens
MGLLRIMMPPKLQLLAVVAFAVAMLFLENQIQKLEESRSKLERAIARHEVREIEQRHTMDGPRQDATLDEEEDMVIIYNRVPKTASTSFTNIAYDLCAKNKYHVLHINTTKNNPVMSLQDQVRFVKNITSWKEMKPGFYHGHVSYLDFAKFGVKKKPIYINVIRDPIERLVSYYYFLRFGDDYRPGLRRRKQGDKKTFDECVAEGGSDCAPEKLWLQIPFFCGHSSECW

SEQ ID NO: 48918 - protein, 411 aa, Homo sapiens
MRRRRAGGRTMVERASKFVLVVAGSVCFMLILYQYAGPGLSLGAPGGRAPPDDLDLFPTPDPHYEKKYYFPVRELERSLRFDMKGDDVIVFLHIQKTGGTTFGRHLVQNVRLEVPCDCRPGQKKCTCYRPNRRETWLFSRFSTGWSCGLHADWTELTNCVPGVLDRRDSAALRTPRKFYYITLLRDPVSRYLSEWRHVQRGATWKTSLHMCDGRTPTPEELPPCYEGTDWSGCTLQEFMDCPYNLANNRQVRMLADLSLVGCYNLSFIPEGKRAQLLLESAKKNLRGMAFFGLTEFQRKTQYLFERTFNLKFIRPFMQYNSTRAGGVEVDEDTIRRIEELNDLDMQLYDYAKDLFQQRYQYKRQLERREQRLRSREERLLHRAKEALPREDADEPGRVPTEDYMSHIIEKW

SEQ ID NO: 48919 - protein, 276 aa, Homo sapiens
MLFLFAVIVLQYVCPGTECQLLRLQAFSSPVPDPYRSEDESSARFVPRYNFTRGDLLRKVDFDIKGDDLIVFLHIQKTGGTTFGRHLVRNIQLEQPCECRVGQKKCTCHRPGKRETWLFSRFSTGWSCGLHADWTELTSCVPSVVDGKRDARLRPSRWRIFQILDAASKDKRGSPNTNAGANSPSSTKTRNTSKSGKNFHYITILRDPVSRYLSEWRHVQRGATWKASLHVCDGRPPTSEELPSCYTGDDWSGCPLKEFMDCPYNLANNRCACSPT

SEQ ID NO: 48920 - protein, 462 aa, Homo sapiens
MDEKSNKLLLALVMLFLFAVIVLQYVCPGTECQLLRLQAFSSPVPDPYRSEDESSARFVPRYNFTRGDLLRKVDFDIKGDDLIVFLHIQKTGGTTFGRHLVRNIQLEQPCECRVGQKKCTCHRPGKRETWLFSRFSTGWSCGLHADWTELTSCVPSVVDGKRDARLRPSRWRIFQILDAASKDKRGSPNTNAGANSPSSTKTRNTSKSGKNFHYITILRDPVSRYLSEWRHVQRGATWKASLHVCDGRPPTSEELPSCYTGDDWSGCPLKEFMDCPYNLANNRQVRMLSDLTLVGCYNLSVMPEKQRNKVLLESAKSNLKHMAFFGLTEFQRKTQYLFEKTFNMNFISPFTQYNTTRASSVEINEEIQKRIEGLNFLDMELYSYAKDLFLQRYQFMRQKEHQEARRKRQEQRKFLKGRLLQTHFQSQGQGQSQNPNQNQSKEQNDNTSNGTNDYIGSVEKWR

SEQ ID NO: 48921 - protein, 605 aa, Homo sapiens
MALPACAVREFEPPRQPERGAPVRTTCPRRHSRVEAELAASRPGSVAASVRAGPPRGVSHGFHTRPLLDKPRKASSSLAGAACAPLFALLSRGRRRRMHVLRRRWDLGSLCRALLTRGLAALGHSLKHVLGAIFSKIFGPMASVGNMDEKSNKLLLALVMLFLFAVIVLQYVCPGTECQLLRLQAFSSPVPDPYRSEDESSARFVPRYNFTRGDLLRKVDFDIKGDDLIVFLHIQKTGGTTFGRHLVRNIQLEQPCECRVGQKKCTCHRPGKRETWLFSRFSTGWSCGLHADWTELTSCVPSVVDGKRDARLRPSRNFHYITILRDPVSRYLSEWRHVQRGATWKASLHVCDGRPPTSEELPSCYTGDDWSGCPLKEFMDCPYNLANNRQVRMLSDLTLVGCYNLSVMPEKQRNKVLLESAKSNLKHMAFFGLTEFQRKTQYLFEKTFNMNFISPFTQYNTTRASSVEINEEIQKRIEGLNFLDMELYSYAKDLFLQRYQFMRQKEHQEARRKRQEQRKFLKGRLLQTHFQSQGQGQSQNPNQNQSQNPNPNANQNLTQNLMQNLTQSLSQKENRESPKQNSGKEQNDNTSNGTNDYIGSVEKWR

SEQ ID NO: 48922 - protein, 459 aa, Homo sapiens
MDEKSNKLLLALVMLFLFAVIVLQYVCPGTECQLLRLQAFSSPVPDPYRSEDESSARFVPRYNFTRGDLLRKVDFDIKGDDLIVFLHIQKTGGTTFGRHLVRNIQLEQPCECRVGQKKCTCHRPGKRETWLFSRFSTGWSCGLHADWTELTSCVPSVVDGKRDARLRPSRNFHYITILRDPVSRYLSEWRHVQRGATWKASLHVCDGRPPTSEELPSCYTGDDWSGCPLKEFMDCPYNLANNRQVRMLSDLTLVGCYNLSVMPEKQRNKVLLESAKSNLKHMAFFGLTEFQRKTQYLFEKTFNMNFISPFTQYNTTRASSVEINEEIQKRIEGLNFLDMELYSYAKDLFLQRYQFMRQKEHQEARRKRQEQRKFLKGRLLQTHFQSQGQGQSQNPNQNQSQNPNPNANQNLTQNLMQNLTQSLSQKENRESPKQNSGKEQNDNTSNGTNDYIGSVEKWR

SEQ ID NO: 48923 - protein, 331 aa, Homo sapiens
MLLKHNGKLLLFYLLSYQALASDWFYCSFNRWRIFQILDAARNFHYITILRDPVSRYLSEWRHVQRGATWKASLHVCDGRPPTSEELPSCYTGDDWSGCPLKEFMDCPYNLANNRQVRMLSDLTLVGCYNLSVMPEKQRNKVLLESAKSNLKHMAFFGLTEFQRKTQYLFEKTFNMNFISPFTQYNTTRASSVEINEEIQKRIEGLNFLDMELYSYAKDLFLQRYQFMRQKEHQEARRKRQEQRKFLKGRLLQTHFQSQGQGQSQNPNQNQSQNPNPNANQNLTQNLMQNLTQSLSQKENRESPKQNSGKEQNDNTSNGTNDYIGSVEKWR

SEQ ID NO: 48924 - protein, 645 aa, Homo sapiens
MALPACAVREFEPPRQPERGAPVRTTCPRRHSRVEAELAASRPGSVAASVRAGPPRGVSHGFHTRPLLDKPRKASSSLAGAACAPLFALLSRGRRRRMHVLRRRWDLGSLCRALLTRGLAALGHSLKHVLGAIFSKIFGPMASVGNMDEKSNKLLLALVMLFLFAVIVLQYVCPGTECQLLRLQAFSSPVPDPYRSEDESSARFVPRYNFTRGDLLRKVDFDIKGDDLIVFLHIQKTGGTTFGRHLVRNIQLEQPCECRVGQKKCTCHRPGKRETWLFSRFSTGWSCGLHADWTELTSCVPSVVDGKRDARLRPSRWRIFQILDAASKDKRGSPNTNAGANSPSSTKTRNTSKSGKNFHYITILRDPVSRYLSEWRHVQRGATWKASLHVCDGRPPTSEELPSCYTGDDWSGCPLKEFMDCPYNLANNRQVRMLSDLTLVGCYNLSVMPEKQRNKVLLESAKSNLKHMAFFGLTEFQRKTQYLFEKTFNMNFISPFTQYNTTRASSVEINEEIQKRIEGLNFLDMELYSYAKDLFLQRYQFMRQKEHQEARRKRQEQRKFLKGRLLQTHFQSQGQGQSQNPNQNQSQNPNPNANQNLTQNLMQNLTQSLSQKENRESPKQNSGKEQNDNTSNGTNDYIGSVEKWR

SEQ ID NO: 48925 - protein, 471 aa, Homo sapiens
MDERFNKWLLTPVLTLLFVVIMYQYVSPSCTSSCTNFGEQPRAGEAGPPAVPGPARRAQAPPEEWERRPQLPPPPRGPPEGPRGAAAPEEEDEEPGDPREGEEEEEEDEPDPEAPENGSLPRFVPRFNFSLKDLTRFVDFNIKGRDVIVFLHIQKTGGTTFGRHLVKNIRLEQPCSCKAGQKKCTCHRPGKKETWLFSRFSTGWSCGLHADWTELTNCVPAIMEKKDCPRNHSHTRNFYYITMLRDPVSRYLSEWKHVQRGATWKTSLHMCDGRSPTPDELPTCYPGDDWSGVSLREFMDCTYNLANNRQVRMLADLSLVGCYNLTFMNESERNTILLQSAKNNLKNMAFFGLTEFQRKTQFLFERTFNLKFISPFTQFNITRASNVEINEGARQRIEDLNFLDMQLYEYAKDLFQQRYHHTKQLEHQRDRQKRREERRLQREHRDHQWPKEDGAAEGTVTEDYNSQVVRW

SEQ ID NO: 48926 - protein, 180 aa, Homo sapiens
  VARIANT 1: note = MOD_RES - Any amino acid
XAQTPPPPPAAVAVAVTPVPQFPRACTEAEFACHSYNECVALEYRCDRRPDCRDMSDELNCEEPVLGISPTFSLLVETTSLPPRPETTIMRQPPVTHAPQPLLPGSVRPLPCGPQEAACRNGHCIPRDYLCDGQEDCEDGSDELDCGPPPPCEPNEFPCGNGHCALKLWRCDGDFDCEDR

SEQ ID NO: 48927 - protein, 94 aa, Homo sapiens
  VARIANT 1: note = MOD_RES - Any amino acid
XGHPHSPSSGAAWAAAFLGGRPPGTSCCTLSVQPLRTQAATAAGSPTRWAQPRPLPSCSSKNPELGPELPRDVYMPGPWTLGEGPGQCPAGYPR

SEQ ID NO: 48928 - protein, 4391 aa, Homo sapiens
MGWRAAGALLLALLLHGRLLAVTHGLRAYDGLSLPEDIETVTASQMRWTHSYLSDDEDMLADSISGDDLGSGDLGSGDFQMVYFRALVNFTRSIEYSPQLEDAGSREFREVSEAVVDTLESEYLKIPGDQVVSVVFIKELDGWVFVELDVGSEGNADGAQIQEMLLRVISSGSVASYVTSPQGFQFRRLGTVPQFPRACTEAEFACHSYNECVALEYRCDRRPDCRDMSDELNCEEPVLGISPTFSLLVETTSLPPRPETTIMRQPPVTHAPQPLLPGSVRPLPCGPQEAACRNGHCIPRDYLCDGQEDCEDGSDELDCGPPPPCEPNEFPCGNGHCALKLWRCDGDFDCEDRTDEANCPTKRPEEVCGPTQFRCVSTNMCIPASFHCDEESDCPDRSDEFGCMPPQVVTPPRESIQASRGQTVTFTCVAIGVPTPIINWRLNWGHIPSHPRVTVTSEGGRGTLIIRDVKESDQGAYTCEAMNARGMVFGIPDGVLELVPQRGPCPDGHFYLEHSAACLPCFCFGITSVCQSTRRFRDQIRLRFDQPDDFKGVNVTMPAQPGTPPLSSTQLQIDPSLHEFQLVDLSRRFLVHDSFWALPEQFLGNKVDSYGGSLRYNVRYELARGMLEPVQRPDVVLMGAGYRLLSRGHTPTQPGALNQRQVQFSEEHWVHESGRPVQRAELLQVLQSLEAVLIQTVYNTKMASVGLSDIAMDTTVTHATSHGRAHSVEECRCPIGYSGLSCESCDAHFTRVPGGPYLGTCSGCNCNGHASSCDPVYGHCLNCQHNTEGPQCNKCKAGFFGDAMKATATSCRPCPCPYIDASRRFSDTCFLDTDGQATCDACAPGYTGRRCESCAPGYEGNPIQPGGKCRPVNQEIVRCDERGSMGTSGEACRCKNNVVGRLCNECADGSFHLSTRNPDGCLKCFCMGVSRHCTSSSWSRAQLHGASEEPGHFSLTNAASTHTTNEGIFSPTPGELGFSSFHRLLSGPYFWSLPSRFLGDKVTSYGGELRFTVTQRSQPGSTPLHGQPLVVLQGNNIILEHHVAQEPSPGQPSTFIVPFREQAWQRPDGQPATREHLLMALAGIDTLLIRASYAQQPAESRVSGISMDVAVPEETGQDPALEVEQCSCPPGYRGPSCQDCDTGYTRTPSGLYLGTCERCSCHGHSEACEPETGACQGCQHHTEGPRCEQCQPGYYGDAQRGTPQDCQLCPCYGDPAAGQAAHTCFLDTDGHPTCDACSPGHSGRHCERCAPGYYGNPSQGQPCQRDSQVPGPIGCNCDPQGSVSSQCDAAGQCQCKAQVEGLTCSHCRPHHFHLSASNPDGCLPCFCMGITQQCASSAYTRHLISTHFAPGDFQGFALVNPQRNSRLTGEFTVEPVPEGAQLSFGNFAQLGHESFYWQLPETYQGDKVAAYGGKLRYTLSYTAGPQGSPLSDPDVQITGNNIMLVASQPALQGPERRSYEIMFREEFWRRPDGQPATREHLLMALADLDELLIRATFSSVPLAASISAVSLEVAQPGPSNRPRALEVEECRCPPGYIGLSCQDCAPGYTRTGSGLYLGHCELCECNGHSDLCHPETGACSQCQHNAAGEFCELCAPGYYGDATAGTPEDCQPCACPLTNPENMFSRTCESLGAGGYRCTACEPGYTGQYCEQCGPGYVGNPSVQGGQCLPETNQAPLVVEVHPARSIVPQGGSHSLRCQVSGSPPHYFYWSREDGRPVPSGTQQRHQGSELHFPSVQPSDAGVYICTCRNLHQSNTSRAELLVTEAPSKPITVTVEEQRSQSVRPGADVTFICTAKSKSPAYTLVWTRLHNGKLPTRAMDFNGILTIRNVQLSDAGTYVCTGSNMFAMDQGTATLHVQASGTLSAPVVSIHPPQLTVQPGQLAEFRCSATGSPTPTLEWTGGPGGQLPAKAQIHGGILRLPAVEPTDQAQYLCRAHSSAGQQVARAVLHVHGGGGPRVQVSPERTQVHAGRTVRLYCRAAGVPSATITWRKEGGSLPPQARSERTDIATLLIPAITTADAGFYLCVATSPAGTAQARIQVVVLSASDASPPPVKIESSSPSVTEGQTLDLNCVVAGSAHAQVTWYRRGGSLPPHTQVHGSRLRLPQVSPADSGEYVCRVENGSGPKEASITVSVLHGTHSGPSYTPVPGSTRPIRIEPSSSHVAEGQTLDLNCVVPGQAHAQVTWHKRGGSLPARHQTHGSLLRLHQVTPADSGEYVCHVVGTSGPLEASVLVTIEASVIPGPIPPVRIESSSSTVAEGQTLDLSCVVAGQAHAQVTWYKRGGSLPARHQVRGSRLYIFQASPADAGQYVCRASNGMEASITVTVTGTQGANLAYPAGSTQPIRIEPSSSQVAEGQTLDLNCVVPGQSHAQVTWHKRGGSLPVRHQTHGSLLRLYQASPADSGEYVCRVLGSSVPLEASVLVTIEPAGSVPALGVTPTVRIESSSSQVAEGQTLDLNCLVAGQAHAQVTWHKRGGSLPARHQVHGSRLRLLQVTPADSGEYVCRVVGSSGTQEASVLVTIQQRLSGSHSQGVAYPVRIESSSASLANGHTLDLNCLVASQAPHTITWYKRGGSLPSRHQIVGSRLRIPQVTPADSGEYVCHVSNGAGSRETSLIVTIQGSGSSHVPSVSPPIRIESSSPTVVEGQTLDLNCVVARQPQAIITWYKRGGSLPSRHQTHGSHLRLHQMSVADSGEYVCRANNNIDALEASIVISVSPSAGSPSAPGSSMPIRIESSSSHVAEGETLDLNCVVPGQAHAQVTWHKRGGSLPSHHQTRGSRLRLHHVSPADSGEYVCRVMGSSGPLEASVLVTIEASGSSAVHVPAPGGAPPIRIEPSSSRVAEGQTLDLKCVVPGQAHAQVTWHKRGGNLPARHQVHGPLLRLNQVSPADSGEYSCQVTGSSGTLEASVLVTIEPSSPGPIPAPGLAQPIYIEASSSHVTEGQTLDLNCVVPGQAHAQVTWYKRGGSLPARHQTHGSQLRLHLVSPADSGEYVCRAASGPGPEQEASFTVTVPPSEGSSYRLRSPVISIDPPSSTVQQGQDASFKCLIHDGAAPISLEWKTRNQELEDNVHISPNGSIITIVGTRPSNHGTYRCVASNAYGVAQSVVNLSVHGPPTVSVLPEGPVWVKVGKAVTLECVSAGEPRSSARWTRISSTPAKLEQRTYGLMDSHAVLQISSAKPSDAGTYVCLAQNALGTAQKQVEVIVDTGAMAPGAPQVQAEEAELTVEAGHTATLRCSATGSPAPTIHWSKLRSPLPWQHRLEGDTLIIPRVAQQDSGQYICNATSPAGHAEATIILHVESPPYATTVPEHASVQAGETVQLQCLAHGTPPLTFQWSRVGSSLPGRATARNELLHFERAAPEDSGRYRCRVTNKVGSAEAFAQLLVQGPPGSLPATSIPAGSTPTVQVTPQLETKSIGASVEFHCAVPSDRGTQLRWFKEGGQLPPGHSVQDGVLRIQNLDQSCQGTYICQAHGPWGKAQASAQLVIQALPSVLINIRTSVQTVVVGHAVEFECLALGDPKPQVTWSKVGGHLRPGIVQSGGVVRIAHVELADAGQYRCTATNAAGTTQSHVLLLVQALPQISMPQEVRVPAGSAAVFPCIASGYPTPDISWSKLDGSLPPDSRLENNMLMLPSVRPQDAGTYVCTATNRQGKVKAFAHLQVPERVVPYFTQTPYSFLPLPTIKDAYRKFEIKITFRPDSADGMLLYNGQKRVPGSPTNLANRQPDFISFGLVGGRPEFRFDAGSGMATIRHPTPLALGHFHTVTLLRSLTQGSLIVGDLAPVNGTSQGKFQGLDLNEELYLGGYPDYGAIPKAGLSSGFIGCVRELRIQGEEIVFHDLNLTAHGISHCPTCRDRPCQNGGQCHDSESSSYVCVCPAGFTGSRCEHSQALHCHPEACGPDATCVNRPDGRGYTCRCHLGRSGLRCEEGVTVTTPSLSGAGSYLALPALTNTHHELRLDVEFKPLAPDGVLLFSGGKSGPVEDFVSLAMVGGHLEFRYELGSGLAVLRSAEPLALGRWHRVSAERLNKDGSLRVNGGRPVLRSSPGKSQGLNLHTLLYLGGVEPSVPLSPATNMSAHFRGCVGEVSVNGKRLDLTYSFLGSQGIGQCYDSSPCERQPCQHGATCMPAGEYEFQCLCRDGFKGDLCEHEENPCQLREPCLHGGTCQGTRCLCLPGFSGPRCQQGSGHGIAESDWHLEGSGGNDAPGQYGAYFHDDGFLAFPGHVFSRSLPEVPETIELEVRTSTASGLLLWQGVEVGEAGQGKDFISLGLQDGHLVFRYQLGSGEARLVSEDPINDGEWHRVTALREGRRGSIQVDGEELVSGRSPGPNVAVNAKGSVYIGGAPDVATLTGGRFSSGITGCVKNLVLHSARPGAPPPQPLDLQHRAQAGANTRPCPS

SEQ ID NO: 48929 - protein, 239 aa, Homo sapiens
VTHGLRAYDGLSLPEDIETVTASQMRWTHSYLSDDEDMLADSISGDDLGSGDLGSGDFQMGSWMAGFLWSWMWARKGMRMGLRFRRCCSGSSPAALWPPTSPLPRDSSSDAWAQCPSSQEPARRPSLPATATMSVWPWSIAVTGGPTAGTCLMSSIVRSQSWVSAPHSLSLWRRHLYRPGQRQPSCDSHQSPTLLSPCFPVPSGPCPVGPRRPHAAMGTASPETTSATDRRTARTAAMS

SEQ ID NO: 48930 - protein, 188 aa, Homo sapiens
MNAGASVLTFPWAVYGLPRARPAVTDLTGPLPPSSPALPSVLINIRTSVQTVVVGHAVEFECLALGDPKPQVTWSKVGGHLRPGIVQSGGVVRIAHVELADAGQYRCTATNAAGTTQSHVLLLVQALPQISMPQEVRVPAGSAAVFPCIASGYPTPDISWSKLDGSLPPDSRLENNMLMLPSVRPQDA

SEQ ID NO: 48931 - protein, 197 aa, Homo sapiens
  VARIANT 1: note = MOD_RES - Any amino acid
XTPSGLYLGTCERCSCHGHSEACEPETGACQGCQHHTEGPRCEQCQPGYYGDAQRGTPQDCQLCPCYGDPAAGQAAHTCFLDTDGHPTCDACSPGHSGRHCERCAPGYYGNPSQGQPCQRDSQVPGPIGCNCDPQGSVSSQCDAAGQCQCKVSPNPCPCGACSAPLPRPCGEIRQHLVEAETWAWGAGHGGQGRGCP

SEQ ID NO: 48932 - protein, 163 aa, Homo sapiens
PPVKIESSSPSVTEGQTLDLNCVVAGSAHAQVTWYRRGGSLPPHTQVHGSRLRLPQVSPADSGEYVCRVENGSGPKEASITVSYCPPAWSWCVPGSTRPIRIEPSSSHVAEGQTLDLNCVVPGQAHAQVTWHKRGGSLPARHQTHGSLLRLHQVTPADSGEYV

SEQ ID NO: 48933 - protein, 190 aa, Homo sapiens
PEDIETVTASQMRWTHSYLSDDEDMLADSISGDDLGSGDLGSGDFQMVYFRALVNFTRSIEYSPQLEDAGSREFREVSEAVVDTLESEYLKIPGDQVVSVVFIKELDGWVFVELDVGSEGNADGAQIQEMLLRVISSGSVASYVTSPQGFQFRRLGTGEPILVSGIASSRLVGSPFSVSAIGSQLGLAHH

SEQ ID NO: 48934 - protein, 207 aa, Homo sapiens
GESREGRGYRQVAQRVAERSPVPSLLSHSGCVVHTRLSPVPSVSPPIRIESSSPTVVEGQTLDLNCVVARQPQAIITWYKRGGSLPSRHQTHGSHLRLHQMSVADSGEYVCRANNNIDALEASIVISVSPSAGSPSAPGSSMPIRIESSSSHVAEGETLDLNCVVPGQAHAQVTWHKRGGSLPSHHQTRGSRLRLHHVSPADSGEYV

SEQ ID NO: 48935 - protein, 367 aa, Homo sapiens
MGWRRGRGAPRFPDGMAAGQRRSSLSRLGSQAEGLLTSQTMGGQAETLLTSQTGWLLGRGCNLGSPGGQVSWDKVRIPGVLQRLGVTYFVVAVLELLFAKPVPEHCASERSCLSLRDITSSWPQWLLILVLEGLWLGLTFLLPVPGCPTGYLGPGGIGDFGKYPNCTGGAAGYIDRLLLGDDHLYQHPSSAVLYHTEVAYDPEGILGTINSIVMAFLGVQAGKILLYYKARTKDILIRFTAWCCILGLISVALTKVSENEGFIPVNKNLWSLSYVTTLSSFAFFILLVLYPVVDVKGLWTGTPFFYPGMNSILVYVGHEVFENYFPFQWKLKDNQSHKEHLTQNIVATALWVLIAYILYRKKIFWKI

SEQ ID NO: 48936 - protein, 222 aa, Homo sapiens
MSGAGRALAALLLAASVLSAALLAPGGSSGRDAQAAPPRDLDKKRHAELKMDQALLLIHNELLWTNLTVYWKSECCYHCLFQVLVNVPQSPKAGKPSAAAASVSTQHGSILQLNDTLEEKEVCRLEYRFGEFGNYSLLVKNIHNGVSEIACDLAVNEDPVDSNLPVSIAFLIGLAVIIVISFLRLLLRVLLCHPGWSAVAPSRLTPSSASRVHTILLPQPPE

SEQ ID NO: 48937 - protein, 635 aa, Homo sapiens
MSGAGRALAALLLAASVLSAALLAPGGSSGRDAQAAPPRDLDKKRHAELKMDQALLLIHNELLWTNLTVYWKSECCYHCLFQVLVNVPQSPKAGKPSAAAASVSTQHGSILQLNDTLEEKEVCRLEYRFGEFGNYSLLVKNIHNGVSEIACDLAVNEDPVDSNLPVSIAFLIGLAVIIVISFLRLLLSLDDFNNWISKAISSRETDRLINSELGSPSRTDPLDGDVQPATWRLSALPPRLRSVDTFRGIALILMVFVNYGGGKYWYFKHASWNGLTVADLVFPWFVFIMGSSIFLSMTSILQRGCSKFRLLGKIAWRSFLLICIGIIIVNPNYCLGPLSWDKVRIPGVLQRLGVTYFVVAVLELLFAKPVPEHCASERSCLSLRDITSSWPQWLLILVLEGLWLGLTFLLPVPGCPTGYLGPGGIGDFGKYPNCTGGAAGYIDRLLLGDDHLYQHPSSAVLYHTEVAYDPEGILGTINSIVMAFLGVQAGKILLYYKARTKDILIRFTAWCCILGLISVALTKVSENEGFIPVNKNLWSLSYVTTLSSFAFFILLVLYPVVDVKGLWTGTPFFYPGMNSILVYVGHEVFENYFPFQWKLKDNQSHKEHLTQNIVATALWVLIAYILYRKKIFWKI

SEQ ID NO: 48938 - protein, 663 aa, Homo sapiens
MTGARASAAEQRRAGRSGQARAAERAAGMSGAGRALAALLLAASVLSAALLAPGGSSGRDAQAAPPRDLDKKRHAELKMDQALLLIHNELLWTNLTVYWKSECCYHCLFQVLVNVPQSPKAGKPSAAAASVSTQHGSILQLNDTLEEKEVCRLEYRFGEFGNYSLLVKNIHNGVSEIACDLAVNEDPVDSNLPVSIAFLIGLAVIIVISFLRLLLSLDDFNNWISKAISSRETDRLINSELGSPSRTDPLDGDVQPATWRLSALPPRLRSVDTFRGIALILMVFVNYGGGKYWYFKHASWNGLTVADLVFPWFVFIMGSSIFLSMTSILQRGCSKFRLLGKIAWRSFLLICIGIIIVNPNYCLGPLSWDKVRIPGVLQRLGVTYFVVAVLELLFAKPVPEHCASERSCLSLRDITSSWPQWLLILVLEGLWLGLTFLLPVPGCPTGYLGPGGIGDFGKYPNCTGGAAGYIDRLLLGDDHLYQHPSSAVLYHTEVAYDPEGILGTINSIVMAFLGVQAGKILLYYKARTKDILIRFTAWCCILGLISVALTKVSENEGFIPVNKNLWSLSYVTTLSSFAFFILLVLYPVVDVKGLWTGTPFFYPGMNSILVYVGHEVFENYFPFQWKLKDNQSHKEHLTQNIVATALWVLIAYILYRKKIFWKI

SEQ ID NO: 48939 - protein, 548 aa, Homo sapiens
MRVLCAFPEAMPSSNSRPPACLAPGALYLALLLHLSLSSQAGDRRPLPVDRAAGLKEKTLILLDVSTKNPVRTVNENFLSLQLDPSIIHDGWLDFLSSKRLVTLARGLSPAFLRFGGKRTDFLQFQNLRNPAKSRGGPGPDYYLKNYEDDIVRSDVALDKQKGCKIAQHPDVMLELQREKAAQMHLVLLKEQFSNTYSNLILTARSLDKLYNFADCSGLHLIFALNALRRNPNNSWNSSSALSLLKYSASKKYNISWELGNEPNNYRTMHGRAVNGSQLGKDYIQLKSLLQPIRIYSRASLYGPNIGRPRKNVIALLDGFMKVAGSTVDAVTWQHCYIDGRVVKVMDFLKTRLLDTLSDQIRKIQKVVNTYTPGKKIWLEGVVTTSAGGTNNLSDSYAAGFLWLNTLGMLANQGIDVVIRHSFFDHGYNHLVDQNFNPLPDYWLSLLYKRLIGPKVLAVHVAGLQRKPRPGRVIRDKLRIYAHCTNHHNHNYVRGSITLFIINLHRSRKKIKLAGTLRDKLVHQYLLQPYGQEGLKSKTQRCQYCGII

SEQ ID NO: 48940 - protein, 534 aa, Homo sapiens
MRVLCAFPEAMPSSNSRPPACLAPGALYLALLLHLSLSSQAGDRRPLPVDRAAGLKEKTLILLDVSTKNPVRTVNENFLSLQLDPSIIHDGWLDFLSSKRLVTLARGLSPAFLRFGGKRTDFLQFQNLRNPAKSRGGPGPDYYLKNYEDDIVRSDVALDKQKGCKIAQHPDVMLELQREKAAQMHLVLLKEQFSNTYSNLILTEPNNYRTMHGRAVNGSQLGKDYIQLKSLLQPIRIYSRASLYGPNIGRPRKNVIALLDGFMKVAGSTVDAVTWQHCYIDGRVVKVMDFLKTRLLDTLSDQIRKIQKVVNTYTPGKKIWLEGVVTTSAGGTNNLSDSYAAGFLWLNTLGMLANQGIDVVIRHSFFDHGYNHLVDQNFNPLPDYWLSLLYKRLIGPKVLAVHVAGLQRKPRPGRVIRDKLRIYAHCTNHHNHNYVRGSITLFIINLHRSRKKIKLAGTLRDKLVHQYLLQPYGQEGLKSKSVQLNGQPLVMVDDGTLPELKPRPLRAGRTLVIPPVTMGFYVVKNVNALACRYR

SEQ ID NO: 48941 - protein, 592 aa, Homo sapiens
MRVLCAFPEAMPSSNSRPPACLAPGALYLALLLHLSLSSQAGDRRPLPVDRAAGLKEKTLILLDVSTKNPVRTVNENFLSLQLDPSIIHDGWLDFLSSKRLVTLARGLSPAFLRFGGKRTDFLQFQNLRNPAKSRGGPGPDYYLKNYEDDIVRSDVALDKQKGCKIAQHPDVMLELQREKAAQMHLVLLKEQFSNTYSNLILTARSLDKLYNFADCSGLHLIFALNALRRNPNNSWNSSSALSLLKYSASKKYNISWELGNEPNNYRTMHGRAVNGSQLGKDYIQLKSLLQPIRIYSRASLYGPNIGRPRKNVIALLDGFMKVAGSTVDAVTWQHCYIDGRVVKVMDFLKTRLLDTLSDQIRKIQKVVNTYTPGKKIWLEGVVTTSAGGTNNLSDSYAAGFLWLNTLGMLANQGIDVVIRHSFFDHGYNHLVDQNFNPLPDYWLSLLYKRLIGPKVLAVHVAGLQRKPRPGRVIRDKLRIYAHCTNHHNHNYVRGSITLFIINLHRSRKKIKLAGTLRDKLVHQYLLQPYGQEGLKSKSVQLNGQPLVMVDDGTLPELKPRPLRAGRTLVIPPVTMGFYVVKNVNALACRYR

SEQ ID NO: 48942 - protein, 480 aa, Homo sapiens
MRVLCAFPEAMPSSNSRPPACLAPGALYLALLLHLSLSSQAGDRRPLPVDRAAGLKEKTLILLDVSTKNPVRTVNENFLSLQLDPSIIHDGWLDFLSSKRLVTLARGLSPAFLRFGGKRTDFLQFQNLRNPAKSRGGPGPDYYLKNYEDEPNNYRTMHGRAVNGSQLGKDYIQLKSLLQPIRIYSRASLYGPNIGRPRKNVIALLDGFMKVAGSTVDAVTWQHCYIDGRVVKVMDFLKTRLLDTLSDQIRKIQKVVNTYTPGKKIWLEGVVTTSAGGTNNLSDSYAAGFLWLNTLGMLANQGIDVVIRHSFFDHGYNHLVDQNFNPLPDYWLSLLYKRLIGPKVLAVHVAGLQRKPRPGRVIRDKLRIYAHCTNHHNHNYVRGSITLFIINLHRSRKKIKLAGTLRDKLVHQYLLQPYGQEGLKSKSVQLNGQPLVMVDDGTLPELKPRPLRAGRTLVIPPVTMGFYVVKNVNALACRYR

SEQ ID NO: 48943 - protein, 416 aa, Homo sapiens
MKRERGALSRASRALRLAPFVYLLLIQTDPLEGVNITSPVRLIHGTVGKSALLSVQYSSTSSDRPVVKWQLKRDKPVTVVQSIGTEVIGTLRPDYRDRIRLFENGSLLLSDLQLADEGTYEVEISITDDTFTGEKTINLTVDVPISRPQVLVASTTVLELSEAFTLNCSHENGTKPSYTWLKDGKPLLNDSRMLLSPDQKVLTITRVLMEDDDLYSCMVENPISQGRSLPVKITVYRRSSLYIILSTGGIFLLVTLVTVCACWKPSKRKQKKLEKQNSLEYMDQNDDRLKPEADTLPRSGEQERKNPMALYILKDKDSPETEENPAPEPRSATEPGPPGYSVSPAVPGRSPGLPIRSARRYPRSPARSPATGRTHSSPPRAPSSPGRSRSASRTLRTAGVHIIREQDEAGPVEISA

SEQ ID NO: 48944 - protein, 367 aa, Homo sapiens
MKRERGALSRASRALRLAPFVYLLLIQTDPLEGVNITSPVRLIHGTVGKSALLSVQYSSTSSDRPVVKWQLKRDKPVTVVQSIGTEVIGTLRPDYRDRIRLFENGSLLLSDLQLADEGTYEVEISITDDTFTGEKTINLTVDVPISRPQVLVASTTVLELSEAFTLNCSHENGTKPSYTWLKDGKPLLNDSRMLLSPDQKVLTITRVLMEDDDLYSCMVENPISQGRSLPVKITVYRRSSLYIILSTGGIFLLVTLVTVCACWKPSKRKQKKLEKQNSLEYMDQNDDRLKPEGELPATQSPIPSTIRSVGCWEKAELGDKENSSAGTLPSDLGASKGKEPEPASLASSHSLPRRHAMPSTLSVSVHE

SEQ ID NO: 48945 - protein, 295 aa, Homo sapiens
MEKMSRPLPLNPTFIPPPYGVLRSLLENPLKLPLHHEDAFSKDKDKEKKLDDESNSPTVPQSAFLGPTLWDKTLPYDGDTFQLEYMDLEEFLSENGIPPSPSQHDHSPHPPGLQPASSAAPSVMDLSSRASAPLHPGIPSPNCMQSPIRPGQLLPANRNTPSPIDPDTIQVPVGYEPDPADLALSSIPGQEMFDPRKRKFSEEELKPQPMIKKARKVFIPDDLKDDKYWARRRKNNMAAKRSRDARRLKENQIAIRASFLEKENSALRQEVADLRKELGKCKNILAKYEARHGPL

SEQ ID NO: 48946 - protein, 210 aa, Homo sapiens
MDLEEFLSENGIPPSPSQHDHSPHPPGLQPASSAAPSVMDLSSRASAPLHPGIPSPNCMQSPIRPGQLLPANRNTPSPIDPDTIQVPVGYEPDPADLALSSIPGQEMFDPRKRKFSEEELKPQPMIKKARKVFIPDDLKDDKYWARRRKNNMAAKRSRDARRLKENQIAIRASFLEKENSALRQEVADLRKELGKCKNILAKYEARHGPL

SEQ ID NO: 48947 - protein, 364 aa, Homo sapiens
MHPQVVILSLILHLADSVAGSVKVGGEAGPSVTLPCHYSGAVTSMCWNRGSCSLFTCQNGIVWTNGTHVTYRKDTRYKLLGDLSRRDVSLTIENTAVSDSGVYCCRVEHRGWFNDMKITVSLEIVPPKVTTTPIVTTVPTVTTVRTSTTVPTTTTVPMTTVPTTTVPTTMSIPTTTTVLTTMTVSTTTSVPTTTSIPTTTSVPVTTTVSTFVPPMPLPRQNHEPVATSPSSPQPAETHPTTLQGAIRREPTSSPLYSYTTDGNDTVTESSDGLWNNNQTQLFLEHSLLTANTTKGIYAGVCISVLVLLALLGVIIAKKYFFKKEVQQLSVSFSSLQIKALQNAVEKEVQAEDNIYIENSLYATD

SEQ ID NO: 48948 - protein, 401 aa, Homo sapiens
MHPQVVILSLILHLADSVAGSVKVGGEAGPSVTLPCHYSGAVTSMCWNRGSCSLFTCQNGIVWTNGTHVTYRKDTRYKLLGDLSRRDVSLTIENTAVSDSGVYCCRVEHRGWFNDMKITVSLEIVPPKVTTTPIVTTVPTVTTVRTSTTVPTTTTVPMTTVPTTTVPTTMSIPTTTTVLTTMTVSTTTSVPTTTSIPTTTSVPVTTTVSTFVPPMPLPRQNHEPVATSPSSPQPAETHPTTLQGAIRREPTSSPLYSYTTDGNDTVTESSDGLWNNNQTQLFLEHSLLTANTTKGIYAGVCISVLVLLALLGVIIAKMFHLAAFKLKLCKMQLKRKSKQKTISTLRIVFMPRTKTQWCSLRVYAHECRRLNRHQHIRRLLDPKTIFLFQFHLAFQHVSDTG

SEQ ID NO: 48949 - protein, 223 aa, Homo sapiens
MHPQVVILSLILHLADSVAGSVKVGGEAGPSVTLPCHYSGAVTSMCWNRGSCSLFTCQNGIVWTNGTHVTYRKDTRYKLLGDLSRRDVSLTIENTAVSDSGVYCCRVEHRGWFNDMKITVSLEIVPPKVTTTPIVTTVPTVTTVRTSTTVPTTTTVPMTTVPTTTVPTTMSIPTTTTVLTTMTVSTTTSVPTTTSIPTTTSVPVTTTVSTFVPPMPLPRQNHE

SEQ ID NO: 48950 - protein, 364 aa, Homo sapiens; identical to SEQ ID NO: 48947

SEQ ID NO: 48951 - protein, 364 aa, Homo sapiens; identical to SEQ ID NO: 48947

SEQ ID NO: 48952 - protein, 173 aa, Homo sapiens
MEPGAGHLDGHRAGSPSLRQALCDGSAVMFSSKERGRCTVINFVPLEAPLRSTPRSRQVTEACGGEGRAVPLGSEPEWSVGGMEATLEQHLEDTMKNPSIVGVLCTDSQGLNLGCRGTLSDEHAGVISVLAQQAAKLTSDPTDIPVVCLESDNGNIMIQKHDGITVAVHKMAS

SEQ ID NO: 48953 - protein, 88 aa, Homo sapiens
MGNWGLGIAPWVDGESELEFRRLGMQGPLEALRRREWNTQRASFSFSFLIALSPHTVDYCHSYELFNRRWHGHVLATQRPSLFILMLV

SEQ ID NO: 48954 - protein, 777 aa, Homo sapiens
MGRGSGTFERLLDKATSQLLLETDWESILQICDLIRQGDTQAKYAVNSIKKKVNDKNPHVALYALEVMESVVKNCGQTVHDEVANKQTMEELKDLLKRQVEVNVRNKILYLIQAWAHAFRNEPKYKVVQDTYQIMKVEGHVFPEFKESDAMFAAERAPDWVDAEECHRCRVQFGVMTRKHHCRACGQIFCGKCSSKYSTIPKFGIEKEVRVCEPCYEQLNRKAEGKATSTTELPPEYLTSPLSQQSQLPPKRDETALQEEEELQLALALSQSEAEEKERLRQKSTYTSYPKAEPMPSASSAPPASSLYSSPVNSSAPLAEDIDPELARYLNRNYWEKKQEEARKSPTPSAPVPLTEPAAQPGEGHAAPTNVVENPLPETDSQPIPPSGGPFSEPQFHNGESEESHEQFLKALQNAVTTFVNRMKSNHMRGRSITNDSAVLSLFQSINGMHPQLLELLNQLDERRLYYEGLQDKLAQIRDARGALSALREEHREKLRRAAEEAERQRQIQLAQKLEIMRQKKQEYLEVQRQLAIQRLQEQEKERQMRLEQQKQTVQMRAQMPAFPLPYAQLQAMPAAGGVLYQPSGPASFPSTFSPAGSVEGSPMHGVYMSQPAPAAGPYPSMPSTAADPSMVSAYMYPAGATGAQAAPQAQAGPTASPAYSSYQPTPTAGYQNVASQAPQSLPAISQPPQSSTMGYMGSQSVSMGYQPYNMQNLMTTLPSQDASLPPQQPYIAGQQPMYQQMAPSGGPPQQQPPVAQQPQAQGPPAQGSEAQLISFD

SEQ ID NO: 48955 - protein, 691 aa, Homo sapiens
MGRGSGTFERLLDKATSQLLLETDWESILQICDLIRQGDTQAKYAVNSIKKKVNDKNPHVALYALEVMESVVKNCGQTVHDEVANKQTMEELKDLLKRQVEVNVRNKILYLIQAWAHAFRNEPKYKVVQDTYQIMKVEGHVFPEFKESDAMFAAERAPDWVDAEECHRCRVQFGVMTRKHHCRACGQIFCGKCSSKYSTIPKFGIEKEVRVCEPCYEQLNRKAEGKATSTTELPPEYLTSPLSQQSQLPPKRDETALQEEEELQLALALSQSEAEEKERLRQKSTYTSYPKAEPMPSASSAPPASSLYSSPVNSSAPLAEDIDPELARYLNRNYWEKKQEEARKSPTPSAPVPLTEPAAQPGEGHAAPTNVVENPLPETDSQPIPPSGGPFSEPQFHNGESEESHEQFLKALQNAVTTFVNRMKSNHMRGRSITNDSAVLSLFQSINGMHPQLLELLNQLDERRLYYEGLQDKLAQIRDARGALSALREEHREKLRRAAEEAERQRQIQLAQKLEIMMHGVYMSQPAPAAGPYPSMPSTAADPSMVSAYMYPAGATGAQAAPQAQAGPTASPAYSSYQPTPTAGYQNVASQAPQSLPAISQPPQSSTMGYMGSQSVSMGYQPYNMQNLMTTLPSQDASLPPQQPYIAGQQPMYQQMAPSGGPPQQQPPVAQQPQAQGPPAQGSEAQLISFD

SEQ ID NO: 48956 - protein, 107 aa, Homo sapiens
MRLSKTLVDMDMADYSAALDPAYTTLEFENVQVLTMGNDFVAAASRQIEASPPTSLEHIWRGGQFSTGRHVPIRRHQPQRAQQPGCQRPVCHLRGPGHGQTLRCLEL

SEQ ID NO: 48957 - protein, 474 aa, Homo sapiens
MRLSKTLVDMDMADYSAALDPAYTTLEFENVQVLTMGNDTSPSEGTNLNAPNSLGVSALCAICGDRATGKHYGASSCDGCKGFFRRSVRKNHMYSCRFSRQCVVDKDKRNQCRYCRLKKCFRAGMKKEAVQNERDRISTRRSSYEDSSLPSINALLQAEVLSRQITSPVSGINGDIRAKKIASIADVCESMKEQLLVLVEWAKYIPAFCELPLDDQVALLRAHAGEHLLLGATKRSMVFKDVLLLGNDYIVPRHCPELAEMSRVSIRILDELVLPFQELQIDDNEYAYLKAIIFFDPDAKGLSDPGKIKRLRSQVQVSLEDYINDRQYDSRGRFGELLLLLPTLQSITWQMIEQIQFIKLFGMAKIDNLLQEMLLGGSPSDAPHAHHPLHPHLMQEHMGTNVIVANTMPTHLSNGQMCEWPRPRGQAATPETPQPSPPGGSGSEPYKLLPGAVATIVKPLSAIPQPTITKQEVI

SEQ ID NO: 48958 - protein, 452 aa, Homo sapiens
MVSVNAPLGAPVESSYDTSPSEGTNLNAPNSLGVSALCAICGDRATGKHYGASSCDGCKGFFRRSVRKNHMYSCRFSRQCVVDKDKRNQCRYCRLKKCFRAGMKKEAVQNERDRISTRRSSYEDSSLPSINALLQAEVLSRQITSPVSGINGDIRAKKIASIADVCESMKEQLLVLVEWAKYIPAFCELPLDDQVALLRAHAGEHLLLGATKRSMVFKDVLLLGNDYIVPRHCPELAEMSRVSIRILDELVLPFQELQIDDNEYAYLKAIIFFDPDAKGLSDPGKIKRLRSQVQVSLEDYINDRQYDSRGRFGELLLLLPTLQSITWQMIEQIQFIKLFGMAKIDNLLQEMLLGGSPSDAPHAHHPLHPHLMQEHMGTNVIVANTMPTHLSNGQMCEWPRPRGQAATPETPQPSPPGGSGSEPYKLLPGAVATIVKPLSAIPQPTITKQEVI

SEQ ID NO: 48959 - protein, 504 aa, Homo sapiens
MRLSKTLVDMDMADYSAALDPAYTTLEFENVQVLTMGNVLLPLRLARLRHPLRHHWSISGGVDSSPQGDTSPSEGTNLNAPNSLGVSALCAICGDRATGKHYGASSCDGCKGFFRRSVRKNHMYSCRFSRQCVVDKDKRNQCRYCRLKKCFRAGMKKEAVQNERDRISTRRSSYEDSSLPSINALLQAEVLSRQITSPVSGINGDIRAKKIASIADVCESMKEQLLVLVEWAKYIPAFCELPLDDQVALLRAHAGEHLLLGATKRSMVFKDVLLLGNDYIVPRHCPELAEMSRVSIRILDELVLPFQELQIDDNEYAYLKAIIFFDPDAKGLSDPGKIKRLRSQVQVSLEDYINDRQYDSRGRFGELLLLLPTLQSITWQMIEQIQFIKLFGMAKIDNLLQEMLLGGSPSDAPHAHHPLHPHLMQEHMGTNVIVANTMPTHLSNGQMCEWPRPRGQAATPETPQPSPPGGSGSEPYKLLPGAVATIVKPLSAIPQPTITKQEVI

SEQ ID NO: 48960 - protein, 464 aa, Homo sapiens
MRLSKTLVDMDMADYSAALDPAYTTLEFENVQVLTMGNDTSPSEGTNLNAPNSLGVSALCAICGDRATGKHYGASSCDGCKGFFRRSVRKNHMYSCRFSRQCVVDKDKRNQCRYCRLKKCFRAGMKKEAVQNERDRISTRRSSYEDSSLPSINALLQAEVLSRQITSPVSGINGDIRAKKIASIADVCESMKEQLLVLVEWAKYIPAFCELPLDDQVALLRAHAGEHLLLGATKRSMVFKDVLLLGNDYIVPRHCPELAEMSRVSIRILDELVLPFQELQIDDNEYAYLKAIIFFDPDAKGLSDPGKIKRLRSQVQVSLEDYINDRQYDSRGRFGELLLLLPTLQSITWQMIEQIQFIKLFGMAKIDNLLQEMLLGGSPSDAPHAHHPLHPHLMQEHMGTNVIVANTMPTHLSNGQMSTPETPQPSPPGGSGSEPYKLLPGAVATIVKPLSAIPQPTITKQEVI

SEQ ID NO: 48961 - protein, 417 aa, Homo sapiens
MRLSKTLVDMDMADYSAALDPAYTTLEFENVQVLTMGNDTSPSEGTNLNAPNSLGVSALCAICGDRATGKHYGASSCDGCKGFFRRSVRKNHMYSCRFSRQCVVDKDKRNQCRYCRLKKCFRAGMKKEAVQNERDRISTRRSSYEDSSLPSINALLQAEVLSRQITSPVSGINGDIRAKKIASIADVCESMKEQLLVLVEWAKYIPAFCELPLDDQVALLRAHAGEHLLLGATKRSMVFKDVLLLGNDYIVPRHCPELAEMSRVSIRILDELVLPFQELQIDDNEYAYLKAIIFFDPDAKGLSDPGKIKRLRSQVQVSLEDYINDRQYDSRGRFGELLLLLPTLQSITWQMIEQIQFIKLFGMAKIDNLLQEMLLGGPCQAQEGRGWSGDSPGDRPHTVSSPLSSLASPLCRFGQVA

SEQ ID NO: 48962 - protein, 442 aa, Homo sapiens
MVSVNAPLGAPVESSYDTSPSEGTNLNAPNSLGVSALCAICGDRATGKHYGASSCDGCKGFFRRSVRKNHMYSCRFSRQCVVDKDKRNQCRYCRLKKCFRAGMKKEAVQNERDRISTRRSSYEDSSLPSINALLQAEVLSRQITSPVSGINGDIRAKKIASIADVCESMKEQLLVLVEWAKYIPAFCELPLDDQVALLRAHAGEHLLLGATKRSMVFKDVLLLGNDYIVPRHCPELAEMSRVSIRILDELVLPFQELQIDDNEYAYLKAIIFFDPDAKGLSDPGKIKRLRSQVQVSLEDYINDRQYDSRGRFGELLLLLPTLQSITWQMIEQIQFIKLFGMAKIDNLLQEMLLGGSPSDAPHAHHPLHPHLMQEHMGTNVIVANTMPTHLSNGQMSTPETPQPSPPGGSGSEPYKLLPGAVATIVKPLSAIPQPTITKQEVI

SEQ ID NO: 48963 - protein, 408 aa, Homo sapiens
MNTTDNGVNCLCAICGDRATGKHYGASSCDGCKGFFRRSIRKSHVYSCRFSRQCVVDKDKRNQCRYCRLRKCFRAGMKKEAVQNERDRISTRRSTFDGSNIPSINTLAQAEVRSRQISVSSPGSSTDINVKKIASIGDVCESMKQQLLVLVEWAKYIPAFCELPLDDQVALLRAHAGEHLLLGATKRSMMYKDILLLGNNYVIHRNSCEVEISRVANRVLDELVRPFQEIQIDDNEYACLKAIVFFDPDAKGLSDPVKIKNMRFQVQIGLEDYINDRQYDSRGRFGELLLLLPTLQSITWQMIEQIQFVKLFGMVKIDNLLQEMLLGGASNDGSHLHHPMHPHLSQDPLTGQTILLGPMSTLVHADQISTPETPLPSPPQGSGQEQYKIAANQASVISHQHLSKQKQL

SEQ ID NO: 48964 - protein, 445 aa, Homo sapiens
MDMANYSEVLDPTYTTLEFETMQILYNSSDSSAPETSMNTTDNGVNCLCAICGDRATGKHYGASSCDGCKGFFRRSIRKSHVYSCRFSRQCVVDKDKRNQCRYCRLRKCFRAGMKKEAVQNERDRISTRRSTFDGSNIPSINTLAQAEVRSRQISVSSPGSSTDINVKKIASIGDVCESMKQQLLVLVEWAKYIPAFCELPLDDQVALLRAHAGEHLLLGATKRSMMYKDILLLGNNYVIHRNSCEVEISRVANRVLDELVRPFQEIQIDDNEYACLKAIVFFDPDAKGLSDPVKIKNMRFQVQIGLEDYINDRQYDSRGRFGELLLLLPTLQSITWQMIEQIQFVKLFGMVKIDNLLQEMLLGGASNDGSHLHHPMHPHLSQDPLTGQTILLGPMSTLVHADQISTPETPLPSPPQGSGQEQYKIAANQASVISHQHLSKQKQL

SEQ ID NO: 48965 - protein, 240 aa, Homo sapiens
MSRSNRQKEYKCGDLVFAKMKGYPHWPARIDEMPEAAVKSTANKYQVFFFGTHETAFLGPKDLFPYEESKEKFGKPNKRKGFSEGLWEIENNPTVKASGYQSSQKKSCVEEPEPEPEAAEGDGDKKGNAEGSSDEEGKLVIDEPAKEKNEKGALKRRAGDLLEDSPKRPKEAENPEGEEKEAATLEVERPLPMEVEKNSTPSEPGSGRGPPQEEEEEEDEEEEATKEDAEAPGIRDHESL

SEQ ID NO: 48966 - protein, 256 aa, Homo sapiens
MHPEGGQFVPQLLGHLLATKLKRFLLSKGGRRAQIPDVSRATPHTIDEMPEAAVKSTANKYQVFFFGTHETAFLGPKDLFPYEESKEKFGKPNKRKGFSEGLWEIENNPTVKASGYQSSQKKSCVEEPEPEPEAAEGDGDKKGNAEGSSDEEGKLVIDEPAKEKNEKGALKRRAGDLLEDSPKRPKEAENPEGEEKEAATLEVERPLPMEVEKNSTPSEPGSGRGPPQEEEEEEDEEEEATKEDAEAPGIRDHESL

SEQ ID NO: 48967 - protein, 233 aa, Homo sapiens
MEQRAGGNRVQTSTLNCAGAAVIDEMPEAAVKSTANKYQVFFFGTHETAFLGPKDLFPYEESKEKFGKPNKRKGFSEGLWEIENNPTVKASGYQSSQKKSCVEEPEPEPEAAEGDGDKKGNAEGSSDEEGKLVIDEPAKEKNEKGALKRRAGDLLEDSPKRPKEAENPEGEEKEAATLEVERPLPMEVEKNSTPSEPGSGRGPPQEEEEEEDEEEEATKEDAEAPGIRDHESL

SEQ ID NO: 48968 - protein, 262 aa, Homo sapiens [sequence omitted]

SEQ ID NO: 48969 - protein, 208 aa, Homo sapiens
MPEAAVKSTANKYQVFFFGTHETAFLGPKDLFPYEESKEKFGKPNKRKGFSEGLWEIENNPTVKASGYQSSQKKSCVEEPEPEPEAAEGDGDKKGNAEGSSDEEGKLVIDEPAKEKNEKGALKRRAGDLLEDSPKRPKEAENPEGEEKEAATLEVERPLPMEVEKNSTPSEPGSGRGPPQEEEEEEDEEEEATKEDAEAPGIRDHESL

SEQ ID NO: 48970 - protein, 240 aa, Homo sapiens; identical to SEQ ID NO: 48965

SEQ ID NO: 48971 - protein, 891 aa, Homo sapiens
MHAINGFVFGNLPELNMCAQKRVAWHLFGMGNEIDVHTAFFHGQMLTTRGHHTDVANIFPATFVTAEMVPWEPGTWLISCQVNSHFRDGMQALYKVKSCSMAPPVDLLTGKVRQYFIEAHEIQWDYGPMGHDGSTGKNLREPGSISDKFFQKSSSRIGGTYWKVRYEAFQDETFQEKMHLEEDRHLGILGPVIRAEVGDTIQVVFYNRASQPFSMQPHGVFYEKDYEGTVYNDGSSYPGLVAKPFEKVTYRWTVPPHAGPTAQDPACLTWMYFSAADPIRDTNSGLVGPLLVCRAGALGADGKQKGVDKEFFLLFTVLDENKSWYSNANQAAAMLDFRLLSEDIEGFQDSNRMHAINGFLFSNLPRLDMCKGDTVAWHLLGLGTETDVHGVMFQGNTVQLQGMRKGAAMLFPHTFVMAIMQPDNLGTFEIYCQAGSHREAGMRAIYNVSQCPGHQATPRQRYQAARIYYIMAEEVEWDYCPDRSWEREWHNQSEKDSYGYIFLSNKDGLLGSRYKKAVFREYTDGTFRIPRPRTGPEEHLGILGPLIKGEVGDILTVVFKNNASRPYSVHAHGVLESTTVWPLAAEPGEVVTYQWNIPERSGPGPNDSACVSWIYYSAVDPIKDMYSGLVGPLAICQKGILEPHGGRSDMDREFALLFLIFDENKSWYLEENVATHGSQDPGSINLQDETFLESNKMHAINGKLYANLRGLTMYQGERVAWYMLAMGQDVDLHTIHFHAESFLYRNGENYRADVVDLFPGTFEVVEMVASNPGTWLMHCHVTDHVHAGMETLFTVFSRTEHLSPLTVITKETEKAVPPRDIEEGNVKMLGMQIPIKNVEMLASVLVAISVTLLLVVLALGGVVWYQHRQRKLRRNRRSILDDSFKLLSFKQ

SEQ ID NO: 48972 - protein, 1158 aa, Homo sapiens
MESGHLLWALLFMQSLWPQLTDGATRVYYLGIRDVQWNYAPKGRNVITNQPLDSDIVASSFLKSDKNRIGGTYKKTIYKEYKDDSYTDEVAQPAWLGFLGPVLQAEVGDVILIHLKNFATRPYTIHPHGVFYEKDSEGSLYPDGSSGPLKADDSVPPGGSHIYNWTIPEGHAPTDADPACLTWIYHSHVDAPRDIATGLIGPLITCKRGALDGNSPPQRQDVDHDFFLLFSVVDENLSWHLNENIATYCSDPASVDKEDETFQESNRMHAINGFVFGNLPELNMCAQKRVAWHLFGMGNEIDVHTAFFHGQMLTTRGHHTDVANIFPATFVTAEMVPWEPGTWLISCQVNSHFRDGMQALYKVKSCSMAPPVDLLTGKVRQYFIEAHEIQWDYGPMGHDGSTGKNLREPGSISDKFFQKSSSRIGGTYWKVRYEAFQDETFQEKMHLEEDRHLGILGPVIRAEVGDTIQVVFYNRASQPFSMQPHGVFYEKDYEGTVYNDGSSYPGLVAKPFEKVTYRWTVPPHAGPTAQDPACLTWMYFSAADPIRDTNSGLVGPLLVCRAGALGADGKQKGVDKEFFLLFTVLDENKSWYSNANQAAAMLDFRLLSEDIEGFQDSNRMHAINGFLFSNLPRLDMCKGDTVAWHLLGLGTETDVHGVMFQGNTVQLQGMRKGAAMLFPHTFVMAIMQPDNLGTFEIYCQAGSHREAGMRAIYNVSQCPGHQATPRQRYQAARIYYIMAEEVEWDYCPDRSWEREWHNQSEKDSYGYIFLSNKDGLLGSRYKKAVFREYTDGTFRIPRPRTGPEEHLGILGPLIKGEVGDILTVVFKNNASRPYSVHAHGVLESTTVWPLAAEPGEVVTYQWNIPERSGPGPNDSACVSWIYYSAVDPIKDMYSGLVGPLAICQKGILEPHGGRSDMDREFALLFLIFDENKSWYLEENVATHGSQDPGSINLQDETFLESNKMHAINGKLYANLRGLTMYQGERVAWYMLAMGQDVDLHTIHFHAESFLYRNGENYRADVVDLFPGTFEVVEMVASNPGTWLMHCHVTDHVHAGMETLFTVFSRTEHLSPLTVITKETEKAVPPRDIEEGNVKMLGMQIPIKNVEMLASVLVAISVTLLLVVLALGGVVWYQHRQRKLRRNRRSILDDSFKLLSFKQ

SEQ ID NO: 48973 - protein, 1161 aa, Homo sapiens
MWAMESGHLLWALLFMQSLWPQLTDGATRVYYLGIRDVQWNYAPKGRNVITNQPLDSDIVASSFLKSDKNRIGGTYKKTIYKEYKDDSYTDEVAQPAWLGFLGPVLQAEVGDVILIHLKNFATRPYTIHPHGVFYEKDSEGSLYPDGSSGPLKADDSVPPGGSHIYNWTIPEGHAPTDADPACLTWIYHSHVDAPRDIATGLIGPLITCKRGALDGNSPPQRQDVDHDFFLLFSVVDENLSWHLNENIATYCSDPASVDKEDETFQESNRMHAINGFVFGNLPELNMCAQKRVAWHLFGMGNEIDVHTAFFHGQMLTTRGHHTDVANIFPATFVTAEMVPWEPGTWLISCQVNSHFRDGMQALYKVKSCSMAPPVDLLTGKVRQYFIEAHEIQWDYGPMGHDGSTGKNLREPGSISDKFFQKSSSRIGGTYWKVRYEAFQDETFQEKMHLEEDRHLGILGPVIRAEVGDTIQVVFYNRASQPFSMQPHGVFYEKDYEGTVYNDGSSYPGLVAKPFEKVTYRWTVPPHAGPTAQDPACLTWMYFSAADPIRDTNSGLVGPLLVCRAGALGADGKQKGVDKEFFLLFTVLDENKSWYSNANQAAAMLDFRLLSEDIEGFQDSNRMHAINGFLFSNLPRLDMCKGDTVAWHLLGLGTETDVHGVMFQGNTVQLQGMRKGAAMLFPHTFVMAIMQPDNLGTFEIYCQAGSHREAGMRAIYNVSQCPGHQATPRQRYQAARIYYIMAEEVEWDYCPDRSWEREWHNQSEKDSYGYIFLSNKDGLLGSRYKKAVFREYTDGTFRIPRPRTGPEEHLGILGPLIKGEVGDILTVVFKNNASRPYSVHAHGVLESTTVWPLAAEPGEVVTYQWNIPERSGPGPNDSACVSWIYYSAVDPIKDMYSGLVGPLAICQKGILEPHGGRSDMDREFALLFLIFDENKSWYLEENVATHGSQDPGSINLQDETFLESNKMHAINGKLYANLRGLTMYQGERVAWYMLAMGQDVDLHTIHFHAESFLYRNGENYRADVVDLFPGTFEVVEMVASNPGTWLMHCHVTDHVHAGMETLFTVFSRTEHLSPLTVITKETEKAVPPRDIEEGNVKMLGMQIPIKNVEMLASVLVAISVTLLLVVLALGGVVWYQHRQRKLRRNRRSILDDSFKLLSFKQ

SEQ ID NO: 48974 - protein, 969 aa, Homo sapiens
MWAMESGHLLWALLFMQSLWPQLTDGATRVYYLGIRDVQWNYAPKGRNVITNQPLDSDIVASSFLKSDKNRIGGTYKKTIYKEYKDDSYTDEVAQPAWLGFLGPVLQAEVGDVILIHLKNFATRPYTIHPHGVFYEKDSEGSLYPDGSSGPLKADDSVPPGGSHIYNWTIPEGHAPTDADPACLTWIYHSHVDAPRDIATGLIGPLITCKRGALDGNSPPQRQDVDHDFFLLFSVVDENLSWHLNENIATYCSDPASVDKEDETFQESNRMHAINGFVFGNLPELNMCAQKRVAWHLFGMGNEIDVHTAFFHGQMLTTRGHHTDVANIFPATFVTAEMVPWEPGTWLISCQVNSHFRDGMQALYKVKSCSMAPPVDLLTGKVRQYFIEAHEIQWDYGPMGHDGSTGKNLREPGSISDKFFQKSSSRIGGTYWKVRYEAFQDETFQEKMHLEEDRHLGILGPVIRAEVGDTIQVVFYNRASQPFSMQPHGVFYEKDYEGTVYNDGTFEIYCQAGSHREAGMRAIYNVSQCPGHQATPRQRYQAARIYYIMAEEVEWDYCPDRSWEREWHNQSEKDSYGYIFLSNKDGLLGSRYKKAVFREYTDGTFRIPRPRTGPEEHLGILGPLIKGEVGDILTVVFKNNASRPYSVHAHGVLESTTVWPLAAEPGEVVTYQWNIPERSGPGPNDSACVSWIYYSAVDPIKDMYSGLVGPLAICQKGILEPHGGRSDMDREFALLFLIFDENKSWYLEENVATHGSQDPGSINLQDETFLESNKMHAINGKLYANLRGLTMYQGERVAWYMLAMGQDVDLHTIHFHAESFLYRNGENYRADVVDLFPGTFEVVEMVASNPGTWLMHCHVTDHVHAGMETLFTVFSRTEHLSPLTVITKETEKAVPPRDIEEGNVKMLGMQIPIKNVEMLASVLVAISVTLLLVVLALGGVVWYQHRQRKLRRNRRSILDDSFKLLSFKQ

SEQ ID NO: 48975 - protein, 811 aa, Homo sapiens
MESGHLLWALLFMQSLWPQLTDGATRVYYLGIRDVQWNYAPKGRNVITNQPLDSDIVASSFLKSDKNRIGGTYKKTIYKEYKDDSYTDEVAQPAWLGFLGPVLQAEVGDVILIHLKNFATRPYTIHPHGVFYEKDSEGSLYPDGSSGPLKADDSVPPGGSHIYNWTIPEGHAPTDADPACLTWIYHSHVDAPRDIATGLIGPLITCKRGALDGNSPPQRQDVDHDFFLLFSVVDENLSWHLNENIATYCSDPASVDKEDETFQESNRMHAINGFVFGNLPELNMCAQKRVAWHLFGMGNEIDVHTAFFHGQMLTTRGHHTDVANIFPATFVTAEMVPWEPGTWLISCQVNSHFRDGMQALYKVKSCSMAPPVDLLTGKVRQYFIEAHEIQWDYGPMGHDGSTGKNLREPGSISDKFFQKSSSRIGGTYWKVRYEAFQDETFQEKMHLEEDRHLGILGPVIRAEVGDTIQVVFYNRASQPFSMQPHGVFYEKDYEGTVYNDDPIRDTNSGLVGPLLVCRAGALGADGKQKGVDKEFFLLFTVLDENKSWYSNANQAAAMLDFRLLSEDIEGFQDSNRMHAINGFLFSNLPRLDMCKGDTVAWHLLGLGTETDVHGVMFQGNTVQLQGMRKGAAMLFPHTFVMAIMQPDNLGTFEIYCQAGSHREAGMRAIYNVSQCPGHQATPRQRYQAARIYYIMAEEVEWDYCPDRSWEREWHNQSEKDSYGYIFLSNKDGLLGSRYKKAVFREYTDGTFRIPRPRTGPEEHLGILGPLIKGEVGDILTVVFKNNASRPYSVHAHGVLESTTVWPLAAEP

SEQ ID NO: 48976 - protein, 1160 aa, Homo sapiens
MWAMESGHLLWALLFMQSLWPQLTDGATRVYYLGIRDVQWNYAPKGRNVITNQPLDSDIVASSFLKSDKNRIGGTYKKTIYKEYKDDSYTDEVAQPAWLGFLGPVLQAEVGDVILIHLKNFATRPYTIHPHGVFYEKDSEGSLYPDGSSGPLKADDSVPPGGSHIYNWTIPEGHAPTDADPACLTWIYHSHVDAPRDIATGLIGPLITCKRGALDGNSPPQRQDVDHDFFLLFSVVDENLSWHLNENIATYCSDPASVDKEDETFQESNRMHAINGFVFGNLPELNMCAQKRVAWHLFGMGNEIDVHTAFFHGQMLTTRGHHTDVANIFPATFVTAEMVPWEPGTWLISCQVNSHFRDGMQALYKVKSCSMAPPVDLLTGKVRQYFIEAHEIQWDYGPMGHDGSTGKNLREPGSISDKFFQKSSSRIGGTYWKVRYEAFQDETFQEKMHLEEDRHLGILGPVIRAEVGDTIQVVFYNRASQPFSMQPHGVFYEKDYEGTVYNDGSSYPGLVAKPFEKVTYRWTVPPHAGPTAQDPACLTWMYFSAADPIRDTNSGLVGPLLVCRAGALGADGKQKGVDKEFFLLFTVLDENKSWYSNANQAAAMLDFRLLSEDIEGFQDSNRMHAINGFLFSNLPRLDMCKGDTVAWHLLGLGTETDVHGVMFQGNTVQLQGMRKGAAMLFPHTFVMAIMQPDNLGTFEIYCQAGSHREAGMRAIYNVSQCPGHQATPRQRYQAARIYYIMAEEVEWDYCPDRSWEREWHNQSEKDSYGYIFLSNKDGLLGSRYKKAVFREYTDGTFRIPRPRTGPEEHLGILGPLIKGEVGDILTVVFKNNASRPYSVHAHGVLESTTVWPLAAEPGEVVTYQWNIPERSGPGPNDSACVSWIYYSAVDPIKDMYSGLVGPLAICQKGILEPHGGRSDMDREFALLFLIFDENKSWYLEENVATHGSQDPGSINLQDETFLESNKMHAINGKLYANLRGLTMYQGERVAWYMLAMGQDVDLHTIHFHAESFLYRNGENYRADVVDLFPGTFEVVEMVASNPGTWLMHCHVTDHVHAGMETLFTVFSRTEHLSPLTVITKETEKVPPRDIEEGNVKMLGMQIPIKNVEMLASVLVAISVTLLLVVLALGGVVWYQHRQRKLRRNRRSILDDSFKLLSFKQ

SEQ ID NO: 48977 - protein, 208 aa, Homo sapiens
MESGHLLWALLFMQSLWPQLTDGATRVYYLGIRDVQWNYAPKGRNVITNQPLDSDIVASSFLKSDKNRIGGTYKKTIYKEYKDDSYTDEVAQPAWLGFLGPVLQAEVGDVILIHLKNFATRPYTIHPHGVFYEKDSEGSLYPDGSSGPLKADDSVPPGGSHIYNWTIPEGHAPTDADPACLTWIYHSHVDAPRDIATGLIGPLITCKR

SEQ ID NO: 48978 - protein, 1212 aa, Homo sapiens
MTQTLPYHLSLLNVLFPGPCSRHFKFRRGKCAQPAWRKVSAPSQDLLITKVMWAMESGHLLWALLFMQSLWPQLTDGATRVYYLGIRDVQWNYAPKGRNVITNQPLDSDIVASSFLKSDKNRIGGTYKKTIYKEYKDDSYTDEVAQPAWLGFLGPVLQAEVGDVILIHLKNFATRPYTIHPHGVFYEKDSEGSLYPDGSSGPLKADDSVPPGGSHIYNWTIPEGHAPTDADPACLTWIYHSHVDAPRDIATGLIGPLITCKRGALDGNSPPQRQDVDHDFFLLFSVVDENLSWHLNENIATYCSDPASVDKEDETFQESNRMHAINGFVFGNLPELNMCAQKRVAWHLFGMGNEIDVHTAFFHGQMLTTRGHHTDVANIFPATFVTAEMVPWEPGTWLISCQVNSHFRDGMQALYKVKSCSMAPPVDLLTGKVRQYFIEAHEIQWDYGPMGHDGSTGKNLREPGSISDKFFQKSSSRIGGTYWKVRYEAFQDETFQEKMHLEEDRHLGILGPVIRAEVGDTIQVVFYNRASQPFSMQPHGVFYEKDYEGTVYNDGSSYPGLVAKPFEKVTYRWTVPPHAGPTAQDPACLTWMYFSAADPIRDTNSGLVGPLLVCRAGALGADGKQKGVDKEFFLLFTVLDENKSWYSNANQAAAMLDFRLLSEDIEGFQDSNRMHAINGFLFSNLPRLDMCKGDTVAWHLLGLGTETDVHGVMFQGNTVQLQGMRKGAAMLFPHTFVMAIMQPDNLGTFEIYCQAGSHREAGMRAIYNVSQCPGHQATPRQRYQAARIYYIMAEEVEWDYCPDRSWEREWHNQSEKDSYGYIFLSNKDGLLGSRYKKAVFREYTDGTFRIPRPRTGPEEHLGILGPLIKGEVGDILTVVFKNNASRPYSVHAHGVLESTTVWPLAAEPGEVVTYQWNIPERSGPGPNDSACVSWIYYSAVDPIKDMYSGLVGPLAICQKGILEPHGGRSDMDREFALLFLIFDENKSWYLEENVATHGSQDPGSINLQDETFLESNKMHAINGKLYANLRGLTMYQGERVAWYMLAMGQDVDLHTIHFHAESFLYRNGENYRADVVDLFPGTFEVVEMVASNPGTWLMHCHVTDHVHAGMETLFTVFSRTEHLSPLTVITKETEKAVPPRDIEEGNVKMLGMQIPIKNVEMLASVLVAISVTLLLVVLALGGVVWYQHRQRKLRRNRRSILDDSFKLLSFKQ

SEQ ID NO: 48979 - protein, 417 aa, Homo sapiens
MAQKEGGRTVPCCSRPKVAALTAGTLLLLTAIGAASWAIVAVLLRSDQEPLYPVQVSSADARLMVFDKTEGTWRLLCSSRSNARVAGLSCEEMGFLRALTHSELDVRTAGANGTSGFFCVDEGRLPHTQRLLEVISVCDCPRGRFLAAICQDCGRRKLPVDRIVGGRDTSLGRWPWQVSLRYDGAHLCGGSLLSGDWVLTAAHCFPERNRVLSRWRVFAGAVAQASPHGLQLGVQAVVYHGGYLPFRDPNSEENSNDIALVHLSSPLPLTEYIQPVCLPAAGQALVDGKICTVTGWGNTQYYGQQAGVLQEARVPIISNDVCNGADFYGNQIKPKMFCAGYPEGGIDACQGDSGGPFVCEDSISRTPRWRLCGIVSWGTGCALAQKPGVYTKVSDFREWIFQAIKTHSEASGMVTQL

SEQ ID NO: 48980 - protein, 417 aa, Homo sapiens; identical to SEQ ID NO: 48979

SEQ ID NO: 48981 - protein, 393 aa, Homo sapiens
MCKMRTREDMQLGNEGPGTALRLIHLQVSSADARLMVFDKTEGTWRLLCSSRSNARVAGLSCEEMGFLRALTHSELDVRTAGANGTSGFFCVDEGRLPHTQRLLEVISVCDCPRGRFLAAICQDCGRRKLPVDRIVGGRDTSLGRWPWQVSLRYDGAHLCGGSLLSGDWVLTAAHCFPERNRVLSRWRVFAGAVAQASPHGLQLGVQAVVYHGGYLPFRDPNSEENSNDIALVHLSSPLPLTEYIQPVCLPAAGQALVDGKICTVTGWGNTQYYGQQAGVLQEARVPIISNDVCNGADFYGNQIKPKMFCAGYPEGGIDACQGDSGGPFVCEDSISRTPRWRLCGIVSWGTGCALAQKPGVYTKVSDFREWIFQAIKVKVGSRWEPGWGRLGV

SEQ ID NO: 48982 - protein, 700 aa, Homo sapiens [sequence omitted]

SEQ ID NO: 48983 - protein, 324 aa, Homo sapiens
MKCVLVATEGAEVLFYWTDQEFEESLRLKFGQSENEEEELPALEDQLSTLLAPVIISSMTMLEKLSDTYTCFSTENGNFLYVLHLFGECLFIAINGDHTESEGDLRRKLYVLKYLFEVHFGLVTVDGHLIRKELRPPDLAQRVQLWEHFQSLLWTYSRLREQEQCFAVEALERLIHPQLCELCIEALERHVIQAVNTSPERGGEEALHAFLLVHSKLLAFYSSHSASSLRPADLLALILLVQDLYPSESTAEDDIQPSPRRARSSQNIPVQQAWSPHSTGPTGGSSAETETDSFSLPEEYFTPAPSPGDQSSGEDRRKAGGNNS

SEQ ID NO: 48984 - protein, 326 aa, Homo sapiens
RLIHPQLCELCIEALERHVIQAVNTSPERGGEEALHAFLLVHSKLLAFYSSHSASSLRPADLLALILLVQDLYPSESTAEDDIQETDSFSLPEEYFTPAPSPGDQSSGSTIWLEGGTPPMDALQIAEDTLQTLVPHCPVPSGPRRIFLDANVKESYCPLVPHTMYCLPLWQGINLVLLTRSPSAPLALVLSQLMDGFSMLEKKLKEGPEPGASLRSQPLVGDLRQRMDKFVKNRGAQEIQSTWLEFKAKAFSKSEPGSSWELLQACGKLKRQLCAIYRLNFLTTAPSRGGPHLPQHLQDQVQRLMREKLTDWKDFLLVKSRRNITM

SEQ ID NO: 48985 - protein, 700 aa, Homo sapiens [sequence omitted]

SEQ ID NO: 48986 - protein, 667 aa, Homo sapiens
MKCVLVATEGAEVLFYWTDQEFEESLRLKFGQSENEEEELPALEDQLSTLLAPVIISSMTMLEKLSDTYTCFSTENGNFLYVLHLFGECLFIAINGDHTESEGDLRRKLYVLKYLFEVHFGLVTVDGHLIRKELRPPDLAQRVQLWEHFQSLLWTYSRLREQEQCFAVEALERLIHPQLCELCIEALERHVIQAVNTSPERGGEEALHAFLLVHSKLLAFYSSHSASSLRPADLLALILLVQDLYPSESTAEDDIQETDSFSLPEEYFTPAPSPGDQSSGSTIWLEGGTPPMDALQIAEDTLQTLVPHCPVPSGPRRIFLDANVKESYCPLVPHTMYCLPLWQGINLVLLTRSPSAPLALVLSQLMDGFSMLEKKLKEGPEPGASLRSQPLVGDLRQRMDKFVKNRGAQEIQSTWLEFKAKAFSKSEPGSSWELLQACGKLKRQLCAIYRLNFLTTAPSRGGPHLPQHLQDQVQRLMREKLTDWKDFLLVKSRRNITMVSYLEDFPGLVHFIYVDRTTGQMVAPSLNCSQKTSSELGKGPLAAFVKTKVWSLIQLARRYLQKGYTTLLFQEGDFYCSYFLWFENDMGYKLQMIEVPVLSDDSVPIGMLGGDYYRKLLRYYSKNRPTEAVRCYELLALHLSVIPTDLLVQQAGQLARRLWEASRIPLL

SEQ ID NO: 48987 - protein, 159 aa, Homo sapiens
  VARIANT 1: note = MOD_RES - Any amino acid
XLRPPDLAQRVQLWEHFQSLLWTYSRLREQEQCFAVEALERLIHPQLCELCIEALERHVIQAVNTSPERGGEEALHAFLLVHSKLLAFYSSHSASSLRPADLLALILLVQDLYPSESTAEDDIQETDSFSLPEEYFTPAPSPGDQSSGEDRRKAGGNNS

SEQ ID NO: 48988 - protein, 1004 aa, Homo sapiens
MVQLYNLHPFGSQQVVPCKLEPDRFCGGGRDALFVAAGCKVEAFAVAGQELCQPRCAFSTLGRVLRLAYSEAGDYLVAIEEKNKATFLRAYVNWRNKRTENSRVCIRMIGHNVEGPFSKAFRDQMYIIEMPLSEAPLCISCCPVKGDLLVGCTNKLVLFSLKYQIINEEFSLLDFERSLIIHIDNITPVEVSFCVGYVAVMSDLEVLIVKLESGPKNGERVHHHPHKTNNRIRRTEEGISNEISQLESDDFVICQKPLELLGEKSEQSGLSVTLESTGLADEKRKYSHFQHLLYRRFAPDISSYVLSDDIKLHSLQLLPIYQTGSLTSDGKNLSQEKELLSLFCFFSLPHVGYLYMVVKSVELMSVYQYPEKSQQAVLTPQFLHVITSNNLQCFTVRCSAAAAREEDPYMDTTLKACPPVSMDVCALRIQLFIGLKAICHFKNHIILLTKAEPEAIPERRQSPKRLLSRKDTSVKIKIPPVAEAGWNLYIVNTISPVQLYKEMVDYSNTYKTVKTQSCIHLLSEAHLLVRAALMDASQLEPGEKAELLEAFKESCGHLGDCYSRLDSQHSHLTLPYYKMSGLSMAEVLARTDWTVEDGLQKYERGLIFYINHSLYENLDEELNEELAAKVVQMFYVAEPKQVPHILCSPSMKNINPLTAMSYLRKLDTSGFSSILVTLTKAAVALKMGDLDMHRNEMKSHSEMKLVCGFILEPRLLIQQRKGQIVPTELALHLKETQPGLLVASVLGLQKNNKIGIEEADSFFKVLCAKDEDTIPQLLVDFWEAQLVACLPDVVLQELFFKLTSQYIWRLSKRQPPDTTPLRTSEDLINACSHYGLIYPWVHVVISSDSLADKNYTEDLSKLQSLICGPSFDIASIIPFLEPLSEDTIAGLSVHVLCRTRLKEYEQCIDILLERCPEAVIPYANHELKEENRTLWWKKLLPELCQRIKCGGEKYQLYLSSLKETLSIVAVELELKDFMNVLPEDGTATFFLPYLLYCSRKKPLT

SEQ ID NO: 48989 - protein, 528 aa, Homo sapiens
MATSTSTEAKSASWWNYFFLYDGSKVKEEGDPTRAGICYFYPSQTLLDQQELLCGQIAGVVRCVSDISDSPPTLVRLRKLKFAIKVDGDYLWVLGCAVELPDVSCKRFLDQLVGFFNFYNGPVSLAYENCSQEELSTEWDTFIEQILKNTSDLHKIFNSLWNLDQTKVEPLLLLKAARILQTCQRSPHILAGCILYKGLIVSTQLPPSLTAKVLLHRTAPQEQRLPTGEDAPQEHGKWMLWSFKNRVTHQNPNGAALPPNVQIIPVFVTKEEAISLHEFPVEQMTRSLASPAGLQDGSAQHHPKGGSTSALKENATGHVESMAWTTPDPTSPDEACPDGRKENGCLSGHDLESIRPAGLHNSARGEVLGLSSSLGKELVFLQEELDLSEIHIPEAQEVEMASGHFAFLHVPVPDGRAPYCKASLSASSSLEPTPPEDTAISSLRPPSAPEMLTQHGAQEQLEDHPGHSSQAPIPRADPLPKSTVLFSGGCVKGSDTQLCVPGLVWYLEPQFYYVIVRHFFDSMRQTAG

SEQ ID NO: 48990 - protein, 708 aa, Homo sapiens
MATSTSTEAKSASWWNYFFLYDGSKVKEEGDPTRAGICYFYPSQTLLDQQELLCGQIAGVVRCVSDISDSPPTLVRLRKLKFAIKVDGDYLWVLGCAVELPDVSCKRFLDQLVGFFNFYNGPVSLAYENCSQEELSTEWDTFIEQILKNTSDLHKIFNSLWNLDQTKVEPLLLLKAARILQTCQRSPHILAGCILYKGLIVSTQLPPSLTAKVLLHRTAPQEQRLPTGEDAPQEHGAALPPNVQIIPVFVTKEEAISLHEFPVEQMTRSLASPAGLQDGSAQHHPKGGSTSALKENATGHVESMAWTTPDPTSPDEACPDGRKENGCLSGHDLESIRPAGLHNSARGEVLGLSSSLGKELVFLQEELDLSEIHIPEAQEVEMASGHFAFLHVPVPDGRAPYCKASLSASSSLEPTPPEDTAISSLRPPSAPEMLTQHGAQEQLEDHPGHSSQAPIPRADPLPRRTRRPLLLPRLDPGQRGNKLPTGEQGLDEDVDGVCESHAAPGLECSSGSANCQGAGPSADGISSRLTPAESCMGLVRMNLYTHCVKGLVLSLLAEEPLLGDSAAIEEVYHSSLASLNGLEVHLKETLPRDEAASTSSTYNFTHYDRIQSLLMANLPQVATPQDRRFLQAVSLMHSEFAQLPALYEMTVRNASTAVYACCNPIQETYFQQLAPAARSSGFPNPQDGAFSLSGKAKQKLLKHGVNLL

SEQ ID NO: 48991 - protein, 721 aa, Homo sapiens
MAPLCSLARWNYFFLYDGSKVKEEGDPTRAGICYFYPSQTLLDQQELLCGQIAGVVRCVSDISDSPPTLVRLRKLKFAIKVDGDYLWVLGCAVELPDVSCKRFLDQLVGFFNFYNGPVSLAYENCSQEELSTEWDTFIEQILKNTSDLHKIFNSLWNLDQTKVEPLLLLKAARILQTCQRSPHILAGCILYKGLIVSTQLPPSLTAKVLLHRTAPQEQRLPTGEDAPQEHGKWMLWSFKNRVTHQNPNGAALPPNVQIIPVFVTKEEAISLHEFPVEQMTRSLASPAGLQDGSAQHHPKGGSTSALKENATGHVESMAWTTPDPTSPDEACPDGRKENGCLSGHDLESIRPAGLHNSARGEVLGLSSSLGKELVFLQEELDLSEIHIPEAQEVEMASGHFAFLHVPVPDGRAPYCKASLSASSSLEPTPPEDTAISSLRPPSAPEMLTQHGAQEQLEDHPGHSSQAPIPRADPLPRRTRRPLLLPRLDPGQRGNKLPTGEQGLDEDVDGVCESHAAPGLECSSGSANCQGAGPSADGISSRLTPAESCMGLVRMNLYTHCVKGLVLSLLAEEPLLGDSAAIEEVYHSSLASLNGLEVHLKETLPRDEAASTSSTYNFTHYDRIQSLLMANLPQVATPQDRRFLQAVSLMHSEFAQLPALYEMTVRNASTAVYACCNPIQETYFQQLAPAARSSGFPNPQDGAFSLSGKAKQKLLKHGVNLL

SEQ ID NO: 48992 - protein, 708 aa, Homo sapiens; identical to SEQ ID NO: 48990

SEQ ID NO: 48993 - protein, 703 aa, Homo sapiens
MAPLCSLARWNYFFLYDGSKVKEEGDPTRAGICYFYPSQTLLDQQELLCGQIAGVVRCVSDISDSPPTLVRLRKLKFAIKVDGDYLWVLGCAVELPDVSCKRFLDQLVGFFNFYNGPVSLAYENCSQEELSTEWDTFIEQILKNTSDLHKIFNSLWNLDQTKVEPLLLLKAARILQTCQRSPHILAGCILYKGLIVSTQLPPSLTAKVLLHRTAPQEQRLPTGEDAPQEHGAALPPNVQIIPVFVTKEEAISLHEFPVEQMTRSLASPAGLQDGSAQHHPKGGSTSALKENATGHVESMAWTTPDPTSPDEACPDGRKENGCLSGHDLESIRPAGLHNSARGEVLGLSSSLGKELVFLQEELDLSEIHIPEAQEVEMASGHFAFLHVPVPDGRAPYCKASLSASSSLEPTPPEDTAISSLRPPSAPEMLTQHGAQEQLEDHPGHSSQAPIPRADPLPRRTRRPLLLPRLDPGQRGNKLPTGEQGLDEDVDGVCESHAAPGLECSSGSANCQGAGPSADGISSRLTPAESCMGLVRMNLYTHCVKGLVLSLLAEEPLLGDSAAIEEVYHSSLASLNGLEVHLKETLPRDEAASTSSTYNFTHYDRIQSLLMANLPQVATPQDRRFLQAVSLMHSEFAQLPALYEMTVRNASTAVYACCNPIQETYFQQLAPAARSSGFPNPQDGAFSLSGKAKQKLLKHGVNLL

SEQ ID NO: 48994 - protein, 1129 aa, Homo sapiens
MAFVPVIPESYSHVLAEFESLDPLLSALRLDSSRLKCTSIAVSRKWLALGSSGGGLHLIQKEGWKHRLFLSHREGAISQVACCLHDDDYVAVATSQGLVVVWELNQERRGKPEQMYVSSEHKGRRVTALCWDTAILRVFVGDHAGKVSAIKLNTSKQAKAAAAFVMFPVQTITTVDSCVVQLDYLDGRLLISSLTRSFLCDTEREKFWKIGNKERDGEYGACFFPGRCSGGQQPLIYCARPGSRMWEVNFDGEVISTHQFKKLLSLPPLPVITLRSEPQYDHTAGSSQSLSFPKLLHLSEHCVLTWTERGIYIFIPQNVQVLLWSEVKDIQDVAVCRNELFCLHLNGKVSHLSLISVERCVERLLRRGLWNLAARTCCLFQNSVIASRARKTLTADKLEHLKSQLDHGTYNDLISQLEELILKFEPLDSACSSRRSSISSHESFSILDSGIYRIISSRRGSQSDEDSCSLHSQTLSEDERFKEFTSQQEEDLPDQCCGSHGNEDNVSHAPVMFETDKNETFLPFGIPLPFRSPSPLVSLQAVKESVSSFVRKTTEKIGTLHTSPDLKVRPELRGDEQSCEEDVSSDTCPKEEDTEEEKEVTSPPPEEDRFQELKVATAEAMTKLQDPLVLFESESLRMVLQEWLSHLEKTFAMKDFSGVSDTDNSSMKLNQDVLLVNESKKGILDEDNEKEKRDSLGNEESVDKTACECVRSPRESLDDLFQICSPCAIASGLRNDLAELTTLCLELNVLNSKIKSTSGHVDHTLQQYSPEILACQFLKKYFFLLNLKRAKESIKLSYSNSPSVWDTFIEGLKEMASSNPVYMEMEKGDLPTRLKLLDDEVPFDSPLLVVYATRLYEKFGESALRSLIKFFPSILPSDIIQLCHHHPAEFLAYLDSLVKSRPEDQRSSFLESLLQPESLRLDWLLLAVSLDAPPSTSTMDDEGYPRPHSHLLSWGYSQLILHLIKLPADFITKEKMTDICRSCGFWPGYLILCLELERRREAFTNIVYLNDMSLMEGDNGWIPETVEEWKLLLHLIQSKSTRPAPQESLNGSLSDGPSPINVENVALLLAKAMGPDRAWSLLQECGLALELSEKFTRTCDILRIAEKRQRALIQSMLEKCDRFLWSQQA

SEQ ID NO: 48995 - protein, 1015 aa, Homo sapiens
MYVSSEHKGRRVTALCWDTAILRVFVGDHAGKVSAIKLNTSKQAKAAAAFVMFPVQTITTVDSCVVQLDYLDGRLLISSLTRSFLCDTEREKFWKIGNKERDGEYGACFFPGRCSGGQQPLIYCARPGSRMWEVNFDGEVISTHQFKKLLSLPPLPVITLRSEPQYDHTAGSSQSLSFPKLLHLSEHCVLTWTERGIYIFIPQNVQVLLWSEVKDIQDVAVCRNELFCLHLNGKVSHLSLISVERCVERLLRRGLWNLAARTCCLFQNSVIASRARKTLTADKLEHLKSQLDHGTYNDLISQLEELILKFEPLDSACSSRRSSISSHESFSILDSGIYRIISSRRGSQSDEDSCSLHSQTLSEDERFKEFTSQQEEDLPDQCCGSHGNEDNVSHAPVMFETDKNETFLPFGIPLPFRSPSPLVSLQAVKESVSSFVRKTTEKIGTLHTSPDLKVRPELRGDEQSCEEDVSSDTCPKEEDTEEEKEVTSPPPEEDRFQELKVATAEAMTKLQDPLVLFESESLRMVLQEWLSHLEKTFAMKDFSGVSDTDNSSMKLNQDVLLVNESKKGILDEDNEKEKRDSLGNEESVDKTACECVRSPRESLDDLFQICSPCAIASGLRNDLAELTTLCLELNVLNSKIKSTSGHVDHTLQQYSPEILACQFLKKYFFLLNLKRAKESIKLSYSNSPSVWDTFIEGLKEMASSNPVYMEMEKGDLPTRLKLLDDEVPFDSPLLVVYATRLYEKFGESALRSLIKFFPSILPSDIIQLCHHHPAEFLAYLDSLVKSRPEDQRSSFLESLLQPESLRLDWLLLAVSLDAPPSTSTMDDEGYPRPHSHLLSWGYSQLILHLIKLPADFITKEKMTDICRSCGFWPGYLILCLELERRREAFTNIVYLNDMSLMEGDNGWIPETVEEWKLLLHLIQSKSTRPAPQESLNGSLSDGPSPINVENVALLLAKAMGPDRAWSLLQECGLALELSEKFTRTCDILRIAEKRQRALIQSMLEKCDRFLWSQQA

SEQ ID NO: 48996 - protein, 1015 aa, Homo sapiens; identical to SEQ ID NO: 48995

SEQ ID NO: 48997 - protein, 775 aa, Homo sapiens
MKRSGTLRLLSDLSAFGGAARLRELVAGDSAVRVRGSPDGRHLLLLRPPGAVAPQLLVASRGPGAELERAWPAGQPSPLDAFFLPWPARPALVLVWESGLAEVWGAGVGPGWRPLQSTELCPGGGARVVAVAALRGRLVWCEERQARAEGPSGSPAAAFSHCVCVRTLEPSGEASTSLGRTHVLLHHCPAFGLLASCRQLFLVPTATTWPGVAHVLLIWSPGKGKVMVAAPRLGLSYSKSLNPGRGDTWDFRTLLRGLPGLLSPREPLAVHTWAPTPQGLLLLDFGGTVSLLQSHGGTRAVGTLQEAPVGPWGSAALGTFQGTLACVLGSTLELLDMGSGQLLERKVLSTDRVHLLEPPAPGMEDEEELETRGNLRLLSALGLFCVGWEAPQGVELPSAKDLVFEEACGYYQRRSLRGAQLTPEELRHSSTFRAPQALASILQGHLPPSALLTMLRTELRDYRGLEQLKAQLVAGDDEEAGWTELAEQEVARLLRTELIGDQLAQLNTVFQALPTAAWGATLRALQLQLDGNGKLRSQAPPDVWKKVLGGITAGKEPPNGILPPFELLCQCLCQLEPRWLPPFVELAQQQGGPGWGAGGPGLPLYRRALAVLGEEGTRPEALELELLLSSGRPKAVLQAVGQLVQKEQWDRALDAGLALGPSSPLLRSEIFKLLLAEFAQHRRLDAHLPLLCRLCPPELAPAELLLLLRTYLPDEVGPPTPFPEPGAEPPLTVGLLKALLEQTGAQGWLSGPVLSPYEDILWDPSTPPPTPPRDL

SEQ ID NO: 48998 - protein, 531 aa, Homo sapiens
MLGFLSRGPSMKLCMGLACVLSLWNTVSGIKGEAKKEKGMTFLPTTVSGLREEERKEKGVAFLATTELPARSIDLSALNLTELVNGMLSRALKDSKKFFSLLSVTSYSSFAFHKFSVAVYNISNLKTVDPAKFPTRYCYCLNNRTNDLSDFTALLVDIIGNSTSYLTEIFKSTSILSVNQSNESDCIFICVMTGKSGRNLSDFWEIEEKYPIINYTFTSGLSGVLGAATRGTARTSKPTTKSQKTLPSTSPGHWTQSTPWASALRSSPWTETAAPSETEETLNTGRPPELPARATATWFSASHTLPALATRRVARTQWLTADRQTWASISSVPWAQTISEKKPGGSLWETRSSPPTTAGTEEAMNTTSLLAPAAEIMATPGSPSQASPTLGAFTHGTQTPSPTKATAPRYPQTGDLSAEWPFTAGEEPVLVPRPHQVSRCPQPLFKVGAMAAAPLTLAIQRLNPCLMELCQFFQQCLCMSQRSPRTEDMRYCLEYYSWFLKNATYICQRVKRVSHSHTLKQKCLENICKSV

SEQ ID NO: 48999 - protein, 185 aa, Homo sapiens
MSPSLQEGAQLGENKPSTCSFSIERILGLDQKKDCVPLMKPHRPWADTCSSSGKDGNLCLHVPNPPSGISFPSVVDHPMPEERASKYENYFSASERLSLKRELSWYRGRRPRTAFTQNQIEVLENVFRVNCYPGIDIREDLAQKLNLEEDRIQIWFQNRRAKLKRSHRESQFLMAKKNFNTNLLE

SEQ ID NO: 49000 - protein, 107 aa, Homo sapiens
MSPSLQEGAQLGENKPSTCSFSIERILGLDQKKDCVPLMKPHRPWADTCSSSGKDGNLCLHVPNPPSGISFPSVVDHPMPEERASKYENYFSASERLSLKRELSWYR

SEQ ID NO: 49001 - protein, 420 aa, Homo sapiens
MEVPPRLSHVPPPLFPSAPATLASRSLSHWRPRPPRQLAPLLPSLAPSSARQGARRAQRHVTAQQPSRLAGGAAIKGGRRRRPDLFRRHFKSSSIQRSAAAAAATRTARQHPPADSSVTMEDMNEYSNIEEFAEGSKINASKNQQDDGKMFIGGLSWDTSKKDLTEYLSRFGEVVDCTIKTDPVTGRSRGFGFVLFKDAASVDKVLELKEHKLDGKLIDPKRAKALKGKEPPKKVFVGGLSPDTSEEQIKEYFGAFGEIENIELPMDTKTNERRGFCFITYTDEEPVKKLLESRYHQIGSGKCEIKVAQPKEVYRQQQQQQKGGRGAAAGGRGGTRGRGRGQGQNWNQGFNNYYDQGYGNYNSAYGGDQNYSGYGGYDYTGYNYGNYGYGQGYADYSGQQSTYGKASRGGGNHQNNYQPY

SEQ ID NO: 49002 - protein, 244 aa, Homo sapiens
MEDMNEYSNIEEFAEGSKINASKNQQDDGKMFIGGLSWDTSKKDLTEYLSRFGEVVDCTIKTDPVTGRSRGFGFVLFKDAASVDKVLELKEHKLDGKLIDPKRAKALKGKEPPKKVFVGGLSPDTSEEQIKEYFGAFGEIENIELPMDTKTNERRGFCFITYTDEEPVKKLLESRYHQIGSGKCEIKVAQPKEVYRQQQQQQKGGRGAAAGGRGGTRGRGRGQQSTYGKASRGGGNHQNNYQPY

SEQ ID NO: 49003 - protein, 420 aa, Homo sapiens; identical to SEQ ID NO: 49001

SEQ ID NO: 49004 - protein, 633 aa, Homo sapiens
MANQVNGNAVQLKEEEEPMDTSSVTHTEHYKTLIEAGLPQKVAERLDEIFQTGLVAYVDLDERAIDALREFNEEGALSVLQQFKESDLSHVQNKSAFLCGVMKTYRQREKQGSKVQESTKGPDEAKIKALLERTGYTLDVTTGQRKYGGPPPDSVYSGVQPGIGTEVFVGKIPRDLYEDELVPLFEKAGPIWDLRLMMDPLSGQNRGYAFITFCGKEAAQEAVKLCDSYEIRPGKHLGVCISVANNRLFVGSIPKNKTKENILEEFSKVTEGLVDVILYHQPDDKKKNRGFCFLEYEDHKSAAQARRRLMSGKVKVWGNVVTVEWADPVEEPDPEVMAKVKVLFVRNLATTVTEEILEKSFSEFGKLERVKKLKDYAFVHFEDRGAAVKAMDEMNGKEIEGEEIEIVLAKPPDKKRKERQAARQASRSTAYEDYYYHPPPRMPPPIRGRGRGGGRGGYGYPPDYYGYEDYYDDYYGYDYHDYRGGYEDPYYGYDDGYAVRGRGGGRGGRGAPPPPRGRGAPPPRGRAGYSQRGAPLGPPRGSRGGRGGPAQQQRGRGSRGSRGNRGGNVGGKRKADGYNQPDSKRRQTNNQQNWGSQPIAQQPLQQGGDYSGNYGYNNDNQEFYQDTYGQQWK

SEQ ID NO: 49005 - protein, 633 aa, Homo sapiens; identical to SEQ ID NO: 49004

SEQ ID NO: 49006 - protein, 636 aa, Homo sapiens
MANQVNGNAVQLKEEEEPMDTSSVTHTEHYKTLIEAGLPQKVAERLDEIFQTGLVAYVDLDERAIDALREFNEEGALSVLQQFKESDLSHVQNKSAFLCGVMKTYRQREKQGSKVQESTKGPDEAKIKALLERTGYTLDVTTGQRKYGGPPPDSVYSGVQPGIGTEVFVGKIPRDLYEDELVPLFEKAGPIWDLRLMMDPLSGQNRGYAFITFCGKEAAQEAVKLCDSYEIRPGKHLGVCISVANNRLFVGSIPKNKTKENILEEFSKVTGLTEGLVDVILYHQPDDKKKNRGFCFLEYEDHKSAAQARRRLMSGKVKVWGNVVTVEWADPVEEPDPEVMAKVKVLFVRNLATTVTEEILEKSFSEFGKLERVKKLKDYAFVHFEDRGAAVKAMDEMNGKEIEGEEIEIVLAKPPDKKRKERQAARQASRSTAYEDYYYHPPPRMPPPIRGRGRGGGRGGYGYPPDYYGYEDYYDDYYGYDYHDYRGGYEDPYYGYDDGYAVRGRGGGRGGRGAPPPPRGRGAPPPRGRAGYSQRGAPLGPPRGSRGGRGGPAQQQRGRGSRGSRGNRGGNVGGKRKADGYNQPDSKRRQTNNQQNWGSQPIAQQPLQQGGDYSGNYGYNNDNQEFYQDTYGQQWK

SEQ ID NO: 49007 - protein, 473 aa, Homo sapiens
MKTYRQREKQGSKVQESTKGPDEAKIKALLERTGYTLDVTTGQRKYGGPPPDSVYSGVQPGIGTECDSYEIRPGKHLGVCISVANNRLFVGSIPKNKTKENILEEFSKVTEGLVDVILYHQPDDKKKNRGFCFLEYEDHKSAAQARRRLMSGKVKVWGNVVTVEWADPVEEPDPEVMAKVKVLFVRNLATTVTEEILEKSFSEFGKLERVKKLKDYAFVHFEDRGAAVKAMDEMNGKEIEGEEIEIVLAKPPDKKRKERQAARQASRSTAYEDYYYHPPPRMPPPIRGRGRGGGRGGYGYPPDYYGYEDYYDDYYGYDYHDYRGGYEDPYYGYDDGYAVRGRGGGRGGRGAPPPPRGRGAPPPRGRAGYSQRGAPLGPPRGSRGGRGGPAQQQRGRGSRGSRGNRGGNVGGKRKADGYNQPDSKRRQTNNQQNWGSQPIAQQPLQQGGDYSGNYGYNNDNQEFYQDTYGQQWK

SEQ ID NO: 49008 - protein, 595 aa, Homo sapiens
MANQVNGNAVQLKEEEEPMDTSSVTHTEHYKTLIEAGLPQKVAERLDEIFQTGLVAYVDLDERAIDALREFNEEGALSVLQQFKESDLSHVQNKSAFLCGVMKTYRQREKQGSKVQESTKGPDEAKIKVFVGKIPRDLYEDELVPLFEKAGPIWDLRLMMDPLSGQNRGYAFITFCGKEAAQEAVKLCDSYEIRPGKHLGVCISVANNRLFVGSIPKNKTKENILEEFSKVTEGLVDVILYHQPDDKKKNRGFCFLEYEDHKSAAQARRRLMSGKVKVWGNVVTVEWADPVEEPDPEVMAKVKVLFVRNLATTVTEEILEKSFSEFGKLERVKKLKDYAFVHFEDRGAAVKAMDEMNGKEIEGEEIEIVLAKPPDKKRKERQAARQASRSTAYEDYYYHPPPRMPPPIRGRGRGGGRGGYGYPPDYYGYEDYYDDYYGYDYHDYRGGYEDPYYGYDDGYAVRGRGGGRGGRGAPPPPRGRGAPPPRGRAGYSQRGAPLGPPRGSRGGRGGPAQQQRGRGSRGSRGNRGGNVGGKRKADGYNQPDSKRRQTNNQQNWGSQPIAQQPLQQGGDYSGNYGYNNDNQEFYQDTYGQQWK

SEQ ID NO: 49009 - protein, 767 aa, Homo sapiens
MRSWAFSYLDAMDNITRQNQFYDTQVIKQENESGYERRPLEMEQQQAYRPEMKTEMKQGAPTSFLPPEASQLKPDRQQFQSRKRPYEENRGRGYFEHREDRRGRSPQPPAEEDEDDFDDTLVAIDTYNCDLHFKVARDRSSGYPLTIEGFAYLWSGARASYGVRRGRVCFEMKINEEISVKHLPSTEPDPHVVRIGWSLDSCSTQLGEEPFSYGYGGTGKKSTNSRFENYGDKFAENDVIGCFADFECGNDVELSFTKNGKWMGIAFRIQKEALGGQALYPHVLVKNCAVEFNFGQRAEPYCSVLPGFTFIQHLPLSERIRGTVGPKSKAECEILMMVGLPAAGKTTWAIKHAASNPSKKYNILGTNAIMDKMRVMGLRRQRNYAGRWDVLIQQATQCLNRLIQIAARKKRNYILDQTNVYGSAQRRKMRPFEGFQRKAIVICPTDEDLKDRTIKRTDEEGKDVPDHAVLEMKANFTLPDVGDFLDEVLFIELQREEADKLVRQYNEEGRKAGPPPEKRFDNRGGGGFRGRGGGGGFQRYENRGPPGGNRGGFQNRGGGSGGGGNYRGGFNRSGGGGYSQNRWGNNNRDNNNSNNRGSYNRAPQQQPPPQQPPPPQPPPQQPPPPPSYSPARNPPGASTYNKNSNIPGSSANTSTPTVSSYSPPQPSYSQPPYNQGGYSQGYTAPPPPPPPPPAYNYGSYGGYNPAPYTPPPPPTAQTYPQPSYNQYQQYAQQWNQYYQNQGQWPPYYGNYDYGSYSGNTQGGTSTQ

SEQ ID NO: 49010 - protein, 122 aa, Homo sapiens
MDVRRLKVNELREELQRRGLDTRGLKAELAERLQAALEAEEPDDERELDADDEPGRPGHINEEAELQPATLQPGRLQPGLHSPTASTSTTTCLQLWELRRLQPGPLYPTATPHCTDLPSAQL

SEQ ID NO: 49011 - protein, 756 aa, Homo sapiens
MDNITRQNQFYDTQVIKQENESGYERRPLEMEQQQAYRPEMKTEMKQGAPTSFLPPEASQLKPDRQQFQSRKRPYEENRGRGYFEHREDRRGRSPQPPAEEDEDDFDDTLVAIDTYNCDLHFKVARDRSSGYPLTIEGFAYLWSGARASYGVRRGRVCFEMKINEEISVKHLPSTEPDPHVVRIGWSLDSCSTQLGEEPFSYGYGGTGKKSTNSRFENYGDKFAENDVIGCFADFECGNDVELSFTKNGKWMGIAFRIQKEALGGQALYPHVLVKNCAVEFNFGQRAEPYCSVLPGFTFIQHLPLSERIRGTVGPKSKAECEILMMVGLPAAGKTTWAIKHAASNPSKKYNILGTNAIMDKMRVMGLRRQRNYAGRWDVLIQQATQCLNRLIQIAARKKRNYILDQTNVYGSAQRRKMRPFEGFQRKAIVICPTDEDLKDRTIKRTDEEGKDVPDHAVLEMKANFTLPDVGDFLDEVLFIELQREEADKLVRQYNEEGRKAGPPPEKRFDNRGGGGFRGRGGGGGFQRYENRGPPGGNRGGFQNRGGGSGGGGNYRGGFNRSGGGGYSQNRWGNNNRDNNNSNNRGSYNRAPQQQPPPQQPPPPQPPPQQPPPPPSYSPARNPPGASTYNKNSNIPGSSANTSTPTVSSYSPPQPSYSQPPYNQGGYSQGYTAPPPPPPPPPAYNYGSYGGYNPAPYTPPPPPTAQTYPQPSYNQYQQYAQQWNQYYQNQGQWPPYYGNYDYGSYSGNTQGGTSTQ

SEQ ID NO: 49012 - protein, 752 aa, Homo sapiens
MDVRRLKVNELREELQRRGLDTRGLKAELAERLQPPPPGLQPHAEPGGYSGPDGHYAMDNITRQNQFYDTQVIKQENESGYERRPLEMEQQQAYRPEMKTEMKQGAPTSFLPPEASQLKPDRQQFQSRKRPYEENRGRGYFEHREDRRGRSPQPPAEEDEDDFDDTLVAIDTYNCDLHFKVARDRSSGYPLTIEGFAYLWSGARASYGVRRGRVCFEMKDFECGNDVELSFTKNGKWMGIAFRIQKEALGGQALYPHVLVKNCAVEFNFGQRAEPYCSVLPGFTFIQHLPLSERIRGTVGPKSKAECEILMMVGLPAAGKTTWAIKHAASNPSKKYNILGTNAIMDKMRVMGLRRQRNYAGRWDVLIQQATQCLNRLIQIAARKKRNYILDQTNVYGSAQRRKMRPFEGFQRKAIVICPTDEDLKDRTIKRTDEEGKDVPDHAVLEMKANFTLPDVGDFLDEVLFIELQREEADKLVRQYNEEGRKAGPPPEKRFDNRGGGGFRGRGGGGGFQRYENRGPPGGNRGGFQNRGGGSGGGGNYRGGFNRSGGGGYSQNRWGNNNRDNNNSNNRGSYNRAPQQQPPPQQPPPPQPPPQQPPPPPSYSPARNPPGASTYNKNSNIPGSSANTSTPTVSSYSPPQSFGFFPSTFQPSYSQPPYNQGGYSQGYTAPPPPPPPPPAYNYGSYGGYNPAPYTPPPPPTAQTYPQPSYNQYQQYAQQWNQYYQNQGQWPPYYGNYDYGSYSGNTQGGTSTQ

SEQ ID NO: 49013 - protein, 856 aa, Homo sapiens
MDVRRLKVNELREELQRRGLDTRGLKAELAERLQAALEAEEPDDERELDADDEPGRPGHINEEVETEGGSELEGTAQPPPPGLQPHAEPGGYSGPDGHYAMDNITRQNQFYDTQVIKQENESGYERRPLEMEQQQAYRPEMKTEMKQGAPTSFLPPEASQLKPDRQQFQSRKRPYEENRGRGYFEHREDRRGRSPQPPAEEDEDDFDDTLVAIDTYNCDLHFKVARDRSSGYPLTIEGFAYLWSGARASYGVRRGRVCFEMKINEEISVKHLPSTEPDPHVVRIGWSLDSCSTQLGEEPFSYGYGGTGKKSTNSRFENYGDKFAENDVIGCFADFECGNDVELSFTKNGKWMGIAFRIQKEALGGQALYPHVLVKNCAVEFNFGQRAEPYCSVLPGFTFIQHLPLSERIRGTVGPKSKAECEILMMVGLPAAGKTTWAIKHAASNPSKKYNILGTNAIMDKMRVMGLRRQRNYAGRWDVLIQQATQCLNRLIQIAARKKRNYILDQTNVYGSAQRRKMRPFEGFQRKAIVICPTDEDLKDRTIKRTDEEGKDVPDHAVLEMKANFTLPDVGDFLDEVLFIELQREEADKLVRQYNEEGRKAGPPPEKRFDNRGGGGFRGRGGGGGFQRYENRGPPGGNRGGFQNRGGGSGGGGNYRGGFNRSGGGGYSQNRWGNNNRDNNNSNNRGSYNRAPQQQPPPQQPPPPQPPPQQPPPPPSYSPARNPPGASTYNKNSNIPGSSANTSTPTVSSYSPPQPSYSQPPYNQGGYSQGYTAPPPPPPPPPAYNYGSYGGYNPAPYTPPPPPTAQTYPQPSYNQYQQYAQQWNQYYQNQGQWPPYYGNYDYGSYSGNTQGGTSTQ

SEQ ID NO: 49014 - protein, 916 aa, Homo sapiens
MDCEHSLSLPCRGAEAWEIGIDKYLYAMRLSDETLIDIMTRFRKEMKNGLSRDFNPTATVKMLPTFVRSIPDGSEKGDFIALDLGGSSFRILRVQVNHEKNQNVHMESEVYDTPENIVHGSGSQLFDHVAECLGDFMEKRKIKDKKLPVGFTFSFPCQQSKIDEAILITWTKRFKASGVEGADVVKLLNKAIKKRGDYDANIVAVVNDTVGTMMTCGYDDQHCEVGLIIGTGTNACYMEELRHIDLVEGDEGRMCINTEWGAFGDDGSLEDIRTEFDREIDRGSLNPGKQLFEKMVSGMYLGELVRLILVKMAKEGLLFEGRITPELLTRGKFNTSDVSAIEKNKEGLHNAKEILTRLGVEPSDDDCVSVQHVCTIVSFRSANLVAATLGAILNRLRDNKGTPRLRTTVGVDGSLYKTHPQYSRRFHKTLRRLVPDSDVRFLLSESGSGKGAAMVTAVAYRLAEQHRQIEETLAHFHLTKDMLLEVKKRMRAEMELGLRKQTHNNAVVKMLPSFVRRTPDGTENGDFLALDLGGTNFRVLLVKIRSGKKRTVEMHNKIYAIPIEIMQGTGEELFDHIVSCISDFLDYMGIKGPRMPLGFTFSFPCQQTSLDAGILITWTKGFKATDCVGHDVVTLLRDAIKRREEFDLDVVAVVNDTVGTMMTCAYEEPTCEVGLIVGTGSNACYMEEMKNVEMVEGDQGQMCINMEWGAFGDNGCLDDIRTHYDRLVDEYSLNAGKQRYEKMISGMYLGEIVRNILIDFTKKGFLFRGQISETLKTRGIFETKFLSQIESDRLALLQVRAILQQLGLNSTCDDSILVKTVCGVVSRRAAQLCGAGMAAVVDKIRENRGLDRLNVTVGVDGTLYKLHPHFSRIMHQTVKELSPKCNVSFLLSEDGSGKGAALITAVGVRLRTEASS

SEQ ID NO: 49015 - protein, 917 aa, Homo sapiens
MIAAQLLAYYFTELKDDQVKKIDKYLYAMRLSDETLIDIMTRFRKEMKNGLSRDFNPTATVKMLPTFVRSIPDGSEKGDFIALDLGGSSFRILRVQVNHEKNQNVHMESEVYDTPENIVHGSGSQLFDHVAECLGDFMEKRKIKDKKLPVGFTFSFPCQQSKIDEAILITWTKRFKASGVEGADVVKLLNKAIKKRGDYDANIVAVVNDTVGTMMTCGYDDQHCEVGLIIGTGTNACYMEELRHIDLVEGDEGRMCINTEWGAFGDDGSLEDIRTEFDREIDRGSLNPGKQLFEKMVSGMYLGELVRLILVKMAKEGLLFEGRITPELLTRGKFNTSDVSAIEKNKEGLHNAKEILTRLGVEPSDDDCVSVQHVCTIVSFRSANLVAATLGAILNRLRDNKGTPRLRTTVGVDGSLYKTHPQYSRRFHKTLRRLVPDSDVRFLLSESGSGKGAAMVTAVAYRLAEQHRQIEETLAHFHLTKDMLLEVKKRMRAEMELGLRKQTHNNAVVKMLPSFVRRTPDGTENGDFLALDLGGTNFRVLLVKIRSGKKRTVEMHNKIYAIPIEIMQGTGEELFDHIVSCISDFLDYMGIKGPRMPLGFTFSFPCQQTSLDAGILITWTKGFKATDCVGHDVVTLLRDAIKRREEFDLDVVAVVNDTVGTMMTCAYEEPTCEVGLIVGTGSNACYMEEMKNVEMVEGDQGQMCINMEWGAFGDNGCLDDIRTHYDRLVDEYSLNAGKQRYEKMISGMYLGEIVRNILIDFTKKGFLFRGQISETLKTRGIFETKFLSQIESDRLALLQVRAILQQLGLNSTCDDSILVKTVCGVVSRRAAQLCGAGMAAVVDKIRENRGLDRLNVTVGVDGTLYKLHPHFSRIMHQTVKELSPKCNVSFLLSEDGSGKGAALITAVGVRLRTEASS

SEQ ID NO: 49016 - protein, 905 aa, Homo sapiens
MAKRALHDFIDKYLYAMRLSDETLIDIMTRFRKEMKNGLSRDFNPTATVKMLPTFVRSIPDGSEKGDFIALDLGGSSFRILRVQVNHEKNQNVHMESEVYDTPENIVHGSGSQLFDHVAECLGDFMEKRKIKDKKLPVGFTFSFPCQQSKIDEAILITWTKRFKASGVEGADVVKLLNKAIKKRGDYDANIVAVVNDTVGTMMTCGYDDQHCEVGLIIGTGTNACYMEELRHIDLVEGDEGRMCINTEWGAFGDDGSLEDIRTEFDREIDRGSLNPGKQLFEKMVSGMYLGELVRLILVKMAKEGLLFEGRITPELLTRGKFNTSDVSAIEKNKEGLHNAKEILTRLGVEPSDDDCVSVQHVCTIVSFRSANLVAATLGAILNRLRDNKGTPRLRTTVGVDGSLYKTHPQYSRRFHKTLRRLVPDSDVRFLLSESGSGKGAAMVTAVAYRLAEQHRQIEETLAHFHLTKDMLLEVKKRMRAEMELGLRKQTHNNAVVKMLPSFVRRTPDGTENGDFLALDLGGTNFRVLLVKIRSGKKRTVEMHNKIYAIPIEIMQGTGEELFDHIVSCISDFLDYMGIKGPRMPLGFTFSFPCQQTSLDAGILITWTKGFKATDCVGHDVVTLLRDAIKRREEFDLDVVAVVNDTVGTMMTCAYEEPTCEVGLIVGTGSNACYMEEMKNVEMVEGDQGQMCINMEWGAFGDNGCLDDIRTHYDRLVDEYSLNAGKQRYEKMISGMYLGEIVRNILIDFTKKGFLFRGQISETLKTRGIFETKFLSQIESDRLALLQVRAILQQLGLNSTCDDSILVKTVCGVVSRRAAQLCGAGMAAVVDKIRENRGLDRLNVTVGVDGTLYKLHPHFSRIMHQTVKELSPKCNVSFLLSEDGSGKGAALITAVGVRLRTEASS

SEQ ID NO: 49017 - protein, 921 aa, Homo sapiens
MGQICQRESATAAEKPKLHLLAESEIDKYLYAMRLSDETLIDIMTRFRKEMKNGLSRDFNPTATVKMLPTFVRSIPDGSEKGDFIALDLGGSSFRILRVQVNHEKNQNVHMESEVYDTPENIVHGSGSQLFDHVAECLGDFMEKRKIKDKKLPVGFTFSFPCQQSKIDEAILITWTKRFKASGVEGADVVKLLNKAIKKRGDYDANIVAVVNDTVGTMMTCGYDDQHCEVGLIIGTGTNACYMEELRHIDLVEGDEGRMCINTEWGAFGDDGSLEDIRTEFDREIDRGSLNPGKQLFEKMVSGMYLGELVRLILVKMAKEGLLFEGRITPELLTRGKFNTSDVSAIEKNKEGLHNAKEILTRLGVEPSDDDCVSVQHVCTIVSFRSANLVAATLGAILNRLRDNKGTPRLRTTVGVDGSLYKTHPQYSRRFHKTLRRLVPDSDVRFLLSESGSGKGAAMVTAVAYRLAEQHRQIEETLAHFHLTKDMLLEVKKRMRAEMELGLRKQTHNNAVVKMLPSFVRRTPDGTENGDFLALDLGGTNFRVLLVKIRSGKKRTVEMHNKIYAIPIEIMQGTGEELFDHIVSCISDFLDYMGIKGPRMPLGFTFSFPCQQTSLDAGILITWTKGFKATDCVGHDVVTLLRDAIKRREEFDLDVVAVVNDTVGTMMTCAYEEPTCEVGLIVGTGSNACYMEEMKNVEMVEGDQGQMCINMEWGAFGDNGCLDDIRTHYDRLVDEYSLNAGKQRYEKMISGMYLGEIVRNILIDFTKKGFLFRGQISETLKTRGIFETKFLSQIESDRLALLQVRAILQQLGLNSTCDDSILVKTVCGVVSRRAAQLCGAGMAAVVDKIRENRGLDRLNVTVGVDGTLYKLHPHFSRIMHQTVKELSPKCNVSFLLSEDGSGKGAALITAVGVRLRTEASS

SEQ ID NO: 49018 - protein, 915 aa, Homo sapiens
MIAAQLLAYYFTELKDDQVKKIDKYLYAMRLSDETLIDIMTRFRKEMKNGLSRDFNPTATVKMLPTFVRSIPDGSEKGDFIALDLGGSSFRILRVQVNHEKNQNVHMESEVYDTPENIVHGSGSQLFDHVAECLGDFMEKRKIKDKKLPVGFTFSFPCQQSKIDEAILITWTKRFKASGVEGADVVKLLNKAIKKRGDYDANIVAVVNDTVGTMMTCGYDDQHCEVGLIIGTGTNACYMEELRHIDLVEGDEGRMCINTEWGAFGDDGSLEDIRTEFDREIDRGSLNPGKQLFEKMVSGMYLGELVRLILVKMAKEGLLFEGRITPELLTRGKFNTSDVSAIEKNKEGLHNAKEILTRLGVEPSDDDCVSVQHVCTIVSFRSANLVAATLGAILNRLRDNKGTPRLRTTVGVDGSLYKTHPQYSRRFHKTLRRLVPDSDVRFLLSESGSGKGAAMVTAVAYRLAEQHRQIEETLAHFHLTKDMLLEVKKRMRAEMELGLRKQTHNNAVVKMLPSFVRRTPDGTENGDFLALDLGGTNFRVLLVKIRSGKKRTVEMHNKIYAIPIEIMQGTGEELFDHIVSCISDFLDYMGIKGPRMPLGFTFSFPCQQTSLDAGILITWTKGFKATDCVGHDVVTLLRDAIKRREEFDLDVVAVVNDTVGTMMTCAYEEPTCEVGLIVGTGSNACYMEEMKNVEMVEGDQGQMCINMEWGAFGDNGCLDDIRTHYDRLVDEYSLNAGKQRYEKMISGMYLGEIVRNILIDFTKKGFLFRGQISETLKTRGIFETKFLSQIESDRLALLQVRAILQQLGLNSTCDDSILVKTVCGVVSRRAAQLCGAGMAAVVDKIRENRGLDRLNVTVGVDGTLYKLHPHFSRIMHQTVKELSPKCNVSFLLSEDGSGKGAALITAVGVRLRTEA

SEQ ID NO: 49019 - protein, 114 aa, Homo sapiens
MAKRALHDFIDKYLYAMRLSDETLIDIMTRFRKEMKNGLSRDFNPTATVKMLPTFVRSIPDGSEKGDFIALDLGGSSFRILRVQVNHEKNQNVHMESEVYDTPENIVHGSGSQL

SEQ ID NO: 49020 - protein, 291 aa, Homo sapiens
MDCEHSLSLPCRGAEAWEIGIDKYLYAMRLSDETLIDIMTRFRKEMKNGLSRDFNPTATVKMLPTFVRSIPDGSEKGDFIALDLGGSSFRILRVQVNHEKNQNVHMESEVYDTPENIVHGSGSQLFDHVAECLGDFMEKRKIKDKKLPVGFTFSFPCQQSKIDEAILITWTKRFKASGVEGADVVKLLNKAIKKRGDYDANIVAVVNDTVGTMMTCGYDDQHCEVGLIIGTGTNACYMEELRHIDLVEGDEGRMCINTEWGAFGDDGSLEDIRTEFDREIDRGSLNPGKQL

SEQ ID NO: 49021 - protein, 952 aa, Homo sapiens
MGQICQRESRQGLAMLPRLFLNPWRQVILLPQPPKVLGLQATAAEKPKLHLLAESEIDKYLYAMRLSDETLIDIMTRFRKEMKNGLSRDFNPTATVKMLPTFVRSIPDGSEKGDFIALDLGGSSFRILRVQVNHEKNQNVHMESEVYDTPENIVHGSGSQLFDHVAECLGDFMEKRKIKDKKLPVGFTFSFPCQQSKIDEAILITWTKRFKASGVEGADVVKLLNKAIKKRGDYDANIVAVVNDTVGTMMTCGYDDQHCEVGLIIGTGTNACYMEELRHIDLVEGDEGRMCINTEWGAFGDDGSLEDIRTEFDREIDRGSLNPGKQLFEKMVSGMYLGELVRLILVKMAKEGLLFEGRITPELLTRGKFNTSDVSAIEKNKEGLHNAKEILTRLGVEPSDDDCVSVQHVCTIVSFRSANLVAATLGAILNRLRDNKGTPRLRTTVGVDGSLYKTHPQYSRRFHKTLRRLVPDSDVRFLLSESGSGKGAAMVTAVAYRLAEQHRQIEETLAHFHLTKDMLLEVKKRMRAEMELGLRKQTHNNAVVKMLPSFVRRTPDGTENGDFLALDLGGTNFRVLLVKIRSGKKRTVEMHNKIYAIPIEIMQGTGEELFDHIVSCISDFLDYMGIKGPRMPLGFTFSFPCQQTSLDAGILITWTKGFKATDCVGHDVVTLLRDAIKRREEFDLDVVAVVNDTVGTMMTCAYEEPTCEVGLIVGTGSNACYMEEMKNVEMVEGDQGQMCINMEWGAFGDNGCLDDIRTHYDRLVDEYSLNAGKQRYEKMISGMYLGEIVRNILIDFTKKGFLFRGQISETLKTRGIFETKFLSQIESDRLALLQVRAILQQLGLNSTCDDSILVKTVCGVVSRRAAQLCGAGMAAVVDKIRENRGLDRLNVTVGVDGTLYKLHPHFSRIMHQTVKELSPKCNVSFLLSEDGSGKGAALITAVGVRLRTEASS

SEQ ID NO: 49022 - protein, 139 aa, Homo sapiens
MGQICQRESATAAEKPKLHLLAESEIDKYLYAMRLSDETLIDIMTRFRKEMKNGLSRDFNPTATVKMLPTFVRSIPDGSEKGDFIALDLGGSSFRILRVQVNHEKNQNVHMESEVYDTPENIVHGSGSQLFDHVAECLG

SEQ ID NO: 49023 - protein, 917 aa, Homo sapiens
MIASHLLAYFFTELNHDQVQKVDQYLYHMRLSDETLLEISKRFRKEMEKGLGATTHPTAAVKMLPTFVRSTPDGTEHGEFLALDLGGTNFRVLWVKVTDNGLQKVEMENQIYAIPEDIMRGSGTQLFDHIAECLANFMDKLQIKDKKLPLGFTFSFPCHQTKLDESFLVSWTKGFKSSGVEGRDVVALIRKAIQRRGDFDIDIVAVVNDTVGTMMTCGYDDHNCEIGLIVGTGSNACYMEEMRHIDMVEGDEGRMCINMEWGAFGDDGSLNDIRTEFDQEIDMGSLNPGKQLFEKMISGMYMGELVRLILVKMAKEELLFGGKLSPELLNTGRFETKDISDIEGEKDGIRKAREVLMRLGLDPTQEDCVATHRICQIVSTRSASLCAATLAAVLQRIKENKGEERLRSTIGVDGSVYKKHPHFAKRLHKTVRRLVPGCDVRFLRSEDGSGKGAAMVTAVAYRLADQHRARQKTLEHLQLSHDQLLEVKRRMKVEMERGLSKETHASAPVKMLPTYVCATPDGTEKGDFLALDLGGTNFRVLLVRVRNGKWGGVEMHNKIYAIPQEVMHGTGDELFDHIVQCIADFLEYMGMKGVSLPLGFTFSFPCQQNSLDESILLKWTKGFKASGCEGEDVVTLLKEAIHRREEFDLDVVAVVNDTVGTMMTCGFEDPHCEVGLIVGTGSNACYMEEMRNVELVEGEEGRMCVNMEWGAFGDNGCLDDFRTEFDVAVDELSLNPGKQRFEKMISGMYLGEIVRNILIDFTKRGLLFRGRISERLKTRGIFETKFLSQIESDCLALLQVRAILQHLGLESTCDDSIIVKEVCTVVARRAAQLCGAGMAAVVDRIRENRGLDALKVTVGVDGTLYKLHPHFAKVMHETVKDLAPKCDVSFLQSEDGSGKGAALITAVACRIREAGQR

SEQ ID NO: 49024 - protein, 889 aa, Homo sapiens
MRLSDETLLEISKRFRKEMEKGLGATTHPTAAVKMLPTFVRSTPDGTEHGEFLALDLGGTNFRVLWVKVTDNGLQKVEMENQIYAIPEDIMRGSGTQLFDHIAECLANFMDKLQIKDKKLPLGFTFSFPCHQTKLDESFLVSWTKGFKSSGVEGRDVVALIRKAIQRRGDFDIDIVAVVNDTVGTMMTCGYDDHNCEIGLIVGTGSNACYMEEMRHIDMVEGDEGRMCINMEWGAFGDDGSLNDIRTEFDQEIDMGSLNPGKQLFEKMISGMYMGELVRLILVKMAKEELLFGGKLSPELLNTGRFETKDISDIEGEKDGIRKAREVLMRLGLDPTQEDCVATHRICQIVSTRSASLCAATLAAVLQRIKENKGEERLRSTIGVDGSVYKKHPHFAKRLHKTVRRLVPGCDVRFLRSEDGSGKGAAMVTAVAYRLADQHRARQKTLEHLQLSHDQLLEVKRRMKVEMERGLSKETHASAPVKMLPTYVCATPDGTEKGDFLALDLGGTNFRVLLVRVRNGKWGGVEMHNKIYAIPQEVMHGTGDELFDHIVQCIADFLEYMGMKGVSLPLGFTFSFPCQQNSLDESILLKWTKGFKASGCEGEDVVTLLKEAIHRREEFDLDVVAVVNDTVGTMMTCGFEDPHCEVGLIVGTGSNACYMEEMRNVELVEGEEGRMCVNMEWGAFGDNGCLDDFRTEFDVAVDELSLNPGKQRFEKMISGMYLGEIVRNILIDFTKRGLLFRGRISERLKTRGIFETKFLSQIESDCLALLQVRAILQHLGLESTCDDSIIVKEVCTVVARRAAQLCGAGMAAVVDRIRENRGLDALKVTVGVDGTLYKLHPHFAKVMHETVKDLAPKCDVSFLQSEDGSGKGAALITAVACRIREAGQR

SEQ ID NO: 49025 - protein, 917 aa, Homo sapiens; identical to SEQ ID NO: 49023

SEQ ID NO: 49026 - protein, 923 aa, Homo sapiens
MDSIGSSGLRQGEETLSCSEEGLPGPSDSSELVQECLQQFKVTRAQLQQIQASLLGSMEQALRGQASPAPAVRMLPTYVGSTPHGTEQGDFVVLELGATGASLRVLWVTLTGIEGHRVEPRSQEFVIPQEVMLGAGQQLFDFAAHCLSEFLDAQPVNKQGLQLGFSFSFPCHQTGLDRSTLISWTKGFRCSGVEGQDVVQLLRDAIRRQGAYNIDVVAVVNDTVGTMMGCEPGVRPCEVGLVVDTGTNACYMEEARHVAVLDEDRGRVCVSVEWGSFSDDGALGPVLTTFDHTLDHESLNPGAQRFEKMIGGLYLGELVRLVLAHLARCGVLFGGCTSPALLSQGSILLEHVAEMEDPSTGAARVHAILQDLGLSPGASDVELVQHVCAAVCTRAAQLCAAALAAVLSCLQHSREQQTLQVAVATGGRVCERHPRFCSVLQGTVMLLAPECDVSLIPSVDGGGRGVAMVTAVAARLAAHRRLLEETLAPFRLNHDQLAAVQAQMRKAMAKGLRGEASSLRMLPTFVRATPDGSERGDFLALDLGGTNFRVLLVRVTTGVQITSEIYSIPETVAQGSGQQLFDHIVDCIVDFQQKQGLSGQSLPLGFTFSFPCRQLGLDQGILLNWTKGFKASDCEGQDVVSLLREAITRRQAVELNVVAIVNDTVGTMMSCGYEDPRCEIGLIVGTGTNACYMEELRNVAGVPGDSGRMCINMEWGAFGDDGSLAMLSTRFDASVDQASINPGKQRFEKMISGMYLGEIVRHILLHLTSLGVLFRGQQIQRLQTRDIFKTKFLSEIESDSLALRQVRAILEDLGLPLTSDDALMVLEVCQAVSQRAAQLCGAGVAAVVEKIRENRGLEELAVSVGVDGTLYKLHPRFSSLVAATVRELAPRCVVTFLQSEDGSGKGAALVTAVACRLAQLTRV

SEQ ID NO: 49027 - protein, 529 aa, Homo sapiens
MTSSRLWFSLLLAAAFAGRATALWPWPQNFQTSDQRYVLYPNNFQFQYDVSSAAQPGCSVLDEAFQRYRDLLFGSGSWPRPYLTGKRHTLEKNVLVVSVVTPGCNQLPTLESVENYTLTINDDQCLLLSETVWGALRGLETFSQLVWKSAEGTFFINKTEIEDFPRFPHRGLLLDTSRHYLPLSSILDTLDVMAYNKLNVFHWHLVDDPSFPYESFTFPELMRKGSYNPVTHIYTAQDVKEVIEYARLRGIRVLAEFDTPGHTLSWGPGIPGLLTPCYSGSEPSGTFGPVNPSLNNTYEFMSTFFLEVSSVFPDFYLHLGGDEVDFTCWKSNPEIQDFMRKKGFGEDFKQLESFYIQTLLDIVSSYGKGYVVWQEVFDNKVKIQPDTIIQVWREDIPVNYMKELELVTKAGFRALLSAPWYLNRISYGPDWKDFYIVEPLAFEGTPEQKALVIGGEACMWGEYVDNTNLVPRLWPRAGAVAERLWSNKLTSDLTFAYERLSHFRCELLRRGVQAQPLNVGFCEQEFEQT

SEQ ID NO: 49028 - protein, 301 aa, Homo sapiens
MMTSVYSSLRLSGELSEDVMAYNKLNVFHWHLVDDPSFPYESFTFPELMRKGSYNPVTHIYTAQDVKEVIEYARLRGIRVLAEFDTPGHTLSWGPGIPGLLTPCYSGSEPSGTFGPVNPSLNNTYEFMSTFFLEVSSVFPDFYLHLGGDEVDFTCWKSNPEIQDFMRKKGFGEDFKQLESFYIQTLLDIVSSYGKGYVVWQEVFDNKVKIQPDTIIQVWREDIPVNYMKELELVTKAGFRALLSAPWYLNRISYGPDWKDFYIVEPLAFEGTPEQKALVIGGEACMWGEYVDNTNLVPRLW

SEQ ID NO: 49029 - protein, 168 aa, Homo sapiens
MAYNKLNVFHWHLVDDPSFPYESFTFPELMRKGSYNPVTHIYTAQDVKEVIEYARLRGIRVLAEFDTPGHTLSWGPGIPGLLTPCYSGSEPSGTFGPVNPSLNNTYEFMSTFFLEVSSVFPDFYLHLGGDEVDFTCWKSNPEIQDFMRKKGFGEDFKQLESFYIQTYP

SEQ ID NO: 49030 - protein, 556 aa, Homo sapiens
MELCGLGLPRPPMLLALLLATLLAAMLALLTQVALVVQVAEAARAPSVSAKPGPALWPLPLLVKMTPNLLHLAPENFYISHSPNSTAGPSCTLLEEAFRRYHGYIFGFYKWHHEPAEFQAKTQVQQLLVSITLQSECDAFPNISSDESYTLLVKEPVAVLKANRVWGALRGLETFSQLVYQDSYGTFTINESTIIDSPRFSHRGILIDTSRHYLPVKIILKTLDAMAFNKFNVLHWHIVDDQSFPYQSITFPELSNKGSYSLSHVYTPNDVRMVIEYARLRGIRVLPEFDTPGHTLSWGKGQKDLLTPCYSRQNKLDSFGPINPTLNTTYSFLTTFFKEISEVFPDQFIHLGGDEVEFKCWESNPKIQDFMRQKGFGTDFKKLESFYIQKVLDIIATINKGSIVWQEVFDDKAKLAPGTIVEVWKDSAYPEELSRVTASGFPVILSAPWYLDLISYGQDWRKYYKVEPLDFGGTQKQKQLFIGGEACLWGEYVDATNLTPRLWPRASAVGERLWSSKDVRDMDDAYDRLTRHRCRMVERGIAAQPLYAGYCNHENM

SEQ ID NO: 49031 - protein, 331 aa, Homo sapiens
MAFNKFNVLHWHIVDDQSFPYQSITFPELSNKGSYSLSHVYTPNDVRMVIEYARLRGIRVLPEFDTPGHTLSWGKGQKDLLTPCYSRQNKLDSFGPINPTLNTTYSFLTTFFKEISEVFPDQFIHLGGDEVEFKCWESNPKIQDFMRQKGFGTDFKKLESFYIQKVLDIIATINKGSIVWQEVFDDKAKLAPGTIVEVWKDSAYPEELSRVTASGFPVILSAPWYLDLISYGQDWRKYYKVEPLDFGGTQKQKQLFIGGEACLWGEYVDATNLTPRLWPRASAVGERLWSSKDVRDMDDAYDRLTRHRCRMVERGIAAQPLYAGYCNHENM

SEQ ID NO: 49032 - protein, 791 aa, Homo sapiens
MWNMLIVAMCLALLGCLQAQELQGHVSIILLGATGDLAKKYLWQGLFQLYLDEAGRGHSFSFHGAALTAPKQGQELMAKALESLSCPKDMAPSHCAEHKDQFLQLSQYRQLKTAEDYQALNKDIEAQLQHAGLREAGRIFYFSVPPFAYEDIARNINSSCRPGPGAWLRVVLEKPFGHDHFSAQQLATELGTFFQEEEMYRVDHYLGKQAVAQILPFRDQNRKALDGLWNRHHVERVEIIMKETVDAEGRTSFYEEYGVIRDVLQNHLTEVLTLVAMELPHNVSSAEAVLRHKLQVFQALRGLQRGSAVVGQYQSYSEQVRRELQKPDSFHSLTPTFAAVLVHIDNLRWEGVPFILMSGKALDERVGYARILFKNQACCVQSEKHWAAAQSQCLPRQLVFHIGHGDLGSPAVLVSRNLFRPSLPSSWKEMEGPPGLRLFGSPLSDYYAYSPVRERDAHSVLLSHIFHGRKNFFITTENLLASWNFWTPLLESLAHKAPRLYPGGAENGRLLDFEFSSGRLFFSQQQPEQLVPGPGPAPMPSDFQVLRAKYRESPLVSAWSEELISKLANDIEATAVRAVRRFGQFHLALSGGSSPVALFQQLATAHYGFPWAHTHLWLVDERCVPLSDPESNFQGLQAHLLQHVRIPYYNIHPMPVHLQQRLCAEEDQGAQIYAREISALVANSSFDLVLLGMGADGHTASLFPQSPTGLDGEQLVVLTTSPSQPHRRMSLSLPLINRAKKVAVLVMGRMKREITTLVSRVGHEPKKWPISGVLPHSGQLVWYMDYDAFLG

SEQ ID NO: 49033 - protein, 655 aa, Homo sapiens
MGRWAWVPSPWPPPGLGPFLLLLLLLLLLPRGFQPQPGGNRTESPEPNATATPAIPTILVTSVTSETPATSAPEAEGPQSGGLPPPPRAVPSSSSPQAQALTEDGRPCRFPFRYGGRMLHACTSEGSAHRKWCATTHNYDRDRAWGYCVEATPPPGGPAALDPCASGPCLNGGSCSNTQDPQSYHCSCPRAFTGKDCGTEKCFDETRYEYLEGGDRWARVRQGHVEQCECFGGRTWCEGTRHTACLSSPCLNGGTCHLIVATGTTVCACPPGFAGRLCNIEPDERCFLGNGTGYRGVASTSASGLSCLAWNSDLLYQELHVDSVGAAALLGLGPHAYCRNPDNDERPWCYVVKDSALSWEYCRLEACESLTRVQLSPDLLATLPEPASPGRQACGRRHKKRTFLRPRIIGGSSSLPGSHPWLAAIYIGDSFCAGSLVHTCWVVSAAHCFSHSPPRDSVSVVLGQHFFNRTTDVTQTFGIEKYIPYTLYSVFNPSDHDLVLIRLKKKGDRCATRSQFVQPICLPEPGSTFPAGHKCQIAGWGHLDENVSGYSSSLREALVPLVADHKCSSPEVYGADISPNMLCAGYFDCKSDACQGDSGGPLACEKNGVAYLYGIISWGDGCGRLHKPGVYTRVANYVDWINDRIRPPRRLVAPS

SEQ ID NO: 49034 - protein, 1268 aa, Homo sapiens [sequence omitted]

SEQ ID NO: 49035 - protein, 1268 aa, Homo sapiens [sequence omitted]

SEQ ID NO: 49036 - protein, 1268 aa, Homo sapiens [sequence omitted]

SEQ ID NO: 49037 - protein, 82 aa, Homo sapiens
MSSVAVLTQESFAEHRSGLVPQQIKVATLNSEEESDPPTYKDAFPPLPEKAACLESAQEPSGAWGNKIRPIKASVITQVFHV

SEQ ID NO: 49038 - protein, 14 aa, Homo sapiens
MSSVAVLTQESFAE

SEQ ID NO: 49039 - protein, 69 aa, Homo sapiens
MSSVAVLTQESFAEHRSGLVPQQIKVATLNSEEESDPPTYKDAFPPLPEKAACLESAQEPSGAWGNKIR

SEQ ID NO: 49040 - protein, 54 aa, Homo sapiens
MSSVAVLTQESFAEHRSGLVPQQIKVATLNSEEESDPPTYKDAFPPLPEKAACL

SEQ ID NO: 49041 - protein, 224 aa, Homo sapiens
MSSVAVLTQESFAEHRSGLVPQQIKVATLNSEEESDPPTYKDAFPPLPEKAACLESAQEPSGAWGNKIRPIKASVITQVFHVPLEERKYKDMNQFGEGEQAKICLEIMQRTGAHLELSLAKDQGLSIMVSGKLDAVMKARKDIVARLQTQASATVAIPKEHHRFVIGKNGEKLQDLELKTATKIQIPRPDDPSNQIKITGTKEGIEKARHEVLLISAEQDKRAV

SEQ ID NO: 49042 - protein, 81 aa, Homo sapiens
MSSVAVLTQESFAEHRSGLVPQQIKVATLNSEEESDPPTYKDAFPPLPEKAACLESAQEPSGAWGNKIRPIKASVITQVFH

SEQ ID NO: 49043 - protein, 79 aa, Homo sapiens
MSSVAVLTQESFAEHRSGLVPQQIKVATLNSEEESDPPTYKDAFPPLPEKAACLESAQEPSGAWGNKIRPIKASVITQV

SEQ ID NO: 49044 - protein, 96 aa, Homo sapiens
MSSVAVLTQESFAEHRSGLVPQQIKVATLNSEEESDPPTYKDAFPPLPEKAACLESAQEPSGAWGNKIRPIKASVITQVFHVPLEERKYKDMNQFG

SEQ ID NO: 49045 - protein, 19 aa, Homo sapiens
MSSVAVLTQESFAEHRSGL

SEQ ID NO: 49046 - protein, 1235 aa, Homo sapiens
MHLAERDRWLFVATVMMHFVSIKSGFPGLCVGVRSTMSSVAVLTQESFAEHRSGLVPQQIKVATLNSEEESDPPTYKDAFPPLPEKAACLESAQEPSGAWGNKIRPIKASVITQVFHVPLEERKYKDMNQFGEGEQAKICLEIMQRTGAHLELSLAKDQGLSIMVSGKLDAVMKARKDIVARLQTQASATVAIPKEHHRFVIGKNGEKLQDLELKTATKIQIPRPDDPSNQIKITGTKEGIEKARHEVLLISAEQDKRAVERLEVEKAFHPFIAGPYNRLVGEIMQETGTRINIPPPSVNRTEIVFTGEKEQLAQAVARIKKIYEEKANSFTVSSVAAPSWLHRFIIGKKGQNLAKITQQMPKVHIEFTEGEDKITLEGPTEDVNVAQEQIEGMVKDLINRMDYVEINIDHKFHRHLIGKSGANINRIKDQYKVSVRIPPDSEKSNLIRIEGDPQGVQQAKRELLELASRMENERTKDLIIEQRFHRTIIGQKGERIREIRDKFPEVIINFPDPAQKSDIVQLRGPKNEVEKCTKYMQKMVADLVENSYSISVPIFKQFHKNIIGKGGANIKKIREESNTKIDLPAENSNSETIIITGKRANCEAARSRILSIQKDLANIAEVEVSIPAKLHNSLIGTKGRLIRSIMEECGGVHIHFPVEGSGSDTVVIRGPSSDVEKAKKQLLHLAEEKQTKSFTVDIRAKPEYHKFLIGKGGGKIRKVRDSTGARVIFPAAEDKDQDLITIIGKEDAVREAQKELEALIQNLDNVVEDSMLVDPKHHRHFVIRRGQVLREIAEEYGGVMVSFPRSGTQSDKVTLKGAKDCVEAAKKRIQEIIEDLEAQVTLECAIPQKFHRSVMGPKGSRIQQITRDFSVQIKFPDREENAVHSTEPVVQENGDEAGEGREAKDCDPGSPRRCDIIIISGRKEKCEAAKEALEALVPVTIEVEVPFDLHRYVIGQKGSGIRKMMDEFEVNIHVPAPELQSDIIAITGLAANLDRAKAGLLERVKELQAEQEDRALRSFKLSVTVDPKYHPKIIGRKGAVITQIRLEHDVNIQFPDKDDGNQPQDQITITGYEKNTEAARDAILRIVGELEQMVSEDVPLDHRVHARIIGARGKAIRKIMDEFKVDIRFPQSGAPDPNCVTVTGLPENVEEAIDHILNLEEEYLADVVDSEALQVYMKPPAHEEAKAPSRGFVVRDAPWTASSSEKAPDMSSSEEFPSFGAQVAPKTLPWGPKR

SEQ ID NO: 49047 - protein, 221 aa, Homo sapiens
MSSVAVLTQESFAEHRSGLVPQQIKVATLNSEEESDPPTYKDAFPPLPEKAACLESAQEPSGAWGNKIRPIKASVITQVFHVPLEERKYKDMNQFGEGEQAKICLEIMQRTGAHLELSLAKDQGLSIMVSGKLDAVMKARKDIVARLQTQASATVAIPKEHHRFVIGKNGEKLQDLELKTATKIQIPRPDDPSNQIKITGTKEGIEKARHEVLLISAEQDK

SEQ ID NO: 49048 - protein, 141 aa, Homo sapiens
MSSVAVLTQESFAEHRSGLVPQQIKVATLNSEEESDPPTYKDAFPPLPEKAACLESAQEPSGAWGNKIRPIKASVITQVFHVPLEERKYKDMNQFGEGEQAKICLEIMQRTGAHLELSLAKDQGLSIMVSGKLDAVMKARK

SEQ ID NO: 49049 - protein, 126 aa, Homo sapiens
MSSVAVLTQESFAEHRSGLVPQQIKVATLNSEEESDPPTYKDAFPPLPEKAACLESAQEPSGAWGNKIRPIKASVITQVFHVPLEERKYKDMNQFGEGEQAKICLEIMQRTGAHLELSLAKDQGLS

SEQ ID NO: 49050 - protein, 147 aa, Homo sapiens
MSSVAVLTQESFAEHRSGLVPQQIKVATLNSEEESDPPTYKDAFPPLPEKAACLESAQEPSGAWGNKIRPIKASVITQVFHVPLEERKYKDMNQFGEGEQAKICLEIMQRTGAHLELSLAKDQGLSIMVSGKLDAVMKARKDIVARL

SEQ ID NO: 49051 - protein, 17 aa, Homo sapiens
MSSVAVLTQESFAEHRS

SEQ ID NO: 49052 - protein, 164 aa, Homo sapiens
MSSVAVLTQESFAEHRSGLVPQQIKVATLNSEEESDPPTYKDAFPPLPEKAACLESAQEPSGAWGNKIRPIKASVITQVFHVPLEERKYKDMNQFGEGEQAKICLEIMQRTGAHLELSLAKDQGLSIMVSGKLDAVMKARKDIVARLQTQASATVAIPKEHHRF

SEQ ID NO: 49053 - protein, 47 aa, Homo sapiens
MSSVAVLTQESFAEHRSGLVPQQIKVATLNSEEESDPPTYKDAFPPL

SEQ ID NO: 49054 - protein, 347 aa, Homo sapiens
MENLMTSSTLPPLFADEDGSKESNDLATTGLNHPEVPYSSGATSSTNNPEFVEDLSQGQLLQSESSNAAEGNEQRHEDEQRSKRGGWSKGRKRKKPLRDSNAPKSPLTGYVRFMNERREQLRAKRPEVPFPEITRMLGNEWSKLPPEEKQRYLDEADRDKERYMKELEQYQKTEAYKVFSRKTQDRQKGKSHRQDAARQATHDHEKETEVKERSVFDIPIFTEEFLNHSKAREAELRQLRKSNMEFEERNAALQKHVESMRTAVEKLEVDVIQERSRNTVLQQHLETLRQVLTSSFASMPLPGSGETPTVDTIDSYMNRLHSIILANPQDNENFIATVREVVNRLDR

SEQ ID NO: 49055 - protein, 347 aa, Homo sapiens; identical to SEQ ID NO: 49054

SEQ ID NO: 49056 - protein, 156 aa, Homo sapiens
MENLMTSSTLPPLFADEDGSKESNDLATTGLNHPEVPYSSGATSSTNNPEFVEDLSQGQLLQSESSNAAEGNEQRHEDEQRSKRGGWSKGRKRKKPLRDSNAPKSPLTGYVRFMNERREQLRAKRPEVPFPEITRMLGNEWSKLPPEEKQRYLDEA

SEQ ID NO: 49057 - protein, 100 aa, Homo sapiens
MENLMTSSTLPPLFADEDGSKESNDLATTGLNHPEVPYSSGATSSTNNPEFVEDLSQGQLLQSESSNAAEGNEQRHEDEQRSKRGGWSKGRKRKKPLRDS

SEQ ID NO: 49058 - protein, 162 aa, Homo sapiens
MENLMTSSTLPPLFADEDGSKESNDLATTGLNHPEVPYSSGATSSTNNPEFVEDLSQGQLLQSESSNAAEGNEQRHEDEQRSKRGGWSKGRKRKKPLRDSNAPKSPLTGYVRFMNERREQLRAKRPEVPFPEITRMLGNEWSKLPPEEKQRYLDEADRDKER

SEQ ID NO: 49059 - protein, 317 aa, Homo sapiens
MSHGPKQPGAAAAPAGGKAPGQHGGFVVTVKQERGEGPRAGEKGSHEEEPVKKRGWPKGKKRKKILPNGPKAPVTGYVRFLNERREQIRTRHPDLPFPEITKMLGAEWSKLQPTEKQRYLDEAEREKQQYMKELRAYQQSEAYKMCTEKIQEKKIKKEDSSSGLMNTLLNGHKGGDCDGFSTFDVPIFTEEFLDQNKAREAELRRLRKMNVAFEEQNAVLQRHTQSMSSARERLEQELALEERRTLALQQQLQAVRQALTASFASLPVPGTGETPTLGTLDFYMARLHGAIERDPAQHEKLIVRIKEILAQVASEHL

SEQ ID NO: 49060 - protein, 268 aa, Homo sapiens
MDTRVGTAMASPPSMFPSSLKSSWTKTKRVRRSFGAEDECGLRGAERGTAEAHAEHEQRARASGAGAGAGGAEDAGAAAAAPGRAPGAHRQLRLTAGAGHGRNAHAGHSGLLHGPASRSHRARPRPAREAHRPHQGNPGPGRQRAPVRSGRAHDAEEKLWARPCHTPPRGREAGGPPGPGPILHLGGSSPPKIKFLQHPFSFQSPQPPEPGKSTRDTPRRTSQPRVPLLGGQTRYTGSPGHPQDTGQTKPTPSTRQDPPNYSLRGAVP

SEQ ID NO: 49061 - protein, 215 aa, Homo sapiens
MSHGPKQPGAAAAPAGGKAPGQHGGFVVTVKQERGEGPRAGEKGSHEEEPVKKRGWPKGKKRKKILPNGPKAPVTGYVRFLNERREQIRTRHPDLPFPEITKMLGAEWSKLQPTEKQRYLDEAEREKQQYMKELRAYQQSEAYKMCTEKIQEKKIKKEDSSSGLMNTLLNGHKGGDCDGFSTFDVPIFTEEFLDQNKAREAELRRLRKMNVAFEE

SEQ ID NO: 49062 - protein, 142 aa, Homo sapiens
MSHGPKQPGAAAAPAGGKAPGQHGGFVVTVKQERGEGPRAGEKGSHEEEPVKKRGWPKGKKRKKILPNGPKAPVTGYVRFLNERREQIRTRHPDLPFPEITKMLGAEWSKLQPTEKQRYLDEAEREKQQYMKELRAYQQSEA

SEQ ID NO: 49063 - protein, 107 aa, Homo sapiens
MSESSSKSSQPLASKQEKDGTEKRGRGRPRKQPPVSPGTALVGSQKEPSEVPTPKRPRGRPKGSKNKGAAKTRKTTTTPGRKPRGRPKKLEKEEEEGISQESSEEEQ

SEQ ID NO: 49064 - protein, 96 aa, Homo sapiens
MSESSSKSSQPLASKQEKDGTEKRGRGRPRKQPPKEPSEVPTPKRPRGRPKGSKNKGAAKTRKTTTTPGRKPRGRPKKLEKEEEEGISQESSEEEQ

SEQ ID NO: 49065 - protein, 96 aa, Homo sapiens; identical to SEQ ID NO: 49064

SEQ ID NO: 49066 - protein, 107 aa, Homo sapiens; identical to SEQ ID NO: 49063

SEQ ID NO: 49067 - protein, 96 aa, Homo sapiens; identical to SEQ ID NO: 49064

SEQ ID NO: 49068 - protein, 328 aa, Homo sapiens
MSESSSKSSQPLASKQEKDGTEKRGRGRPRKQPPVSPGTALVGSQKEPSEVPTPKRPRGRPKGSKNKGEGGRGGHLAGVLGGGAVTHACRLLLTGGAASFWDWTALLRSHRPHPFPRPTITTASGRHPHLPPVPSPPHYTAHQPLQGSHGLSGEQFSPGLSSQLPPPTHAYTHALLDKANIPLSRTLHLLRPHSLGGGDIALWAFGLGAPSLLLHCSLWLPIVGPGRVPLALKGAQAPSHPGTPYSTALAAAGVANGGGCWPPGFPQPNCLCHHVGLTFHPSPTSLVPVLGWTAPFGYRKAGGVSPLLPLHCGHSPLALRLGSEYILW

SEQ ID NO: 49069 - protein, 96 aa, Homo sapiens; identical to SEQ ID NO: 49064

SEQ ID NO: 49070 - protein, 107 aa, Homo sapiens; identical to SEQ ID NO: 49063

SEQ ID NO: 49071 - protein, 106 aa, Homo sapiens
MSARGEGAGQPSTSAQGQPAAPAPQKRGRGRPRKQQQEPTGEPSPKRPRGRPKGSKNKSPSKAAQKKAEATGEKRPRGRPRKWDNLLPRTSSKKKTSLGNSTKRSH

SEQ ID NO: 49072 - protein, 118 aa, Homo sapiens
MSARGEGAGQPSTSAQGQPAAPAPQKRGRGRPRKQQQEPTGEPSPKRPRGRPKGSKNKSPSKAAQKKAEATGEKRPRGRPRKWPQQVVQKKPAQVNVALPGKDHPGNLIYLLFSKNAT

SEQ ID NO: 49073 - protein, 90 aa, Homo sapiens
MSARGEGAGQPSTSAQGQPAAPAPQKRGRGRPRKQQQEPTGEPSPKRPRGRPKGSKNKSPSKAAQKKAEATGEKRPRGRPRKWEEFYIAA

SEQ ID NO: 49074 - protein, 109 aa, Homo sapiens
MSARGEGAGQPSTSAQGQPAAPAPQKRGRGRPRKQQQEPTGEPSPKRPRGRPKGSKNKSPSKAAQKKAEATGEKRPRGRPRKWPQQVVQKKPAQEETEETSSQESAEED

SEQ ID NO: 49075 - protein, 92 aa, Homo sapiens
MSARGEGAGQPSTSAQGQPAAPAPQKRGRGRPRKQQQEPTGEPSPKRPRGRPKGSKNKSPSKAAQKKAEATGEKRPRGRPRKWWLLMKSPCW

SEQ ID NO: 49076 - protein, 103 aa, Homo sapiens
MSARGEGAGQPSTSAQGQPAAPAPQKRGRGRPRKQQQEPTGEPSPKRPRGRPKGSKNKSPSKAAQKKAEATGEKRPRGRPRKWLRAQALDSDGLGSNSGPSLS

SEQ ID NO: 49077 - protein, 86 aa, Homo sapiens
MSARGEGAGQPSTSAQGQPAAPAPQKRGRGRPRKQQQEPTGEPSPKRPRGRPKGSKNKSPSKAAQKKAEATGEKRPRGRPRKWLQN

SEQ ID NO: 49078 - protein, 99 aa, Homo sapiens
MSARGEGAGQPSTSAQGQPAAPAPQKRGRGRPRKQQQEPTGEPSPKRPRGRPKGSKNKSPSKAAQKKAEATGEKRPRGRPRKWPQQVVQKKPAQVRHSH

SEQ ID NO: 49079 - protein, 158 aa, Homo sapiens
MGKGDPKKPRGKMSSYAFFVQTCREEHKKKHPDASVNFSEFSKKCSERWKTMSAKEKGKFEDMAKADKARYEREMKTYIPPKGETKKKFKDPNAPKRPPSAFFLFCSEYRPKIKGEHPGLSIGDVAKKLGEMWNNTAADDKQPYEKKAAKLKEKYEKF

SEQ ID NO: 49080 - protein, 215 aa, Homo sapiens
MGKGDPKKPRGKMSSYAFFVQTCREEHKKKHPDASVNFSEFSKKCSERWKTMSAKEKGKFEDMAKADKARYEREMKTYIPPKGETKKKFKDPNAPKRPPSAFFLFCSEYRPKIKGEHPGLSIGDVAKKLGEMWNNTAADDKQPYEKKAAKLKEKYEKDIAAYRAKGKPDAAKKGVVKAEKSKKKKEEEEDEEDEEDEEEEEDEEDEDEEEDDDDE

SEQ ID NO: 49081 - protein, 215 aa, Homo sapiens; identical to SEQ ID NO: 49080

SEQ ID NO: 49082 - protein, 97 aa, Homo sapiens
MGKGDPKKPRGKMSSYAFFVQTCREEHKKKHPDASVNFSEFSKKCSERWKTMSAKEKGKFEDMAKADKARYEREMKTYIPPKGETKKKFKDPNAPKR

SEQ ID NO: 49083 - protein, 158 aa, Homo sapiens; identical to SEQ ID NO: 49079

SEQ ID NO: 49084 - protein, 215 aa, Homo sapiens; identical to SEQ ID NO: 49080

SEQ ID NO: 49085 - protein, 215 aa, Homo sapiens; identical to SEQ ID NO: 49080

SEQ ID NO: 49086 - protein, 162 aa, Homo sapiens
MGKGDPKKPRGKMSSYAFFVQTCREEHKKKHPDASVNFSEFSKKCSERWKTMSAKEKGKFEDMAKADKARYEREMKTYIPPKGETKKKFKDPNAPKRPPSAFFLFCSEYRPKIKGEHPGLSIGDVAKKLGEMWNNTAADDKQPYEKILLHIELKESLMQQKR

SEQ ID NO: 49087 - protein, 209 aa, Homo sapiens
MGKGDPNKPRGKMSSYAFFVQTCREEHKKKHPDSSVNFAEFSKKCSERWKTMSAKEKSKFEDMAKSDKARYDREMKNYVPPKGDKKGKKKDPNAPKRPPSAFFLFCSEHRPKIKSEHPGLSIGDTAKKLGEMWSEQSAKDKQPYEQKAAKLKEKYEKDIAAYRAKGKSEAGKKGPGRPTGSKKKNEPEDEEEEEEEEDEDEEEEDEDEE

SEQ ID NO: 49088 - protein, 209 aa, Homo sapiens; identical to SEQ ID NO: 49087

SEQ ID NO: 49089 - protein, 209 aa, Homo sapiens; identical to SEQ ID NO: 49087

SEQ ID NO: 49090 - protein, 134 aa, Homo sapiens
MGKGDPNKPRGKMSSYAFFVQTCREEHKKKHPDSSVNFAEFSKKCSERWKTMSAKEKSKFEDMAKSDKARYDREMKNYVPPKGDKKGKKKDPNAPKRPPSAFFLFCSEHRPKIKSEHPGLSIGDTAKKLGEMWS

SEQ ID NO: 49091 - protein, 200 aa, Homo sapiens
MAKGDPKKPKGKMSAYAFFVQTCREEHKKKNPEVPVNFAEFSKKCSERWKTMSGKEKSKFDEMAKADKVRYDREMKDYGPAKGGKKKKDPNAPKRPPSGFFLFCSEFRPKIKSTNPGISIGDVAKKLGEMWNNLNDSEKQPYITKAAKLKEKYEKDVADYKSKGKFDGAKGPAKVARKKVEEEDEEEEEEEEEEEEEEDE

SEQ ID NO: 49092 - protein, 188 aa, Homo sapiens
MAKGDPKKPKGKMSAYAFFVQTCREEHKKKNPEVPVNFAEFSKKCSERWKTMSGKEKSKFDEMAKADKVRYDREMKDYGPAKGGKKKKDPNAPKRPPSGFFLFCSEFRPKIKSTNPGISIGDVAKKLGEMWNNLNDSEKQPYITKAAKLKEKYEKDVADYKSKGKFDGAKGPAKVARKKVEEEDEEEE

SEQ ID NO: 49093 - protein, 153 aa, Homo sapiens
MAKGDPKKPKGKMSAYAFFVQTCREEHKKKNPEVPVNFAEFSKKCSERWKTMSGKEKSKFDEMAKADKVRYDREMKDYGPAKGGKKKKDPNAPKRPPSGFFLFCSEFRPKIKSTNPGISIGDVAKKLGEMWNNLNDSEKQPYITKAAKLKEKY

SEQ ID NO: 49094 - protein, 200 aa, Homo sapiens; identical to SEQ ID NO: 49091

SEQ ID NO: 49095 - protein, 193 aa, Homo sapiens
MAKGDPKKPKGKMSAYAFFVQTCREEHKKKNPEVPVNFAEFSKKCSERWKTMSGKEKSKFDEMAKADKVRYDREMKDYGPAKGGKKKKDPNAPKRPPSGFFLFCSEFRPKIKSTNPGISIGDVAKKLGEMWNNLNDSEKQPYITKAAKLKEKYEKDVADYKSKGKFDGAKGPAKVARKKVEEEDEEEEEEEEE

SEQ ID NO: 49096 - protein, 90 aa, Homo sapiens
MPKRKAEGDAKGDKAKVKDEPQRRSARLSAKPAPPKPEPKPKKAPAKKGEKVPKGKKGKADAGKEGNNPAENGDAKTDQAQKAEGAGDAK

SEQ ID NO: 49097 - protein, 77 aa, Homo sapiens
MPKRKSPENTEGKDGSKVTKQEPTRRSARLSAKPAPPKPEPKPRKTSAKKEPGAKISRGAKGKKEEKQEAGKEGTEN

SEQ ID NO: 49098 - protein, 99 aa, Homo sapiens
MPKRKSPENTEGKDGSKVTKQEPTRRSARLSAKPAPPKPEPKPRKTSAKKEPGAKISRGAKGKKEEKQEAGKEGTAPSENGETKAEEAQKTESVDNEGE

SEQ ID NO: 49099 - protein, 168 aa, Homo sapiens
MVLFFRINLQTKKCKQKGKGEQRENRPKWLTKKLKKTYLRKTGKRRLRRVQPLMKQERKKPSLINNHIPCLISGPCLPSCTIQRNIFINYFVNASFLVALETFLRRRESHLIPFFKCKCFFLRGEIICWLFIFWYNQKIVWDIELWEALTVSGVSLTFHRWGVSFYIL

SEQ ID NO: 49100 - protein, 100 aa, Homo sapiens
MPKRKVSSAEGAAKEEPKRRSARLSAKPPAKVEAKPKKAAAKDKSSDKKVQTKGKRGAKGKQAEVANQETKEDLPAENGETKTEESPASDEAGEKEAKSD

SEQ ID NO: 49101 - protein, 193 aa, Homo sapiens
MGKQNSKLRPEMLQDLRENTEFSELELQEWYKGFLKDCPTGILNVDEFKKIYANFFPYGDASKFAEHVFRTFDTNSDGTIDFREFIIALSVTSRGRLEQKLMWAFSMYDLDGNGYISREEMLEIVQAIYKMVSSVMKMPEDESTPEKRTEKIFRQMDTNNDGKLSLEEFIRGAKSDPSIVRLLQCDPSSASQF

SEQ ID NO: 49102 - protein, 193 aa, Homo sapiens
MGKQNSKLRPEVLQDLRENTEFTDHELQEWYKGFLKDCPTGHLTVDEFKKIYANFFPYGDASKFAEHVFRTFDTNGDGTIDFREFIIALSVTSRGKLEQKLKWAFSMYDLDGNGYISRSEMLEIVQAIYKMVSSVMKMPEDESTPEKRTDKIFRQMDTNNDGKLSLEEFIRGAKSDPSIVRLLQCDPSSASQF

SEQ ID NO: 49103 - protein, 193 aa, Homo sapiens; identical to SEQ ID NO: 49102

SEQ ID NO: 49104 - protein, 30 aa, Homo sapiens
MGKQNSKLRPEVLQDLRENTEFTDHELQEW

SEQ ID NO: 49105 - protein, 1017 aa, Homo sapiens
MKLLKPTWVNHNGKPIFSVDIHPDGTKFATGGQGQDSGKVVIWNMSPVLQEDDEKDENIPKMLCQMDNHLACVNCVRWSNSGMYLASGGDDKLIMVWKRATYIGPSTVFGSSGKLANVEQWRCVSILRNHSGDVMDVAWSPHDAWLASCSVDNTVVIWNAVKFPEILATLRGHSGLVKGLTWDPVGKYIASQADDRSLKVWRTLDWQLETSITKPFDECGGTTHVLRLSWSPDGHYLVSAHAMNNSGPTAQIIEREGWKTNMDFVGHRKAVTVVKFNPKIFKKKQKNGSSAKPSCPYCCCAVGSKDRSLSVWLTCLKRPLVVIHELFDKSIMDISWTLNGLGILVCSMDGSVAFLDFSQDELGDPLSEEEKSRIHQSTYGKSLAIMTEAQLSTAVIENPEMLKYQRRQQQQQLDQKSAATREMGSATSVAGVVNGESLEDIRKNLLKKQVETRTADGRRRITPLCIAQLDTGDFSTAFFNSIPLSGSLAGTMLSSHSSPQLLPLDSSTPNSFGASKPCTEPVVAASARPAGDSVNKDSMNATSTPAALSPSVLTTPSKIEPMKAFDSRFTERSKATPGAPALTSMTPTAVERLKEQNLVKELRPRDLLESSSDSDEKVPLAKASSLSKRKLELEVETVEKKKKGRPRKDSRLMPVSLSVQSPAALTAEKEAMCLSAPALALKLPIPSPQRAFTLQVSSDPSMYIEVENEVTVVGGVKLSRLKCNREGKEWETVLTSRILTAAGSCDVVCVACEKRMLSVFSTCGRRLLSPILLPSPISTLHCTGSYVMALTAAATLSVWDVHRQVVVVKEESLHSILAGSDMTVSQILLTQHGIPVMNLSDGKAYCFNPSLSTWNLVSDKQDSLAQCADFRSSLPSQDAMLCSGPLAIIQGRTSNSGRQAARLFSVPHVVQQETTLAYLENQVAAALTLQSSHEYRHWLLVYARYLVNEGFEYRLREICKDLLGPVHYSTGSQWESTVVGLRKRELLKELLPVIGQNLRFQRLFTECQEQLDILRDK

SEQ ID NO: 49106 - protein, 810 aa, Homo sapiens
MKLLKPTWVNHNGKPIFSVDIHPDGTKFATGGQGQDSGKVVIWNMSPVLQEDDEKDENIPKMLCQMDNHLACVNCVRWSNSGMYLASGGDDKLIMVWKRATYIGPSTVFGSSGKLANVEQWRCVSILRNHSGDVMDVAWSPHDAWLASCSVDNTVVIWNAVKFPEILATLRGHSGLVKGLTWDPVGKYIASQADDRSLKVWRTLDWQLETSITKPFDECGGTTHVLRLSWSPDGHYLVSAHAMNNSGPTAQIIEREGWKTNMDFVGHRKAVTVVKFNPKIFKKKQKNGSSAKPSCPYCCCAVGSKDRSLSVWLTCLKRPLVVIHELFDKSIMDISWTLNGLGILVCSMDGSVAFLDFSQDELGDPLSEEEKSRIHQSTYGKSLAIMTEAQLSTAVIENPEMLKYQRRQQQQQLDQKSAATREMGSATSVAGVVNGESLEDIRKNLLKKQVETRTADGRRRITPLCIAQLDTGDFSTAFFNSIPLSGSLAGTMLSSHSSPQLLPLDSSTPNSFGASKPCTEPVVAASARPAGDSVNKDSMNATSTPAALSPSVLTTPSKIEPMKAFDSRFTERSKATPGAPALTSMTPTAVERDVHRQVVVVKEESLHSILAGSDMTVSQILLTQHGIPVMNLSDGKAYCFNPSLSTWNLVSDKQDSLAQCADFRSSLPSQDAMLCSGPLAIIQGRTSNSGRQAARLFSVPHVVQQETTLAYLENQVAAALTLQSSHEYRHWLLVYARYLVNEGFEYRLREICKDLLGPVHYSTGSQWESTVVGLRKRELLKELLPVIGQNLRFQRLFTECQEQLDILRDK

SEQ ID NO: 49107 - protein, 604 aa, Homo sapiens
MLSSHSSPQLLPLDSSTPNSFGASKPCTEPVVAASARPAGDSVNKDSMNATSTPAALSPSVLTTPSKIEPMKAFDSRFTERSKATPGAPALTSMTPTAVERLKEQNLVKELRPRDLLESSSDSDEKVPLAKASSLSKRKLELEVETVEKKKKGRPRKDSRLMPVSLSVQSPAALTAEKEAMCLSAPALALKLPIPSPQRAFTLQVSSDPSMYIEVENEVTVVGGVKLSRLKCNREGKEWETVLTSRILTAAGSCDVVCVACEKRMLSVFSTCGRRLLSPILLPSPISTLHCTGSYVMALTAAATLSVWDVHRQVVVVKEESLHSILAGSDMTVSQILLTQHGIPVMNLSDGKAYCFNPSLSTWNLVSDKQDSLAQCADFRSSLPSQDAMLCSGPLAIIQGRTSNSGRQAARLFSVPHVVQQETTLAYLENQVAAALTLQSSHEYRHWLLVYARYLVNEGSAEEGAAEGAATSHRAEPPIPAPLHRVSGTARHPEGQVACPSLPWLQQGQGHTLAADDMQDRLSPDQAVGGGDTGRRCAVLHQRQPSSLGRCALCPGSDIASGGGSSSLPPSPRCGARAGALPRCPGASKAVPGLPSPARPQGGH

SEQ ID NO: 49108 - protein, 973 aa, Homo sapiens [sequence omitted]

SEQ ID NO: 49109 - protein, 806 aa, Homo sapiens
MSPVLQEDDEKDENIPKMLCQMDNHLACVNCVRWSNSGMYLASGGDDKLIMVWKRATYIGPSTVFGSSGKLANVEQWRCVSILRNHSGDVMDVAWSPHDAWLASCSVDNTVVIWNAVKFPEILATLRGHSGLVKGLTWDPVGKYIASQADDRSLKVWRTLDWQLETSITKPFDECGGTTHVLRLSWSPDGHYLVSAHAMNNSGPTAQIIEREGWKTNMDFVGHRKAVTVVKFNPKIFKKKQKNGSSAKPSCPYCCCAVGSKDRSLSVWLTCLKRPLVVIHELFDKSIMDISWTLNGLGILVCSMDGSVAFLDFSQDELGDPLSEEEKSRIHQSTYGKSLAIMTEAQLSTAVIENPEMLKYQRRQQQQQLDQKSAATREMGSATSVAGVVNGESLEDIRKNLLKKQVETRTADGRRRITPLCIAQLDTGDFSTAFFNSIPLSGSLAGTMLSSHSSPQLLPLDSSTPNSFGASKPCTEPVVAASARPAGDSVNKDSMNATSTPAALSPSVLTTPSKIEPMKAFDSRFTERSKATPGAPALTSMTPTAVERLKEQNLVKELRPRDLLESSSDSDEKVPLAKASSLSKRKLELEVETVEKKKKGRPRKDSRLMPVSLSVQSPAALTAEKEAMCLSAPALALKLPIPSPQRAFTLQVSSDPSMYIEVENEVTVVGGVKLSRLKCNREGKEWETVLTSRILTAAGSCDVVCVACEKRMLSVFSTCGRRLLSPILLPSPISTLHCTGSYVMALTAAATLSVWDVHRQVVVVKEESLHSILAGTWFLTSRTHWLSVQTLGAACHPRTPCCAQDR

SEQ ID NO: 49110 - protein, 51 aa, Homo sapiens
MASSMRSLFSDHGKYVESFRRFLNHSTEHQCMQEFMDKKLPGIIGRYQNCC

SEQ ID NO: 49111 - protein, 292 aa, Homo sapiens
MASSMRSLFSDHGKYVESFRRFLNHSTEHQCMQEFMDKKLPGIIGRIGDTKSEIKILSIGGGAGEIDLQILSKVQAQYPGVCINNEVVEPSAEQIAKYKELVAKTSNLENVKFAWHKETSSEYQSRMLEKKELQKWDFIHMIQMLYYVKDIPATLKFFHSLLGTNAKMLIIVVSGSSGWDKLWKKYGSRFPQDDLCQYITSDDLTQMLDNLGLKYECYDLLSTMDISDCFIDGNENGDLLWDFLTETCNFNATAPPDLRAELGKDLQEPEFSAKKEGKVLFNNTLSFIVIEA

SEQ ID NO: 49112 - protein, 126 aa, Homo sapiens
MASSMRSLFSDHGKYVESFRRFLNHSTEHQCMQEFMDKKLPGIIGRIGDTKSEIKILSIGGGADCLIRGSSRVLKRNSCFILCSTRQKDKPGMRIHDERSSELPFGAARLESKSAFPSFLVSFILF

SEQ ID NO: 49113 - protein, 292 aa, Homo sapiens; identical to SEQ ID NO: 49111

SEQ ID NO: 49114 - protein, 487 aa, Homo sapiens
MSLPNSSCLLEDKMCEGNKTTMASPQLMPLVVVLSTICLVTVGLNLLVLYAVRSERKLHTVGNLYIVSLSVADLIVGAVVMPMNILYLLMSKWSLGRPLCLFWLSMDYVASTASIFSVFILCIDRYRSVQQPLRYLKYRTKTRASATILGAWFLSFLWVIPILGWNHFMQQTSVRREDKCETDFYDVTWFKVMTAIINFYLPTLLMLWFYAKIYKAVRQHCQHRELINRSLPSFSEIKLRPENPKGDAKKPGKESPWEVLKRKPKDAGGGSVLKSPSQTPKEMKSPVVFSQEDDREVDKLYCFPLDIVHMQAAAEGSSRDYVAVNRSHGQLKTDEQGLNTHGASEISEDQMLGDSQSFSRTDSDTTTETAPGKGKLRSGSNTGLDYIKFTWKRLRSHSRQYVSGLHMNRERKAAKQLGFIMAAFILCWIPYFIFFMVIAFCKNCCNEHLHMFTIWLGYINSTLNPLIYPLCNENFKKTFKRILHIRS

SEQ ID NO: 49115 - protein, 12 aa, Homo sapiens
MSLPNSSCLLED

SEQ ID NO: 49116 - protein, 487 aa, Homo sapiens; identical to SEQ ID NO: 49114

SEQ ID NO: 49117 - protein, 487 aa, Homo sapiens; identical to SEQ ID NO: 49114

SEQ ID NO: 49118 - protein, 359 aa, Homo sapiens
MAPNGTASSFCLDSTACKITITVVLAVLILITVAGNVVVCLAVGLNRRLRNLTNCFIVSLAITDLLLGLLVLPFSAIYQLSCKWSFGKVFCNIYTSLDVMLCTASILNLFMISLDRYCAVMDPLRYPVLVTPVRVAISLVLIWVISITLSFLSIHLGWNSRNETSKGNHTTSKCKVQVNEVYGLVDGLVTFYLPLLIMCITYYRIFKVARDQAKRINHISSWKAATIREHKATVTLAAVMGAFIICWFPYFTAFVYRGLRGDDAINEVLEAIVLWLGYANSALNPILYAALNRDFRTGYQQLFCCRLANRNSHKTSLRSNASQLSRTQSREPRQQEEKPLKLQVWSGTEVTAPQGATDR

SEQ ID NO: 49119 - protein, 397 aa, Homo sapiens
MAPNGTASSFCLDSTACKITITVVLAVLILITVAGNVVVCLAVGLNRRLRNLTNCFIVSLAITDLLLGLLVLPFSAIYQLSCKWSFGKVFCNIYTSLDVMLCTASILNLFMISLDRYCAVMDPLRYPVLVTPVRVAISLVLIWVISITLSFLSIHLGWNSRNETSKGNHTTSKCKVQVNEVYGLVDGLVTFYLPLLIMCITYYRIFKVARDQAKRINHISSWKAATIREHKATVTLAAVMGAFIICWFPYFTAFVYRGLRGDDAINEVLEAIVLWLGYANSALNPILYAALNRDFRTGYQQLFCCRLANRNSHKTSLRSNASQLSRTQSREPRQQEEKPLKLQVWSGTEVTAPQGATDRPWLCLPECWSVELTHSFIHLFIHSFANIHPIPTTCQEL

SEQ ID NO: 49120 - protein, 390 aa, Homo sapiens
MPDTNSTINLSLSTRVTLAFFMSLVAFAIMLGNALVILAFVVDKNLRHRSSYFFLNLAISDFFVGVISIPLYIPHTLFEWDFGKEICVFWLTTDYLLCTASVYNIVLISYDRYLSVSNAVSYRTQHTGVLKIVTLMVAVWVLAFLVNGPMILVSESWKDEGSECEPGFFSEWYILAITSFLEFVIPVILVAYFNMNIYWSLWKRDHLSRCQSHPGLTAVSSNICGHSFRGRLSSRRSLSASTEVPASFHSERQRRKSSLMFSSRTKMNSNTIASKMGSFSQSDSVALHQREHVELLRARRLAKSLAILLGVFAVCWAPYSLFTIVLSFYSSATGPKSVWYRIAFWLQWFNSFVNPLLYPLCHKRFQKAFLKIFCIKKQPLPSQHSRSVSS

SEQ ID NO: 49121 - protein, 302 aa, Homo sapiens
MPDTNSTINLSLSTRVTLAFFMSLVAFAIMLGNALVILAFVVDKNLRHRSSYFFLNLAISDFFVVSESWKDEGSECEPGFFSEWYILAITSFLEFVIPVILVAYFNMNIYWSLWKRDHLSRCQSHPGLTAVSSNICGHSFRGRLSSRRSLSASTEVPASFHSERQRRKSSLMFSSRTKMNSNTIASKMGSFSQSDSVALHQREHVELLRARRLAKSLAILLGVFAVCWAPYSLFTIVLSFYSSATGPKSVWYRIAFWLQWFNSFVNPLLYPLCHKRFQKAFLKIFCIKKQPLPSQHSRSVSS

SEQ ID NO: 49122 - protein, 57 aa, Homo sapiens
MKFFVFALVLALMISMISADSHEKRHHGYRRKFHEKHHSHREFPFYGDYGSNYLYDN

SEQ ID NO: 49123 - protein, 57 aa, Homo sapiens; identical to SEQ ID NO: 49122

SEQ ID NO: 49124 - protein, 51 aa, Homo sapiens
MKFFVFALILALMLSMTGADSHAKRHHGYKRKFHEKHHSHRGYRSNYLYDN

SEQ ID NO: 49125 - protein, 51 aa, Homo sapiens; identical to SEQ ID NO: 49124

SEQ ID NO: 49126 - protein, 662 aa, Homo sapiens
MMEPEEYRERGREMVDYICQYLSTVRERRVTPDVQPGYLRAQLPESAPEDPDSWDSIFGDIERIIMPGVVHWQSPHMHAYYPALTSWPSLLGDMLADAINCLGFTWASSPACTELEMNVMDWLAKMLGLPEHFLHHHPSSQGGGVLQSTVSESTLIALLAARKNKILEMKTSEPDADESCLNARLVAYASDQAHSSVEKAGLISLVKMKFLPVDDNFSLRGEALQKAIEEDKQRGLVPVFVCATLGTTGVCAFDCLSELGPICAREGLWLHIDAAYAGTAFLCPEFRGFLKGIEYADSFTFNPSKWMMVHFDCTGFWVKDKYKLQQTFSVNPIYLRHANSGVATDFMHWQIPLSRRFRSVKLWFVIRSFGVKNLQAHVRHGTEMAKYFESLVRNDPSFEIPAKRHLGLVVFRLKGPNCLTENVLKEIAKAGRLFLIPATIQDKLIIRFTVTSQFTTRDDILRDWNLIRDAATLILSQHCTSQPSPRVGNLISQIRGARAWACGTSLQSVSGAGDDPVQARKIIKQPQRVGAGPMKRENGLHLETLLDPVDDCFSEEAPDATKHKLSSFLFSYLSVQTKKKTVRSLSCNSVPVSAQKPLPTEASVKNGGSSRVRIFSRFPEDMMMLKKSAFKKLIKFYSVPSFPECSSQCGLQLPCCPLQAMV

SEQ ID NO: 49127 - protein, 699 aa, Homo sapiens
MGHHRPWLHASVLWAGVASLLLPPAMTQQLRGDGLGFRNRNNSTGVAGLSEEASAELRHHLHSPRDHPDENKDVSTENGHHFWSHPDREKEDEDVSKEYGHLLPGHRSQDHKVGDEGVSGEEVFAEHGGQARGHRGHGSEDTEDSAEHRHHLPSHRSHSHQDEDEDEVVSSEHHHHILRHGHRGHDGEDDEGEEEEEEEEEEEEASTEYGHQAHRHRGHGSEEDEDVSDGHHHHGPSHRHQGHEEDDDDDDDDDDDDDDDDVSIEYRHQAHRHQGHGIEEDEDVSDGHHHRDPSHRHRSHEEDDNDDDDVSTEYGHQAHRHQDHRKEEVEAVSGEHHHHVPDHRHQGHRDEEEDEDVSTERWHQGPQHVHHGLVDEEEEEEEITVQFGHYVASHQPRGHKSDEEDFQDEYKTEVPHHHHHRVPREEDEEVSAELGHQAPSHRQSHQDEETGHGQRGSIKEMSHHPPGHTVVKDRSHLRKDDSEEEKEKEEDPGSHEEDDESSEQGEKGTHHGSRDQEDEEDEEEGHGLSLNQEEEEEEDKEEEEEEEDEERREERAEVGAPLSPDHSEEEEEEEEGLEEDEPRFTIIPNPLDRREEAGGASSEEESGEDTGPQDAQEYGNYQPGSLCGYCSFCNRCTECESCHCDEENMGEHCDQCQHCQFCYLCPLVCETVCAPGSYVDYFSSSLYQALADMLETPEP

SEQ ID NO: 49128 - protein, 389 aa, Homo sapiens
EDDNDDDDVSTEYGHQAHRHQDHRKEEVEAVSGEHHHHVPDHRHQGHRDEEEDEDVSTERWHQGPQHVHHGLVDEEEEEEEITVQFGHYVASHQPRGHKSDEEDFQDEYKTEVPHHHHHRVPREEDEEVSAELGHQAPSHRQSHQDEETGHGQRGSIKEMSHHPPGHTVVKDRSHLRKDDSEEEKEKEEDPGSHEEDDESSEQGEKGTHHGSRDQEDEEDEEEGHGLSLNQEEEEEEDEERREERAEVGAPLSPDHSEEEEEEEEGLEEDEPRFTIIPNPLDRREEAGGASSEEESGEDTGPQDAQEYGNYQPGSLCGYCSFCNRCTECESCHCDEENMGEHCDQCQHCQFCYLCPLVCETVCAPGSYVDYFSSSLYQALADMLETPEP

SEQ ID NO: 49129 - protein, 454 aa, Homo sapiens
MGHHRPWLHASVLWAGVASLLLPPAMTQQLRGDGLGFRNRNKDVSTENGHHFWSHPDREKEDEDVSKEYGHLLPGHRSQDHKVGDEGVSGEEVFAEHGGQARGHRGHGSEDTEDSAEHRHHLPSHRSHSHQDEDEDEVVSSEHHHHILRHGHRGHDGEDDEGEEEEEEEEEEEEASTEYGHQAHRHRGHGSEEDEDVSDGHHHHGPSHRHQGHEEDDDDDDDDDDDDDDDDVSIEYRHQAHRHQGHGIEEDEDVSDGHHHRDPSHRHRSHEEDDNDDDDVSTEYGHQAHRHQDHRKEEVEAVSGEHHHHVPDHRHQGHRDEEEDEDVSTERWHQGPQHVHHGLVDEEEEEEEITVQFGHYVASHQPRGHKSDEEDFQDEYKTEVPHHHHHRVPREEDEEVSAELGHQAPSHRQSHQDEETGHGQRGSIKEMSHHPPGHTVVKDRSHLRKDDSEE

SEQ ID NO: 49130 - protein, 126 aa, Homo sapiens
MADEIAKAQVARPGGDTIFGKIIRKEIPAKIIFEDDRCLAFHDISPQAPTHFLVIPKKHISQISVAEDDDESLLGHLMIVGKKCAADLGLNKGYRMVVNEGSDGGQSVYHVHLHVLGGRQMHWPPG

SEQ ID NO: 49131 - protein, 163 aa, Homo sapiens
MAAAVVLAAGLRAARRAVAATGVRGGQVRGAAGVTDGNEVAKAQQATPGGAAPTIFSRILDKSLPADILYEDQQCLVFRDVAPQAPVHFLVIPKKPIPRISQAEEEDQQLLGHLLLVAKQTAKAEGLGDGYRLVINDGKLGAQSVYHLHIHVLGGRQLQWPPG

SEQ ID NO: 49132 - protein, 182 aa, Homo sapiens
MAEEQVNRSAGLAPDCEASATAETTVSSVGTCEAAGKSPEPKDYDSTCVFCRIAGRQDPGTELLHCENEDLICFKDIKPAATHHYLVVPKKHIGNCRTLRKDQVELVENMVTVGKTILERNNFTDFTNVRMGFHMPPFCSISHLHLHVLAPVDQLGFLSKLVYRVNSYWFITADHLIEKLRT

SEQ ID NO: 49133 - protein, 525 aa, Homo sapiens
MKALIAALLLITLQYSCAVSPTDCSAVEPEAEKALDLINKRRRDGYLFQLLRIADAHLDRVENTTVYYLVLDVQESDCSVLSRKYWNDCEPPDSRRPSEIVIGQCKVIATRHSHESQDLRVIDFNCTTSSVSSALANTKDSPVLIDFFEDTERYRKQANKALEKYKEENDDFASFRVDRIERVARVRGGEGTGYFVDFSVRNCPRHHFPRHPNVFGFCRADLFYDVEALDLESPKNLVINCEVFDPQEHENINGVPPHLGHPFHWGGHERSSTTKPPFKPHGSRDHHHPHKPHEHGPPPPPDERDHSHGPPLPQGPPPLLPMSCSSCQHATFGTNGAQRHSHNNNSSDLHPHKHHSHEQHPHGHHPHAHHPHEHDTHRQHPHGHHPHGHHPHGHHPHGHHPHGHHPHCHDFQDYGPCDPPPHNQGHCCHGHGPPPGHLRRRGPGKGPRPFHCRQIGSVYRLPPLRKGEVLPLPEANFPSFPLPHHKHPLKPDNQPFPQSVSESCPGKFKSGFPQVSMFFTHTFPK

SEQ ID NO: 49134 - protein, 435 aa, Homo sapiens
MAERAALEELVKLQGERVRGLKQQKASAELIEEEVAKLLKLKAQLGPDESKQKFVLKTPKGTRDYSPRQMAVREKVFDVIIRCFKRHGAEVIDTPVFELKDFDIAGNFDPMIPDAECLKIMCEILSSLQIGDFLVKVNDRRILDGMFAICGVSDSKFRTICSSVDKLDKVSWEEVKNEMVGEKGLAPEVADRIGDYVQQHGGVSLVEQLLQDPKLSQNKQALEGLGDLKLLFEYLTLFGIDDKISFDLSLARGLDYYTGVIYEAVLLQTPAQAGEEPLGVGSVAAGGRYDGLVGMFDPKGRKVPCVGLSIGVERIFSIVEQRLEALEEKIRTTETQVLVASAQKKLLEERLKLVSELWDAGIKAELLYKKNPKLLNQLQYCEEAGIPLVAIIGEQELKDGVIKLRSVTSREEVDVRREDLVEEIKRRTGQPLCIC

SEQ ID NO: 49135 - protein, 395 aa, Homo sapiens
MAERAALEELVKLQGERVRGLKQQKASAELIEEEVAKLLKLKAQLGPDESKQKFVLKTPKDFDIAGNFDPMIPDAECLKIMCEILSSLQIGDFLVKVNDRRILDGMFAICGVSDSKFRTICSSVDKLDKVSWEEVKNEMVGEKGLAPEVADRIGDYVQQHGGVSLVEQLLQDPKLSQNKQALEGLGDLKLLFEYLTLFGIDDKISFDLSLARGLDYYTGVIYEAVLLQTPAQAGEEPLGVGSVAAGGRYDGLVGMFDPKGRKVPCVGLSIGVERIFSIVEQRLEALEEKIRTTETQVLVASAQKKLLEERLKLVSELWDAGIKAELLYKKNPKLLNQLQYCEEAGIPLVAIIGEQELKDGVIKLRSVTSREEVDVRREDLVEEIKRRTGQPLCIC

SEQ ID NO: 49136 - protein, 469 aa, Homo sapiens
MAERAALEELVKLQGERVRGLKQQKASAELIEEEVAKLLKLKAQLGPDESKQKFVLKTPKETLMGKYGEDSKLIYDLKDQGGELLSLRYDLTVPFARYLAMNKLTNIKRYHIAKVYRRDNPAMTRGRYREFYQCDFDIAGNFDPMIPDAECLKIMCEILSSLQIGDFLVKVNDRRILDGMFAICGVSDSKFRTICSSVDKLDKVSWEEVKNEMVGEKGLAPEVADRIGDYVQQHGGVSLVEQLLQDPKLSQNKQALEGLGDLKLLFEYLTLFGIDDKISFDLSLARGLDYYTGVIYEAVLLQTPAQAGEEPLGVGSVAAGGRYDGLVGMFDPKGRKVPCVGLSIGVERIFSIVEQRLEALEEKIRTTETQVLVASAQKKLLEERLKLVSELWDAGIKAELLYKKNPKLLNQLQYCEEAGIPLVAIIGEQELKDGVIKLRSVTSREEVDVRREDLVEEIKRRTGQPLCIC

SEQ ID NO: 49137 - protein, 314 aa, Homo sapiens
MTRGRYREFYQCDFDIAGNFDPMIPDAECLKIMCEILSSLQIGDFLVKVSWEEVKNEMVGEKGLAPEVADRIGDYVQQHGGVSLVEQLLQDPKLSQNKQALEGLGDLKLLFEYLTLFGIDDKISFDLSLARGLDYYTGVIYEAVLLQTPAQAGEEPLGVGSVAAGGRYDGLVGMFDPKGRKVPCVGLSIGVERIFSIVEQRLEALEEKIRTTETQVLVASAQKKLLEERLKLVSELWDAGIKAELLYKKNPKLLNQLQYCEEAGIPLVAIIGEQELKDGVIKLRSVTSREEVDVRREDLVEEIKRRTGQPLCIC

SEQ ID NO: 49138 - protein, 509 aa, Homo sapiens
MAERAALEELVKLQGERVRGLKQQKASAELIEEEVAKLLKLKAQLGPDESKQKFVLKTPKGTRDYSPRQMAVREKVFDVIIRCFKRHGAEVIDTPVFELKETLMGKYGEDSKLIYDLKDQGGELLSLRYDLTVPFARYLAMNKLTNIKRYHIAKVYRRDNPAMTRGRYREFYQCDFDIAGNFDPMIPDAECLKIMCEILSSLQIGDFLVKVNDRRILDGMFAICGVSDSKFRTICSSVDKLDKVSWEEVKNEMVGEKGLAPEVADRIGDYVQQHGGVSLVEQLLQDPKLSQNKQALEGLGDLKLLFEYLTLFGIDDKISFDLSLARGLDYYTGVIYEAVLLQTPAQAGEEPLGVGSVAAGGRYDGLVGMFDPKGRKVPCVGLSIGVERIFSIVEQRLEALEEKIRTTETQVLVASAQKKLLEERLKLVSELWDAGIKAELLYKKNPKLLNQLQYCEEAGIPLVAIIGEQELKDGVIKLRSVTSREEVDVRREDLVEEIKRRTGQPLCIC

SEQ ID NO: 49139 - protein, 440 aa, Homo sapiens
MAVREKVFDVIIRCFKRHGAEVIDTPVFELKETLMGKYGEDSKLIYDLKDQGGELLSLRYDLTVPFARYLAMNKLTNIKRYHIAKVYRRDNPAMTRGRYREFYQCDFDIAGNFDPMIPDAECLKIMCEILSSLQIGDFLVKVNDRRILDGMFAICGVSDSKFRTICSSVDKLDKVSWEEVKNEMVGEKGLAPEVADRIGDYVQQHGGVSLVEQLLQDPKLSQNKQALEGLGDLKLLFEYLTLFGIDDKISFDLSLARGLDYYTGVIYEAVLLQTPAQAGEEPLGVGSVAAGGRYDGLVGMFDPKGRKVPCVGLSIGVERIFSIVEQRLEALEEKIRTTETQVLVASAQKKLLEERLKLVSELWDAGIKAELLYKKNPKLLNQLQYCEEAGIPLVAIIGEQELKDGVIKLRSVTSREEVDVRREDLVEEIKRRTGQPLCIC

SEQ ID NO: 49140 - protein, 288 aa, Homo sapiens
MAERAALEELVKLQGERVRGLKQQKASAELIEEEVAKLLKLKAQLGPDESKQKFVLKTPKGTRDYSPRQMAVREKVFDVIIRCFKRHGAEVIDTPVFELKVNDRRILDGMFAICGVSDSKFRTICSSVDKLDKVSWEEVKNEMVGEKGLAPEVADRIGDYVQQHGGVSLVEQLLQDPKLSQNKQALEGLGDLKLLFEYLTLFGIDDKISFDLSLARGLDYYTGVIYEAVLLQTPAQAGEEPLGVGSVAAGGRYDGLVGMFDPKGRKVPCVGLSIGVERIFSIVEQRLE

SEQ ID NO: 49141 - protein, 449 aa, Homo sapiens
MAERAALEELVKLQGERVRGLKQQKASAELIEEEVAKLLKLKAQLGPDESKQKFVLKTPKETLMGKYGEDSKLIYDLKDQGGELLSLRYDLTVPFARYLAMNKLTNIKRYHIAKDFDIAGNFDPMIPDAECLKIMCEILSSLQIGDFLVKVNDRRILDGMFAICGVSDSKFRTICSSVDKLDKVSWEEVKNEMVGEKGLAPEVADRIGDYVQQHGGVSLVEQLLQDPKLSQNKQALEGLGDLKLLFEYLTLFGIDDKISFDLSLARGLDYYTGVIYEAVLLQTPAQAGEEPLGVGSVAAGGRYDGLVGMFDPKGRKVPCVGLSIGVERIFSIVEQRLEALEEKIRTTETQVLVASAQKKLLEERLKLVSELWDAGIKAELLYKKNPKLLNQLQYCEEAGIPLVAIIGEQELKDGVIKLRSVTSREEVDVRREDLVEEIKRRTGQPLCIC

SEQ ID NO: 49142 - protein, 489 aa, Homo sapiens
MAERAALEELVKLQGERVRGLKQQKASAELIEEEVAKLLKLKAQLGPDESKQKFVLKTPKGTRDYSPRQMAVREKVFDVIIRCFKRHGAEVIDTPVFELKETLMGKYGEDSKLIYDLKDQGGELLSLRYDLTVPFARYLAMNKLTNIKRYHIAKDFDIAGNFDPMIPDAECLKIMCEILSSLQIGDFLVKVNDRRILDGMFAICGVSDSKFRTICSSVDKLDKVSWEEVKNEMVGEKGLAPEVADRIGDYVQQHGGVSLVEQLLQDPKLSQNKQALEGLGDLKLLFEYLTLFGIDDKISFDLSLARGLDYYTGVIYEAVLLQTPAQAGEEPLGVGSVAAGGRYDGLVGMFDPKGRKVPCVGLSIGVERIFSIVEQRLEALEEKIRTTETQVLVASAQKKLLEERLKLVSELWDAGIKAELLYKKNPKLLNQLQYCEEAGIPLVAIIGEQELKDGVIKLRSVTSREEVDVRREDLVEEIKRRTGQPLCIC

SEQ ID NO: 49143 - protein, 506 aa, Homo sapiens
MPLLGLLPRRAWASLLSQLLRPPCASCTGAVRCQSQVAEAVLTSQLKAHQEKPNFIIKTPKGTRDLSPQHMVVREKILDLVISCFKRHGAKGMDTPAFELKETLTEKYGEDSGLMYDLKDQGGELLSLRYDLTVPFARYLAMNKVKKMKRYHVGKVWRRESPTIVQGRYREFCQCDFDIAGQFDPMIPDAECLKIMCEILSGLQLGDFLIKVNDRRIVDGMFAVCGVPESKFRAICSSIDKLDKMAWKDVRHEMVVKKGLAPEVADRIGDYVQCHGGVSLVEQMFQDPRLSQNKQALEGLGDLKLLFEYLTLFGIADKISFDLSLARGLDYYTGVIYEAVLLQTPTQAGEEPLNVGSVAAGGRYDGLVGMFDPKGHKVPCVGLSIGVERIFYIVEQRMKTKGEKVRTTETQVFVATPQKNFLQERLKLIAELWDSGIKAEMLYKNNPKLLTQLHYCESTGIPLVVIIGEQELKEGVIKIRSVASREEVAIKRENFVAEIQKRLSES

SEQ ID NO: 49144 - protein, 345 aa, Homo sapiens
MTLLEVPFARYLAMNKVKKMKRYHVGKVWRRESPTIVQGRYREFCQCDFDIAGQFDPMIPDAECLKIMCEILSGLQLGDFLIKMAWKDVRHEMVVKKGLAPEVADRIGDYVQCHGGVSLVEQMFQDPRLSQNKQALEGLGDLKLLFEYLTLFGIADKISFDLSLARGLDYYTGVIYEAVLLQTPTQAGEEPLNVGSVAAGGRYDGLVGMFDPKGHKVPCVGLSIGVERIFYIVEQRMKTKGEKVRTTETQVFVATPQKNFLQERLKLIAELWDSGIKAEMLYKNNPKLLTQLHYCESTGIPLVVIIGEQELKEGVIKIRSVASREEVAIKRENFVAEIQKRLSES

SEQ ID NO: 49145 - protein, 392 aa, Homo sapiens
MPLLGLLPRRAWASLLSQLLRPPCASCTGAVRCQSQVAEAVLTSQLKAHQEKPNFIIKTPKDFDIAGQFDPMIPDAECLKIMCEILSGLQLGDFLIKVNDRRIVDGMFAVCGVPESKFRAICSSIDKLDKMAWKDVRHEMVVKKGLAPEVADRIGDYVQCHGGVSLVEQMFQDPRLSQNKQALEGLGDLKLLFEYLTLFGIADKISFDLSLARGLDYYTGVIYEAVLLQTPTQAGEEPLNVGSVAAGGRYDGLVGMFDPKGHKVPCVGLSIGVERIFYIVEQRMKTKGEKVRTTETQVFVATPQKNFLQERLKLIAELWDSGIKAEMLYKNNPKLLTQLHYCESTGIPLVVIIGEQELKEGVIKIRSVASREEVAIKRENFVAEIQKRLSES

SEQ ID NO: 49146 - protein, 466 aa, Homo sapiens
MPLLGLLPRRAWASLLSQLLRPPCASCTGAVRCQSQVAEAVLTSQLKAHQEKPNFIIKTPKETLTEKYGEDSGLMYDLKDQGGELLSLRYDLTVPFARYLAMNKVKKMKRYHVGKVWRRESPTIVQGRYREFCQCDFDIAGQFDPMIPDAECLKIMCEILSGLQLGDFLIKVNDRRIVDGMFAVCGVPESKFRAICSSIDKLDKMAWKDVRHEMVVKKGLAPEVADRIGDYVQCHGGVSLVEQMFQDPRLSQNKQALEGLGDLKLLFEYLTLFGIADKISFDLSLARGLDYYTGVIYEAVLLQTPTQAGEEPLNVGSVAAGGRYDGLVGMFDPKGHKVPCVGLSIGVERIFYIVEQRMKTKGEKVRTTETQVFVATPQKNFLQERLKLIAELWDSGIKAEMLYKNNPKLLTQLHYCESTGIPLVVIIGEQELKEGVIKIRSVASREEVAIKRENFVAEIQKRLSES

SEQ ID NO: 49147 - protein, 334 aa, Homo sapiens
MPLLGLLPRRAWASLLSQLLRPPCASCTGAVRCQSQDFDIAGQFDPMIPDAECLKIMCEILSGLQLGDFLIKMAWKDVRHEMVVKKGLAPEVADRIGDYVQCHGGVSLVEQMFQDPRLSQNKQALEGLGDLKLLFEYLTLFGIADKISFDLSLARGLDYYTGVIYEAVLLQTPTQAGEEPLNVGSVAAGGRYDGLVGMFDPKGHKVPCVGLSIGVERIFYIVEQRMKTKGEKVRTTETQVFVATPQKNFLQERLKLIAELWDSGIKAEMLYKNNPKLLTQLHYCESTGIPLVVIIGEQELKEGVIKIRSVASREEVAIKRENFVAEIQKRLSES

SEQ ID NO: 49148 - protein, 481 aa, Homo sapiens
MPLLGLLPRRAWASLLSQLLRPPCASCTGAVRCQSQGTRDLSPQHMVVREKILDLVISCFKRHGAKGMDTPAFELKETLTEKYGEDSGLMYDLKDQGGELLSLRYDLTVPFARYLAMNKVKKMKRYHVGKVWRRESPTIVQGRYREFCQCDFDIAGQFDPMIPDAECLKIMCEILSGLQLGDFLIKVNDRRIVDGMFAVCGVPESKFRAICSSIDKLDKMAWKDVRHEMVVKKGLAPEVADRIGDYVQCHGGVSLVEQMFQDPRLSQNKQALEGLGDLKLLFEYLTLFGIADKISFDLSLARGLDYYTGVIYEAVLLQTPTQAGEEPLNVGSVAAGGRYDGLVGMFDPKGHKVPCVGLSIGVERIFYIVEQRMKTKGEKVRTTETQVFVATPQKNFLQERLKLIAELWDSGIKAEMLYKNNPKLLTQLHYCESTGIPLVVIIGEQELKEGVIKIRSVASREEVAIKRENFVAEIQKRLSES

SEQ ID NO: 49149 - protein, 394 aa, Homo sapiens
MDSALSDPHNGSAEAGGPTNSTTRPPSTPEGIALAYGSLLLMALLPIFFGALRSVRCARGKNASDMPETITSRDAARFPIIASCTLLGLYLFFKIFSQEYINLLLSMYFFVLGILALSHTISPFMNKFFPASFPNRQYQLLFTQGSGENKEEIINYEFDTKDLVCLGLSSIVGVWYLLRKHWIANNLFGLAFSLNGVELLHLNNVSTGCILLGGLFIYDVFWVFGTNVMVTVAKSFEAPIKLVFPQDLLEKGLEANNFAMLGLGDVVIPGIFIALLLRFDISLKKNTHTYFYTSFAAYIFGLGLTIFIMHIFKHAQPALLYLVPACIGFPVLVALAKGEVTEMFSYESSAEILPHTPRLTHFPTVSGSPASLADSMQQKLAGPRRRRPQNPSAM

SEQ ID NO: 49150 - protein, 377 aa, Homo sapiens
MDSALSDPHNGSAEAGGPTNSTTRPPSTPEGIALAYGSLLLMALLPIFFGALRSVRCARGKNASDMPETITSRDAARFPIIASCTLLGLYLFFKIFSQEYINLLLSMYFFVLGILALSHTISPFMNKFFPASFPNRQYQLLFTQGSGENKEEIINYEFDTKDLVCLGLSSIVGVWYLLRKHWIANNLFGLAFSLNGVELLHLNNVSTGCILLGGLFIYDVFWVFGTNVMVTVAKSFEAPIKLVFPQDLLEKGLEANNFAMLGLGDVVIPGIFIALLLRFDISLKKNTHTYFYTSFAAYIFGLGLTIFIMHIFKHAQPALLYLVPACIGFPVLVALAKGEVTEMFSYEESNPKDPAAVTESKEGTEASASKGLEKKEK

SEQ ID NO: 49151 - protein, 335 aa, Homo sapiens
MDSALSDPHNGSAEAGGPTNSTTRPPSTPEGIALAYGSLLLMALLPIFFGALRSVRCARGKNASDMPETITSRDAARFPIIASCTLLGLYLFFKIFSQEYINLLLSMYFFVLGILALSHTISPFMNKFFPASFPNRQYQLLFTQGSGENKEEIINYEFDTKDLVCLGLSSIVGVWYLLRKVFGTNVMVTVAKSFEAPIKLVFPQDLLEKGLEANNFAMLGLGDVVIPGIFIALLLRFDISLKKNTHTYFYTSFAAYIFGLGLTIFIMHIFKHAQPALLYLVPACIGFPVLVALAKGEVTEMFSYEESNPKDPAAVTESKEGTEASASKGLEKKEK

SEQ ID NO: 49152 - protein, 426 aa, Homo sapiens
MDSALSDPHNGSAEAGGPTNSTTRPPSTPEGIALAYGSLLLMALLPIFFGALRSVRCARGKNASDMPETITSRDAARFPIIASCTLLGLYLFFKIFSQEYINLLLSMYFFVLGILALSHTISPFMNKFFPASFPNRQYQLLFTQGSGENKEEIINYEFDTKDLVCLGLSSIVGVWYLLRKHWIANNLFGLAFSLNGVELLHLNNVSTGCILLGGLFIYDVFWVFGTNVMVTVAKSFEAPIKLVFPQDLLEKGLEANNFAMLGLGDVVIPGIFIALLLRFDISLKKNTHTYFYTSFAAYIFGLGLTIFIMHIFKHAQPALLYLVPACIGFPVLVALAKGEVTEMFSYESSAEILPHTPRLTHFPTVSGSPASLADSMQQKLAGPRRRRPQNPSAIYEESNPKDPAAVTESKEGTEASASKGLEKKEK

SEQ ID NO: 49153 - protein, 1136 aa, Homo sapiens
MFSRKKRELMKTPSISKKNRAGSPSPQPSGELPRKDGADAVFPGPSLEPPAGSSGVKATGTLKRPTSLSRHASAAGFPLSGAASWTLGRSHRSPLTAASPGELPTEGAGPDVVEDISHLLADVARFAEGLEKLKECVLRDDLLEARRPRAHECLGEALRVMHQIISKYPLLNTVETLTAAGTLIAKVKAFHYESNNDLEKQEFEKALETIAVAFSSTVSEFLMGEVDSSTLLAVPPGDSSQSMESLYGPGSEGTPPSLEDCDAGCLPAEEVDVLLQRCEGGVDAALLYAKNMAKYMKDLISYLEKRTTLEMEFAKGLQKIAHNCRQSVMQEPHMPLLSIYSLALEQDLEFGHSMVQAVGTLQTQTFMQPLTLRRLEHEKRRKEIKEAWHRAQRKLQEAESNLRKAKQGYVQRCEDHDKARFLVAKAEEEQAGSAPGAGSTATKTLDKRRRLEEEAKNKAEEAMATYRTCVADAKTQKQELEDTKVTALRQIQEVIRQSDQTIKSATISYYQMMHMQTAPLPVHFQMLCESSKLYDPGQQYASHVRQLQRDQEPDVHYDFEPHVSANAWSPVMRARKSSFNVSDVARPEAAGSPPEEGGCTEGTPAKDHRAGRGHQVHKSWPLSISDSDSGLDPGPGAGDFKKFERTSSSGTMSSTEELVDPDGGAGASAFEQADLNGMTPELPVAVPSGPFRHEGLSKAARTHRLRKLRTPAKCRECNSYVYFQGAECEECCLACHKKCLETLAIQCGHKKLQGRLQLFGQDFSHAARSAPDGVPFIVKKCVCEIERRALRTKGIYRVNGVKTRVEKLCQAFENGKELVELSQASPHDISNVLKLYLRQLPEPLISFRLYHELVGLAKDSLKAEAEAKAASRGRQDGSESEAVAVALAGRLRELLRDLPPENRASLQYLLRHLRRIVEVEQDNKMTPGNLGIVFGPTLLRPRPTEATVSLSSLVDYPHQARVIETLIVHYGLVFEEEPEETPGGQDESSNQRAEVVVQVPYLEAGEAVVYPLQEAAADGCRESRVVSNDSDSDLEEASELLSSSEASALGHLSFLEQQQSEASLEVASGSHSGSEEQLEATAREDGDGDEDGPAQQLSGFNTNQSNNVLQAPLPPMRLRGGRMTLGSCRERQPEFV

SEQ ID NO: 49154 - protein, 1130 aa, Homo sapiens
SYSPYRAGRQGPQQRGRDPGIQLTELPRKDGADAVFPGPSLEPPAGSSGVKATGTLKRPTSLSRHASAAGFPLSGAASWTLGRSHRSPLTAASPGELPTEGAGPDVVEDISHLLADVARFAEGLEKLKECVLRDDLLEARRPRAHECLGEALRVMHQIISKYPLLNTVETLTAAGTLIAKVKAFHYESNNDLEKQEFEKALETIAVAFSSTVSEFLMGEVDSSTLLAVPPGDSSQSMESLYGPGSEGTPPSLEDCDAGCLPAEEVDVLLQRCEGGVDAALLYAKNMAKYMKDLISYLEKRTTLEMEFAKGLQKIAHNCRQSVMQEPHMPLLSIYSLALEQDLEFGHSMVQAVGTLQTQTFMQPLTLRRLEHEKRRKEIKEAWHRAQRKLQEAESNLRKAKQGYVQRCEDHDKARFLVAKAEEEQAGSAPGAGSTATKTLDKRRRLEEEAKNKAEEAMATYRTCVADAKTQKQELEDTKVTALRQIQEVIRQSDQTIKSATISYYQMMHMQTAPLPVHFQMLCESSKLYDPGQQYASHVRQLQRDQEPDVHYDFEPHVSANAWSPVMRARKSSFNVSDVARPEAAGSPPEEGGCTEGTPAKDHRAGRGHQVHKSWPLSISDSDSGLDPGPGAGDFKKFERTSSSGTMSSTEELVDPDGGAGASAFEQADLNGMTPELPVAVPSGPFRHEGLSKAARTHRLRKLRTPAKCRECNSYVYFQGAECEECCLACHKKCLETLAIQCGHKKLQGRLQLFGQDFSHAARSAPDGVPFIVKKCVCEIERRALRTKGIYRVNGVKTRVEKLCQAFENGKELVELSQASPHDISNVLKLYLRQLPEPLISFRLYHELVGLAKDSLKAEAEAKAASRGRQDGSESEAVAVALAGRLRELLRDLPPENRASLQYLLRHLRRIVEVEQDNKMTPGNLGIVFGPTLLRPRPTEATVSLSSLVDYPHQARVIETLIVHYGLVFEEEPEETPGGQDESSNQRAEVVVQVPYLEAGEAVVYPLQEAAADGCRESRVVSNDSDSDLEEASELLSSSEASALGHLSFLEQQQSEASLEVASGSHSGSEEQLEATAREDGDGDEDGPAQQLSGFNTNQSNNVLQAPLPPMRLRGGRMTLGSCRERQPEFV

SEQ ID NO: 49155 - protein, 1004 aa, Homo sapiens
MHQIISKYPLLNTVETLTAAGTLIAKVKAFHYESNNDLEKQEFEKALETIAVAFSSTVSEFLMGEVDSSTLLAVPPGDSSQSMESLYGPGSEGTPPSLEDCDAGCLPAEEVDVLLQRCEGGVDAALLYAKNMAKYMKDLISYLEKRTTLEMEFAKGLQKIAHNCRQSVMQEPHMPLLSIYSLALEQDLEFGHSMVQAVGTLQTQTFMQPLTLRRLEHEKRRKEIKEAWHRAQRKLQEAESNLRKAKQGYVQRCEDHDKARFLVAKAEEEQAGSAPGAGSTATKTLDKRRRLEEEAKNKAEEAMATYRTCVADAKTQKQELEDTKVTALRQIQEVIRQSDQTIKSATISYYQMMHMQTAPLPVHFQMLCESSKLYDPGQQYASHVRQLQRDQEPDVHYDFEPHVSANAWSPVMRARKSSFNVSDVARPEAAGSPPEEGGCTEGTPAKDHRGECPAGPRGGRWLPATHPGPSPETPLSPAGRGHQVHKSWPLSISDSDSGLDPGPGAGDFKKFERTSSSGTMSSTEELVDPDGGAGASAFEQADLNGMTPELPVAVPSGPFRHEGLSKAARTHRLRKLRTPAKCRECNSYVYFQGAECEECCLACHKKCLETLAIQCGHKKLQGRLQLFGQDFSHAARSAPDGVPFIVKKCVCEIERRALRTKGIYRVNGVKTRVEKLCQAFENGKELVELSQASPHDISNVLKLYLRQLPEPLISFRLYHELVGLAKDSLKAEAEAKAASRGRQDGSESEAVAVALAGRLRELLRDLPPENRASLQYLLRHLRRIVEVEQDNKMTPGNLGIVFGPTLLRPRPTEATVSLSSLVDYPHQARVIETLIVHYGLVFEEEPEETPGGQDESSNQRAEVVVQVPYLEAGEAVVYPLQEAAADGCRESRVVSNDSDSDLEEASELLSSSEASALGHLSFLEQQQSEASLEVASGSHSGSEEQLEATAREDGDGDEDGPAQQLSGFNTNQSNNVLQAPLPPMRLRGGRMTLGSCRERQPEFV

SEQ ID NO: 49156 - protein, 1152 aa, Homo sapiens
MSRGQRVLKGLLGWVCTWTWAWRARLGARGCGLHVLCPRDLPLPPEELPRKDGADAVFPGPSLEPPAGSSGVKATGTLKRPTSLSRHASAAGFPLSGAASWTLGRSHRSPLTAASPGELPTEGAGPDVVEDISHLLADVARFAEGLEKLKECVLRDDLLEARRPRAHECLGEALRVMHQIISKYPLLNTVETLTAAGTLIAKVKAFHYESNNDLEKQEFEKALETIAVAFSSTVSEFLMGEVDSSTLLAVPPGDSSQSMESLYGPGSEGTPPSLEDCDAGCLPAEEVDVLLQRCEGGVDAALLYAKNMAKYMKDLISYLEKRTTLEMEFAKGLQKIAHNCRQSVMQEPHMPLLSIYSLALEQDLEFGHSMVQAVGTLQTQTFMQPLTLRRLEHEKRRKEIKEAWHRAQRKLQEAESNLRKAKQGYVQRCEDHDKARFLVAKAEEEQAGSAPGAGSTATKTLDKRRRLEEEAKNKAEEAMATYRTCVADAKTQKQELEDTKVTALRQIQEVIRQSDQTIKSATISYYQMMHMQTAPLPVHFQMLCESSKLYDPGQQYASHVRQLQRDQEPDVHYDFEPHVSANAWSPVMRARKSSFNVSDVARPEAAGSPPEEGGCTEGTPAKDHRAGRGHQVHKSWPLSISDSDSGLDPGPGAGDFKKFERTSSSGTMSSTEELVDPDGGAGASAFEQADLNGMTPELPVAVPSGPFRHEGLSKAARTHRLRKLRTPAKCRECNSYVYFQGAECEECCLACHKKCLETLAIQCGHKKLQGRLQLFGQDFSHAARSAPDGVPFIVKKCVCEIERRALRTKGIYRVNGVKTRVEKLCQAFENGKELVELSQASPHDISNVLKLYLRQLPEPLISFRLYHELVGLAKDSLKAEAEAKAASRGRQDGSESEAVAVALAGRLRELLRDLPPENRASLQYLLRHLRRIVEVEQDNKMTPGNLGIVFGPTLLRPRPTEATVSLSSLVDYPHQARVIETLIVHYGLVFEEEPEETPGGQDESSNQRAEVVVQVPYLEAGEAVVYPLQEAAADGCRESRVVSNDSDSDLEEASELLSSSEASALGHLSFLEQQQSEASLEVASGSHSGSEEQLEATAREDGDGDEDGPAQQLSGFNTNQSNNVLQAPLPPMRLRGGRMTLGSCRERQPEFV

SEQ ID NO: 49157 - protein, 1019 aa, Homo sapiens
MCICGTAHPVLDEGPVRCRAGPRDLLEARRPRAHECLGEALRVMHQIISKYPLLNTVETLTAAGTLIAKVKAFHYESNNDLEKQEFEKALETIAVAFSSTVSEFLMGEVDSSTLLAVPPGDSSQSMESLYGPGSEGTPPSLEDCDAGCLPAEEVDVLLQRCEGGVDAALLYAKNMAKYMKDLISYLEKRTTLEMEFAKGLQKIAHNCRQSVMQEPHMPLLSIYSLALEQDLEFGHSMVQAVGTLQTQTFMQPLTLRRLEHEKRRKEIKEAWHRAQRKLQEAESNLRKAKQGYVQRCEDHDKARFLVAKAEEEQAGSAPGAGSTATKTLDKRRRLEEEAKNKAEEAMATYRTCVADAKTQKQELEDTKVTALRQIQEVIRQSDQTIKSATISYYQMMHMQTAPLPVHFQMLCESSKLYDPGQQYASHVRQLQRDQEPDVHYDFEPHVSANAWSPVMRARKSSFNVSDVARPEAAGSPPEEGGCTEGTPAKDHRAGRGHQVHKSWPLSISDSDSGLDPGPGAGDFKKFERTSSSGTMSSTEELVDPDGGAGASAFEQADLNGMTPELPVAVPSGPFRHEGLSKAARTHRLRKLRTPAKCRECNSYVYFQGAECEECCLACHKKCLETLAIQCGHKKLQGRLQLFGQDFSHAARSAPDGVPFIVKKCVCEIERRALRTKGIYRVNGVKTRVEKLCQAFENGKELVELSQASPHDISNVLKLYLRQLPEPLISFRLYHELVGLAKDSLKAEAEAKAASRGRQDGSESEAVAVALAGRLRELLRDLPPENRASLQYLLRHLRRIVEVEQDNKMTPGNLGIVFGPTLLRPRPTEATVSLSSLVDYPHQARVIETLIVHYGLVFEEEPEETPGGQDESSNQRAEVVVQVPYLEAGEAVVYPLQEAAADGCRESRVVSNDSDSDLEEASELLSSSEASALGHLSFLEQQQSEASLEVASGSHSGSEEQLEATAREDGDGDEDGPAQQLSGFNTNQSNNVLQAPLPPMRLRGGRMTLGSCRERQPEFV

SEQ ID NO: 49158 - protein, 948 aa, Homo sapiens
MFSRKKRELMKTPSISKKNRAGSPSPQPSGELPRKDGADAVFPGPSLEPPAGSSGVKATGTLKRPTSLSRHASAAGFPLSGAASWTLGRSHRSPLTAASPGELPTEGAGPDVVEDISHLLADVARFAEGLEKLKECVLRDDLLEARRPRAHECLGEALRVMHQIISKYPLLNTVETLTAAGTLIAKVKAFHYESNNDLEKQEFEKALETIAVAFSSTVSEFLMGEVDSSTLLAVPPGDSSQSMESLYGPGSEGTPPSLEDCDAGCLPAEEVDVLLQRCEGGVDAALLYAKNMAKYMKDLISYLEKRTTLEMEFAKGLQKIAHNCRQSVMQEPHMPLLSIYSLALEQDLEFGHSMVQAVGTLQTQTFMQPLTLRRLEHEKRRKEIKEAWHRAQRKLQEAESNLRKAKQGYVQRCEDHDKARFLVAKAEEEQAGSAPGAGSTATKTLDKRRRLEEEAKNKAEEAMATYRTCVADAKTQKQELEDTKVTALRQIQEVIRQSDQTIKSATISYYQMMHMQTAPLPVHFQMLCESSKLYDPGQQYASHVRQLQRDQEPDVHYDFEPHVSANAWSPVMRARKSSFNVSDVARPEAAGSPPEEGGCTEGTPAKDHRAGRGHQVHKSWPLSISDSDSGLDPGPGAGDFKKFERTSSSGTMSSTEELVDPDGGAGASAFEQADLNGMTPELPVAVPSGPFRHEGLSKAARTHRLRKLRTPAKCRECNSYVYFQGAECEECCLACHKKCLETLAIQCGHKKLQGRLQLFGQDFSHAARSAPDGVPFIVKKCVCEIERRALRTKGIYRVNGVKTRVEKLCQAFENGKELVELSQASPHDISNVLKLYLRQLPEPLISFRLYHELVGLAKDSLKAEAEAKAASRGRQDGSESEAVAVALAGRLRELLRDLPPENRASLQYLLRHLRRIVEVEQDNKMTPMRLRGGRMTLGSCRERQPEFV

SEQ ID NO: 49159 - protein, 1163 aa, Homo sapiens
MFSRKKRELMKTPSISKKNRAGSPSPQPSGPHFISGETEAVSRPENPFNELPSDLPKELPRKDGADAVFPGPSLEPPAGSSGVKATGTLKRPTSLSRHASAAGFPLSGAASWTLGRSHRSPLTAASPGELPTEGAGPDVVEDISHLLADVARFAEGLEKLKECVLRDDLLEARRPRAHECLGEALRVMHQIISKYPLLNTVETLTAAGTLIAKVKAFHYESNNDLEKQEFEKALETIAVAFSSTVSEFLMGEVDSSTLLAVPPGDSSQSMESLYGPGSEGTPPSLEDCDAGCLPAEEVDVLLQRCEGGVDAALLYAKNMAKYMKDLISYLEKRTTLEMEFAKGLQKIAHNCRQSVMQEPHMPLLSIYSLALEQDLEFGHSMVQAVGTLQTQTFMQPLTLRRLEHEKRRKEIKEAWHRAQRKLQEAESNLRKAKQGYVQRCEDHDKARFLVAKAEEEQAGSAPGAGSTATKTLDKRRRLEEEAKNKAEEAMATYRTCVADAKTQKQELEDTKVTALRQIQEVIRQSDQTIKSATISYYQMMHMQTAPLPVHFQMLCESSKLYDPGQQYASHVRQLQRDQEPDVHYDFEPHVSANAWSPVMRARKSSFNVSDVARPEAAGSPPEEGGCTEGTPAKDHRAGRGHQVHKSWPLSISDSDSGLDPGPGAGDFKKFERTSSSGTMSSTEELVDPDGGAGASAFEQADLNGMTPELPVAVPSGPFRHEGLSKAARTHRLRKLRTPAKCRECNSYVYFQGAECEECCLACHKKCLETLAIQCGHKKLQGRLQLFGQDFSHAARSAPDGVPFIVKKCVCEIERRALRTKGIYRVNGVKTRVEKLCQAFENGKELVELSQASPHDISNVLKLYLRQLPEPLISFRLYHELVGLAKDSLKAEAEAKAASRGRQDGSESEAVAVALAGRLRELLRDLPPENRASLQYLLRHLRRIVEVEQDNKMTPGNLGIVFGPTLLRPRPTEATVSLSSLVDYPHQARVIETLIVHYGLVFEEEPEETPGGQDESSNQRAEVVVQVPYLEAGEAVVYPLQEAAADGCRESRVVSNDSDSDLEEASELLSSSEASALGHLSFLEQQQSEASLEVASGSHSGSEEQLEATAREDGDGDEDGPAQQLSGFNTNQSNNVLQAPLPPMRLRGGRMTLGSCRERQPEFV

SEQ ID NO: 49160 - protein, 139 aa, Homo sapiens
MSISSALAMVFMGAKGNTAAQMSQALCFSKIGGEDGDIHRGFQSLLVAINRTDTEYVLRTANGLFGEKSYDFLTGFTDSCGKFYQATIKQLDFVNDTEKSTTRVNSWVADKTKGENILLFYFDNILNSFIVSSLQNCQI

SEQ ID NO: 49161 - protein, 53 aa, Homo sapiens
MEIFIEVFSHFLLQLTELTLNMCLELPTGSLEKSLMISSQVLQIPVANSTKQR

SEQ ID NO: 49162 - protein, 215 aa, Homo sapiens
MSETVPPAPAASAAPEKPLAGKKAKKPAKAAAASKKKPAGPSVSELIVQAASSSKERGGVSLAALKKALAAAGYDVEKNNSRIKLGIKSLVSKGTLVQTKGTGASGSFKLNKKASSVETKPGASKVATKTKATGASKKLKKATGASKKSVKTPKKAKKPAATRKSSKNPKKPKTVKPKKVAKSPAKAKAVKPKAAKARVTKPKTAKPKKAAPKKK

SEQ ID NO: 49163 - protein, 226 aa, Homo sapiens
MSETAPAETATPAPVEKSPAKKKATKKAAGAGAAKRKATGPPVSELITKAVAASKERNGLSLAALKKALAAGGYDVEKNNSRIKLGLKSLVSKGTLVQTKGTGASGSFKLNKKAASGEAKPKAKKAGAAKAKKPAGATPKKAKKAAGAKKAVKKTPKKAKKPAAAGVKKVAKSPKKAKAAAKPKKATKSPAKPKAVKPKAAKPKAAKPKAAKPKAAKAKKAAAKKK

SEQ ID NO: 49164 - protein, 213 aa, Homo sapiens [sequence omitted]

SEQ ID NO: 49165 - protein, 221 aa, Homo sapiens
MSETAPLAPTIPAPAEKTPVKKKAKKAGATAGKRKASGPPVSELITKAVAASKERSGVSLAALKKALAAAGYDVEKNNSRIKLGLKSLVSKGTLVQTKGTGASGSFKLNKKAASGEGKPKAKKAGAAKPRKPAGAAKKPKKVAGAATPKKSIKKTPKKVKKPATAAGTKKVAKSAKKVKTPQPKKAAKSPAKAKAPKPKAAKPKSGKPKVTKAKKAAPKKK

SEQ ID NO: 49166 - protein, 219 aa, Homo sapiens
MSETAPAAPAAPAPAEKTPVKKKARKSAGAAKRKASGPPVSELITKAVAASKERSGVSLAALKKALAAAGYDVEKNNSRIKLGLKSLVSKGTLVQTKGTGASGSFKLNKKAASGEAKPKAKKAGAAKAKKPAGAAKKPKKATGAATPKKSAKKTPKKAKKPAAAAGAKKAKSPKKAKAAKPKKAPKSPAKAKAVKPKAAKPKTAKPKAAKPKKAAAKKK

SEQ ID NO: 49167 - protein, 207 aa, Homo sapiens
MSETVPAASASAGVAAMEKLPTKKRGRKPAGLISASRKVPNLSVSKLITEALSVSQERVGMSLVALKKALAAAGYDVEKNNSRIKLSLKSLVNKGILVQTRGTGASGSFKLSKKVIPKSTRSKAKKSVSAKTKKLVLSRDSKSPKTAKTNKRAKKPRATTPKTVRSGRKAKGAKGKQQQKSPVKARASKSKLTQHHEVNVRKATSKK

SEQ ID NO: 49168 - protein, 130 aa, Homo sapiens
MSGRGKQGGKARAKAKTRSSRAGLQFPVGRVHRLLRKGNYSERVGAGAPVYLAAVLEYLTAEILELAGNAARDNKKTRIIPRHLQLAIRNDEELNKLLGRVTIAQGGVLPNIQAVLLPKKTESHHKAKGK

SEQ ID NO: 49169 - protein, 130 aa, Homo sapiens
MSGRGKQGGKARAKAKSRSSRAGLQFPVGRVHRLLRKGNYAERVGAGAPVYLAAVLEYLTAEILELAGNAARDNKKTRIIPRHLQLAIRNDEELNKLLGRVTIAQGGVLPNIQAVLLPKKTESHHKAKGK

SEQ ID NO: 49170 - protein, 130 aa, Homo sapiens; identical to SEQ ID NO: 49169

SEQ ID NO: 49171 - protein, 130 aa, Homo sapiens
MSGRGKQGGKARAKAKTRSSRAGLQFPVGRVHRLLRKGNYSERVGAGAPVYLAAVLEYLTAEILELAGNAARDNKKTRIIPRHLQLAIRNDEELNKLLGKVTIAQGGVLPNIQAVLLPKKTESHHKAKGK

SEQ ID NO: 49172 - protein, 130 aa, Homo sapiens; identical to SEQ ID NO: 49168

SEQ ID NO: 49173 - protein, 130 aa, Homo sapiens
MSGRGKQGGKARAKAKTRSSRAGLQFPVGRVHRLLRKGNYAERVGAGAPVYLAAVLEYLTAEILELAGNAARDNKKTRIIPRHLQLAIRNDEELNKLLGKVTIAQGGVLPNIQAVLLPKKTESHHKAKGK

SEQ ID NO: 49174 - protein, 128 aa, Homo sapiens
MSGRGKQGGKARAKAKTRSSRAGLQFPVGRVHRLLRKGNYAERVGAGAPVYLAAVLEYLTAEILELAGNAARDNKKTRIIPRHLQLAIRNDEELNKLLGKVTIAQGGVLPNIQAVLLPKKTESHHKTK

SEQ ID NO: 49175 - protein, 130 aa, Homo sapiens; identical to SEQ ID NO: 49173

SEQ ID NO: 49176 - protein, 130 aa, Homo sapiens; identical to SEQ ID NO: 49173

SEQ ID NO: 49177 - protein, 130 aa, Homo sapiens; identical to SEQ ID NO: 49173

SEQ ID NO: 49178 - protein, 127 aa, Homo sapiens
MPEVSSKGATISKKGFKKAVVKTQKKEGKKRKRTRKESYSIYIYKVLKQVHPDTGISSKAMSIMNSFVTDIFERIASEASRLAHYSKRSTISSREIQTAVRLLLPGELAKHAVSEGTKAVTKYTSSK

SEQ ID NO: 49179 - protein, 126 aa, Homo sapiens
MPEPSKSAPAPKKGSKKAITKAQKKDGKKRKRSRKESYSIYVYKVLKQVHPDTGISSKAMGIMNSFVNDIFERIAGEASRLAHYNKRSTITSREIQTAVRLLLPGELAKHAVSEGTKAVTKYTSSK

SEQ ID NO: 49180 - protein, 126 aa, Homo sapiens
MPEPAKSAPAPKKGSKKAVTKAQKKDGKKRKRSRKESYSVYVYKVLKQVHPDTGISSKAMGIMNSFVNDIFERIAGEASRLAHYNKRSTITSREIQTAVRLLLPGELAKHAVSEGTKAVTKYTSSK

SEQ ID NO: 49181 - protein, 126 aa, Homo sapiens; identical to SEQ ID NO: 49180

SEQ ID NO: 49182 - protein, 126 aa, Homo sapiens
MPEPTKSAPAPKKGSKKAVTKAQKKDGKKRKRSRKESYSVYVYKVLKQVHPDTGISSKAMGIMNSFVNDIFERIAGEASRLAHYNKRSTITSREIQTAVRLLLPGELAKHAVSEGTKAVTKYTSSK

SEQ ID NO: 49183 - protein, 126 aa, Homo sapiens; identical to SEQ ID NO: 49182

SEQ ID NO: 49184 - protein, 126 aa, Homo sapiens; identical to SEQ ID NO: 49180

SEQ ID NO: 49185 - protein, 126 aa, Homo sapiens; identical to SEQ ID NO: 49180

SEQ ID NO: 49186 - protein, 126 aa, Homo sapiens; identical to SEQ ID NO: 49180

SEQ ID NO: 49187 - protein, 126 aa, Homo sapiens
MPDPAKSAPAPKKGSKKAVTKAQKKDGKKRKRSRKESYSVYVYKVLKQVHPDTGISSKAMGIMNSFVNDIFERIAGEASRLAHYNKRSTITSREIQTAVRLLLPGELAKHAVSEGTKAVTKYTSSK

SEQ ID NO: 49188 - protein, 126 aa, Homo sapiens; identical to SEQ ID NO: 49180

SEQ ID NO: 49189 - protein, 126 aa, Homo sapiens
MPELAKSAPAPKKGSKKAVTKAQKKDGKKRKRSRKESYSVYVYKVLKQVHPDTGISSKAMGIMNSFVNDIFERIASEASRLAHYNKRSTITSREIQTAVRLLLPGELAKHAVSEGTKAVTKYTSSK

SEQ ID NO: 49190 - protein, 126 aa, Homo sapiens
MPEPVKSAPVPKKGSKKAINKAQKKDGKKRKRSRKESYSVYVYKVLKQVHPDTGISSKAMGIMNSFVNDIFERIAGEASRLAHYNKRSTITSREIQTAVRLLLPGELAKHAVSEGTKAVTKYTSSK

SEQ ID NO: 49191 - protein, 126 aa, Homo sapiens
MPEPSKSAPAPKKGSKKAVTKAQKKDGKKRKRSRKESYSVYVYKVLKQVHPDTGISSKAMGIMNSFVNDIFERIAGEASRLAHYNKRSTITSREIQTAVRLLLPGELAKHAVSEGTKAVTKYTSSK

SEQ ID NO: 49192 - protein, 126 aa, Homo sapiens; identical to SEQ ID NO: 49191

SEQ ID NO: 49193 - protein, 126 aa, Homo sapiens
MPDPAKSAPAPKKGSKKAVTKAQKKDGKKRKRSRKESYSIYVYKVLKQVHPDTGISSKAMGIMNSFVNDIFERIAGEASRLAHYNKRSTITSREIQTAVRLLLPGELAKHAVSEGTKAVTKYTSSK

SEQ ID NO: 49194 - protein, 136 aa, Homo sapiens
MARTKQTARKSTGGKAPRKQLATKAARKSAPATGGVKKPHRYRPGTVALREIRRYQKSTELLIRKLPFQRLVREIAQDFKTDLRFQSSAVMALQEACEAYLVGLFEDTNLCAIHAKRVTIMPKDIQLARRIRGERA

SEQ ID NO: 49195 - protein, 136 aa, Homo sapiens; identical to SEQ ID NO: 49194

SEQ ID NO: 49196 - protein, 136 aa, Homo sapiens; identical to SEQ ID NO: 49194

SEQ ID NO: 49197 - protein, 136 aa, Homo sapiens; identical to SEQ ID NO: 49194

SEQ ID NO: 49198 - protein, 136 aa, Homo sapiens; identical to SEQ ID NO: 49194

SEQ ID NO: 49199 - protein, 136 aa, Homo sapiens; identical to SEQ ID NO: 49194

SEQ ID NO: 49200 - protein, 136 aa, Homo sapiens; identical to SEQ ID NO: 49194

SEQ ID NO: 49201 - protein, 136 aa, Homo sapiens; identical to SEQ ID NO: 49194

SEQ ID NO: 49202 - protein, 136 aa, Homo sapiens; identical to SEQ ID NO: 49194

SEQ ID NO: 49203 - protein, 136 aa, Homo sapiens; identical to SEQ ID NO: 49194

SEQ ID NO: 49204 - protein, 136 aa, Homo sapiens; identical to SEQ ID NO: 49194

SEQ ID NO: 49205 - protein, 112 aa, Homo sapiens
MSGRGKGGKGLAKAKTCSSLPGLQFPGRVRHLFRKGNYFEPVGAGAPVYLQYLAAEILELVGSAIRDKTRSIIPRHLQLAIRNDEEVNKQLGNVTIAQGGVLSNIQAVLLPK

SEQ ID NO: 49206 - protein, 103 aa, Homo sapiens [sequence omitted]

SEQ ID NO: 49207 - protein, 103 aa, Homo sapiens [sequence omitted]

SEQ ID NO: 49208 - protein, 103 aa, Homo sapiens [sequence omitted]

SEQ ID NO: 49209 - protein, 103 aa, Homo sapiens [sequence omitted]

SEQ ID NO: 49210 - protein, 103 aa, Homo sapiens [sequence omitted]

SEQ ID NO: 49211 - protein, 103 aa, Homo sapiens [sequence omitted]

SEQ ID NO: 49212 - protein, 98 aa, Homo sapiens
MSVRGKAGKGLGKGGAKCHRKVLSDNIQGITKCTIRRLARHGGVKRILGLIYEETRRVFKVFLENVIWYAVTNTEHAKRKTVTAMAVVYVLKRQGRTL

SEQ ID NO: 49213 - protein, 103 aa, Homo sapiens [sequence omitted]

SEQ ID NO: 49214 - protein, 103 aa, Homo sapiens [sequence omitted]

SEQ ID NO: 49215 - protein, 103 aa, Homo sapiens [sequence omitted]

SEQ ID NO: 49216 - protein, 103 aa, Homo sapiens [sequence omitted]

SEQ ID NO: 49217 - protein, 103 aa, Homo sapiens [sequence omitted]

SEQ ID NO: 49218 - protein, 103 aa, Homo sapiens [sequence omitted]

SEQ ID NO: 49219 - protein, 129 aa, Homo sapiens
MSGRGKQGGKARAKAKSRSSRAGLQFPVGRVHRLLRKGNYAERVGAGAPVYMAAVLEYLTAEILELAGNAARDNKKTRIIPRHLQLAIRNDEELNKLLGKVTIAQGGVLPNIQAVLLPKKTESHKAKSK

SEQ ID NO: 49220 - protein, 126 aa, Homo sapiens
MPEPAKSAPAPKKGSKKAVTKAQKKDGKKRKRSRKESYSIYVYKVLKQVHPDTGISSKAMGIMNSFVNDIFERIAGEASRLAHYNKRSTITSREIQTAVRLLLPGELAKHAVSEGTKAVTKYTSSK

SEQ ID NO: 49221 - protein, 136 aa, Homo sapiens [sequence omitted]

SEQ ID NO: 49222 - protein, 136 aa, Homo sapiens
MARTKQTARKSTGGKAPRKQLATKVARKSAPATGGVKKPHRYRPGTVALREIRRYQKSTELLIRKLPFQRLMREIAQDFKTDLRFQSSAVMALQEACESYLVGLFEDTNLCVIHAKRVTIMPKDIQLARRIRGERA

SEQ ID NO: 49223 - protein, 1123 aa, Homo sapiens
MNSPNESADGMSGREPSLEILPRTSLHSIPVTVEVKPVLPRAMPSSMGGGGGGSPSPVELRGALVGSVDPTLREQQLQQELLALKQQQQLQKQLLFAEFQKQHDHLTRQHEVQLQKHLKQQQEMLAAKQQQEMLAAKRQQELEQQRQREQQRQEELEKQRLEQQLLILRNKEKSKESAIASTEVKLRLQEFLLSKSKEPTPGGLNHSLPQHPKCWGAHHASLDQSSPPQSGPPGTPPSYKLPLPGPYDSRDDFPLRKTASEPNLKVRSRLKQKVAERRSSPLLRRKDGTVISTFKKRAVEITGAGPGASSVCNSAPGSGPSSPNSSHSTIAENGFTGSVPNIPTEMLPQHRALPLDSSPNQFSLYTSPSLPNISLGLQATVTVTNSHLTASPKLSTQQEAERQALQSLRQGGTLTGKFMSTSSIPGCLLGVALEGDGSPHGHASLLQHVLLLEQARQQSTLIAVPLHGQSPLVTGERVATSMRTVGKLPRHRPLSRTQSSPLPQSPQALQQLVMQQQHQQFLEKQKQQQLQLGKILTKTGELPRQPTTHPEETEEELTEQQEVLLGEGALTMPREGSTESESTQEDLEEEDEEDDGEEEEDCIQVKDEEGESGAEEGPDLEEPGAGYKKLFSDAQPLQPLQVYQAPLSLATVPHQALGRTQSSPAAPGGMKSPPDQPVKHLFTTGVVYDTFMLKHQCMCGNTHVHPEHAGRIQSIWSRLQETGLLSKCERIRGRKATLDEIQTVHSEYHTLLYGTSPLNRQKLDSKKLLGPISQKMYAVLPCGGIGVDSDTVWNEMHSSSAVRMAVGCLLELAFKVAAGELKNGFAIIRPPGHHAEESTAMGFCFFNSVAITAKLLQQKLNVGKVLIVDWDIHHGNGTQQAFYNDPSVLYISLHRYDNGNFFPGSGAPEEVGGGPGVGYNVNVAWTGGVDPPIGDVEYLTAFRTVVMPIAHEFSPDVVLVSAGFDAVEGHLSPLGGYSVTARCFGHLTRQLMTLAGGRVVLALEGGHDLTAICDASEACVSALLSVELQPLDEAVLQQKPNINAVATLEKVIEIQSKHWSCVQKFAAGLGRSLREAQAGETEEAETVSAMALLSVGAEQAQAAAAREHSPRPAEEPMEQEPAL

SEQ ID NO: 49224 - protein, 1037 aa, Homo sapiens
MNSPNESDGMSGREPSLEILPRTSLHSIPVTVEVKPVLPRAMPSSMGGGGGGSPSPVELRGALVGSVDPTLREQQLQQELLALKQQQQLQKQLLFAEFQKQHDHLTRQHEVQLQKHLKQQQEMLAAKQQQEMLAAKRQQELEQQRQREQQRQEELEKQRLEQQLLILRNKEKSKESAIASTEVKLRLQEFLLSKSKEPTPGGLNHSLPQHPKCWGAHHASLDQSSPPQSGPPGTPPSYKLPLPGPYDSRDDFPLRKTASEPNLKVRSRLKQKVAERRSSPLLRRKDGTVISTFKKRAVEITGAGPGASSVCNSAPGSGPSSPNSSHSTIAENGFTGSVPNIPTEMLPQHRALPLDSSPNQFSLYTSPSLPNISLGLQATVTVTNSHLTASPKLSTQQEAERQALQSLRQGGTLTGKFMSTSSIPGCLLGVALEGDGSPHGHASLLQHVLLLEQARQQSTLIAVPLHGQSPLVTGERVATSMRTVGKLPRHRPLSRTQSSPLPQSPQALQQLVMQQQHQQFLEKQKQQQLQLGKILTKTGELPRQPTTHPEETEEELTEQQEVLLGEGALTMPREGSTESESTQEDLEEEDEEDDGEEEEDCIQVKDEEGESGAEEGPDLEEPGAGYKKLFSDAQPLQPLQVYQAPLSLATVPHQALGRTQSSPAAPGGMKSPPDQPVKHLFTTGPISQKMYAVLPCGGIGVDSDTVWNEMHSSSAVRMAVGCLLELAFKVAAGELKNGFAIIRPPGHHAEESTAMGFCFFNSVAITAKLLQQKLNVGKVLIVDWDIHHGNGTQQAFYNDPSVLYISLHRYDNGNFFPGSGAPEEVGGGPGVGYNVNVAWTGGVDPPIGDVEYLTAFRTVVMPIAHEFSPDVVLVSAGFDAVEGHLSPLGGYSVTARCFGHLTRQLMTLAGGRVVLALEGGHDLTAICDASEACVSALLSVELQPLDEAVLQQKPNINAVATLEKVIEIQSKHWSCVQKFAAGLGRSLREAQAGETEEAETVSAMALLSVGAEQAQAAAAREHSPRPAEEPMEQEPAL

SEQ ID NO: 49225 - protein, 1122 aa, Homo sapiens
MNSPNESDGMSGREPSLEILPRTSLHSIPVTVEVKPVLPRAMPSSMGGGGGGSPSPVELRGALVGSVDPTLREQQLQQELLALKQQQQLQKQLLFAEFQKQHDHLTRQHEVQLQKHLKQQQEMLAAKQQQEMLAAKRQQELEQQRQREQQRQEELEKQRLEQQLLILRNKEKSKESAIASTEVKLRLQEFLLSKSKEPTPGGLNHSLPQHPKCWGAHHASLDQSSPPQSGPPGTPPSYKLPLPGPYDSRDDFPLRKTASEPNLKVRSRLKQKVAERRSSPLLRRKDGTVISTFKKRAVEITGAGPGASSVCNSAPGSGPSSPNSSHSTIAENGFTGSVPNIPTEMLPQHRALPLDSSPNQFSLYTSPSLPNISLGLQATVTVTNSHLTASPKLSTQQEAERQALQSLRQGGTLTGKFMSTSSIPGCLLGVALEGDGSPHGHASLLQHVLLLEQARQQSTLIAVPLHGQSPLVTGERVATSMRTVGKLPRHRPLSRTQSSPLPQSPQALQQLVMQQQHQQFLEKQKQQQLQLGKILTKTGELPRQPTTHPEETEEELTEQQEVLLGEGALTMPREGSTESESTQEDLEEEDEEDDGEEEEDCIQVKDEEGESGAEEGPDLEEPGAGYKKLFSDAQPLQPLQVYQAPLSLATVPHQALGRTQSSPAAPGGMKSPPDQPVKHLFTTGVVYDTFMLKHQCMCGNTHVHPEHAGRIQSIWSRLQETGLLSKCERIRGRKATLDEIQTVHSEYHTLLYGTSPLNRQKLDSKKLLGPISQKMYAVLPCGGIGVDSDTVWNEMHSSSAVRMAVGCLLELAFKVAAGELKNGFAIIRPPGHHAEESTAMGFCFFNSVAITAKLLQQKLNVGKVLIVDWDIHHGNGTQQAFYNDPSVLYISLHRYDNGNFFPGSGAPEEVGGGPGVGYNVNVAWTGGVDPPIGDVEYLTAFRTVVMPIAHEFSPDVVLVSAGFDAVEGHLSPLGGYSVTARCFGHLTRQLMTLAGGRVVLALEGGHDLTAICDASEACVSALLSVELQPLDEAVLQQKPNINAVATLEKVIEIQSKHWSCVQKFAAGLGRSLREAQAGETEEAETVSAMALLSVGAEQAQAAAAREHSPRPAEEPMEQEPAL

SEQ ID NO: 49226 - protein, 591 aa, Homo sapiens
MMSSPAQSRSPDLMWNLVPWVLFCGCCRIFPDGVAGREQLLAQQRMHSMISSVDVKSEVPVGLEPISPLDLRTDLRMMMPVVDPVVREKQLQQELLLIQQQQQIQKQLLIAEFQKQHENLTRQHQAQLQEHIKELLAIKQQQELLEKEQKLEQQRQEQEVERHRREQQLPPLRGKDRGRERAVASTEVKQKLQEFLLSKSATKDTPTNGKNHSVSRHPKLWYTAAHHTSLDQSSPPLSGTSPSYKYTLPGAQDAKDDFPLRKTESSVSSSSPGSGPSSPNNGPTGSVTENETSVLPPTPHAEQMVSQQRILIHEDSMNLLSLYTSPSLPNITLGLPAVPSQLNASNSLKEKQKCETQTLRQGVPLPGQYGGSIPASSSHPHVTLEGKPPNSSHQALLQHLLLKEQMRQQKLLVAGGVPLHPQSPLATKERISPGIRGTHKLPRHRPLNRTQSAPLPQSTLAQLVIQQQHQQFLEKQKQYQQQIHMNKLLSKSIEQLKQPGSHLEEAEEELQGDQAMQEDRAPSSGNSTRSDSSACVDDTLGQVGAVKVKEEPVDSDEDAQIQEMESGEQAAFMQQVIGKDLAPGFVIKVII

SEQ ID NO: 49227 - protein, 923 aa, Homo sapiens
LHKLSSLVDVKSEVPVGLEPISPLDLRTDLRMMMPVVDPVVREKQLQQELLLIQQQQQIQKQLLIAEFQKQHENLTRQHQAQLQEHIKELLAIKQQQELLEKEQKLEQQRQEQEVERHRREQQLPPLRGKDRGRERAVASTEVKQKLQEFLLSKSATKDTPTNGKNHSVSRHPKLWYTAAHHTSLDQSSPPLSGTSPSYKYTLPGAQDAKDDFPLRKTASEPNLKVRSRLKQKVAERRSSPLLRRKDGNVVTSFKKRMFEVTESSVSSSSPGSGPSSPNNGPTGSVTENETSVLPPTPHAEQMVSQQRILIHEDSMNLLSLYTSPSLPNITLGLPAVPSQLNASNSLKEKQKCETQTLRQGVPLPGQYGGSIPASSSHPHVTLEGKPPNSSHQALLQHLLLKEQMRQQKLLVAGGVPLHPQSPLATKERISPGIRGTHKLPRHRPLNRTQSAPLPQSTLAQLVIQQQHQQFLEKQKQYQQQIHMNKPFLEPTHTRALSVRQAPLAAVGMDGLEKHRLVSRTHSSPAASVLPHPAMDRPLQPGSATGIAYDPLMLKHQCVCGNSTTHPEHAGRIQSIWSRLQETGLLNKCERIQGRKASLEEIQLVHSEHHSLLYGTNPLDGQKLDPRILLGDDSQKFFSSLPCGGLGVDSDTIWNELHSSGAARMAVGCVIELASKVASGELKNGFAVVRPPGHHAEESTAMGFCFFNSVAITAKYLRDQLNISKILIVDLDVHHGNGTQQAFYADPSILYISLHRYDEGNFFPGSGAPNEVGTGLGEGYNINIAWTGGLDPPMGDVEYLEAFRTIVKPVAKEFDPDMVLVSAGFDALEGHTPPLGGYKVTAKCFGHLTKQLMTLADGRVVLALEGGHDLTAICDASEACVNALLGNELEPLAEDILHQSPNMNAVISLQKIIEIQSMSLKFS

SEQ ID NO: 49228 - protein, 1025 aa, Homo sapiens
MHSMISSVDVKSEVPVGLEPISPLDLRTDLRMMMPVVDPVVREKQLQQELLLIQQQQQIQKQLLIAEFQKQHENLTRQHQAQLQEHIKLQQELLAIKQQQELLEKEQKLEQQRQEQEVERHRREQQLPPLRGKDRGRERAVASTEVKQKLQEFLLSKSATKDTPTNGKNHSVSRHPKLWYTAAHHTSLDQSSPPLSGTSPSYKYTLPGAQDAKDDFPLRKTESSVSSSSPGSGPSSPNNGPTGSVTENETSVLPPTPHAEQMVSQQRILIHEDSMNLLSLYTSPSLPNITLGLPAVPSQLNASNSLKEKQKCETQTLRQGVPLPGQYGGSIPASSSHPHVTLEGKPPNSSHQALLQHLLLKEQMRQQKLLVAGGVPLHPQSPLATKERISPGIRGTHKLPRHRPLNRTQSAPLPQSTLAQLVIQQQHQQFLEKQKQYQQQIHMNKLLSKSIEQLKQPGSHLEEAEEELQGDQAMQEDRAPSSGNSTRSDSSACVDDTLGQVGAVKVKEEPVDSDEDAQIQEMESGEQAAFMQQPFLEPTHTRALSVRQAPLAAVGMDGLEKHRLVSRTHSSPAASVLPHPAMDRPLQPGSATGIAYDPLMLKHQCVCGNSTTHPEHAGRIQSIWSRLQETGLLNKCERIQGRKASLEEIQLVHSEHHSLLYGTNPLDGQKLDPRILLGDDSQKFFSSLPCGGLGVDSDTIWNELHSSGAARMAVGCVIELASKVASGELKNGFAVVRPPGHHAEESTAMGFCFFNSVAITAKYLRDQLNISKILIVDLDVHHGNGTQQAFYADPSILYISLHRYDEGNFFPGSGAPNEVGTGLGEGYNINIAWTGGLDPPMGDVEYLEAFRTIVKPVAKEFDPDMVLVSAGFDALEGHTPPLGGYKVTAKCFGHLTKQLMTLADGRVVLALEGGHDLTAICDASEACVNALLGNELEPLAEDILHQSPNMNAVISLQKIIEIQSKYWKSVRMVAVPRGCALAGAQLQEETETVSALASLTVDVEQPFAQEDSRTAGEPMEEEPAL

SEQ ID NO: 49229 - protein, 590 aa, Homo sapiens
MHSMISSVDVKSEVPVGLEPISPLDLRTDLRMMMPVVDPVVREKQLQQELLLIQQQQQIQKQLLIAEFQKQHENLTRQHQAQLQEHIKELLAIKQQQELLEKEQKLEQQRQEQEVERHRREQQLPPLRGKDRGRERAVASTEVKQKLQEFLLSKSATKDTPTNGKNHSVSRHPKLWYTAAHHTSLDQSSPPLSGTSPSYKYTLPGAQDAKDDFPLRKTASEPNLKVRSRLKQKVAERRSSPLLRRKDGNVVTSFKKRMFEVTESSVSSSSPGSGPSSPNNGPTGSVTENETSVLPPTPHAEQMVSQQRILIHEDSMNLLSLYTSPSLPNITLGLPAVPSQLNASNSLKEKQKCETQTLRQGVPLPGQYGGSIPASSSHPHVTLEGKPPNSSHQALLQHLLLKEQMRQQKLLVAGGVPLHPQSPLATKERISPGIRGTHKLPRHRPLNRTQSAPLPQSTLAQLVIQQQHQQFLEKQKQYQQQIHMNKLLSKSIEQLKQPGSHLEEAEEELQGDQAMQEDRAPSSGNSTRSDSSACVDDTLGQVGAVKVKEEPVDSDEDAQIQEMESGEQAAFMQQVIGKDLAPGFVIKVII

SEQ ID NO: 49230 - protein, 577 aa, Homo sapiens
MLQTIYESDSCFSSDGVAGREQLLAQQRMHSMISSVDVKSEVPVGLEPISPLDLRTDLRMMMPVVDPVVREKQLQQELLLIQQQQQIQKQLLIAEFQKQHENLTRQHQAQLQEHIKLQQELLAIKQQQELLEKEQKLEQQRQEQEVERHRREQQLPPLRGKDRGRERAVASTEVKQKLQEFLLSKSATKDTPTNGKNHSVSRHPKLWYTAAHHTSLDQSSPPLSGTSPSYKYTLPGAQDAKDDFPLRKTESSVSSSSPGSGPSSPNNGPTGSVTENETSVLPPTPHAEQMVSQQRILIHEDSMNLLSLYTSPSLPNITLGLPAVPSQLNASNSLKEKQKCETQTLRQGVPLPGQYGGSIPASSSHPHVTLEGKPPNSSHQALLQHLLLKEQMRQQKLLVAGGVPLHPQSPLATKERISPGIRGTHKLPRHRPLNRTQSAPLPQSTLAQLVIQQQHQQFLEKQKQYQQQIHMNKLLSKSIEQLKQPGSHLEEAEEELQGDQAMQEDRAPSSGNSTRSDSSACVDDTLGQVGAVKVKEEPVDSDEDAQIQEMESGEQAAFMQQVIGKDLAPGFVIKVII

SEQ ID NO: 49231 - protein, 1066 aa, Homo sapiens
MHSMISSVDVKSEVPVGLEPISPLDLRTDLRMMMPVVDPVVREKQLQQELLLIQQQQQIQKQLLIAEFQKQHENLTRQHQAQLQEHIKELLAIKQQQELLEKEQKLEQQRQEQEVERHRREQQLPPLRGKDRGRERAVASTEVKQKLQEFLLSKSATKDTPTNGKNHSVSRHPKLWYTAAHHTSLDQSSPPLSGTSPSYKYTLPGAQDAKDDFPLRKTASEPNLKVRSRLKQKVAERRSSPLLRRKDGNVVTSFKKRMFEVTESSVSSSSPGSGPSSPNNGPTGSVTENETSVLPPTPHAEQMVSQQRILIHEDSMNLLSLYTSPSLPNITLGLPAVPSQLNASNSLKEKQKCETQTLRQGVPLPGQYGGSIPASSSHPHVTLEGKPPNSSHQALLQHLLLKEQMRQQKLLVAGGVPLHPQSPLATKERISPGIRGTHKLPRHRPLNRTQSAPLPQSTLAQLVIQQQHQQFLEKQKQYQQQIHMNKLLSKSIEQLKQPGSHLEEAEEELQGDQAMQEDRAPSSGNSTRSDSSACVDDTLGQVGAVKVKEEPVDSDEDAQIQEMESGEQAAFMQQPFLEPTHTRALSVRQAPLAAVGMDGLEKHRLVSRTHSSPAASVLPHPAMDRPLQPGSATGIAYDPLMLKHQCVCGNSTTHPEHAGRIQSIWSRLQETGLLNKCERIQGRKASLEEIQLVHSEHHSLLYGTNPLDGQKLDPRILLGDDSQKFFSSLPCGGLGVDSDTIWNELHSSGAARMAVGCVIELASKVASGELKNGFAVVRPPGHHAEESTAMGFCFFNSVAITAKYLRDQLNISKILIVDLDVHHGNGTQQAFYADPSILYISLHRYDEGNFFPGSGAPNEVGTGLGEGYNINIAWTGGLDPPMGDVEYLEAFRTIVKPVAKEFDPDMVLVSAGFDALEGHTPPLGGYKVTAKCFGHLTKQLMTLADGRVVLALEGGHDLTAICDASEACVNALLGNELEPLAEDILHQSPNMNAVISLQKIIEIQSKYWKSVRMVAVPRGCALAGAQLQEETETVSALASLTVDVEQPFAQEDSRTAGEPMEEEPAL

SEQ ID NO: 49232 - protein, 148 aa, Homo sapiens
MHSMISSVDVKSEVPVGLEPISPLDLRTDLRMMMPVVDPVVREKQLQQELLLIQQQQQIQKQLLIAEFQKQHENLTRQHQAQLQEHIKLQQELLAIKQQQELLEKEQKLEQQRQEQEVERHRREQQLPPLRGKDRGRERAVASTEVKQ

SEQ ID NO: 49233 - protein, 138 aa, Homo sapiens
MHSMISSVDVKSEVPVGLEPISPLDLRTDLRMMMPVVDPVVREKQLQQELLLIQQQQQIQKQLLIAEFQKQHENLTRQHQAQLQEHIKLQQELLAIKQQQELLEKEQKLEQQRQEQEVERHRREQQLPPLRGKDRGRE

SEQ ID NO: 49234 - protein, 588 aa, Homo sapiens
MMSSPAQPDLMWNLVPWVLFCGCCRIFPDGVAGREQLLAQQRMHSMISSVDVKSEVPVGLEPISPLDLRTDLRMMMPVVDPVVREKQLQQELLLIQQQQQIQKQLLIAEFQKQHENLTRQHQAQLQEHIKELLAIKQQQELLEKEQKLEQQRQEQEVERHRREQQLPPLRGKDRGRERAVASTEVKQKLQEFLLSKSATKDTPTNGKNHSVSRHPKLWYTAAHHTSLDQSSPPLSGTSPSYKYTLPGAQDAKDDFPLRKTESSVSSSSPGSGPSSPNNGPTGSVTENETSVLPPTPHAEQMVSQQRILIHEDSMNLLSLYTSPSLPNITLGLPAVPSQLNASNSLKEKQKCETQTLRQGVPLPGQYGGSIPASSSHPHVTLEGKPPNSSHQALLQHLLLKEQMRQQKLLVAGGVPLHPQSPLATKERISPGIRGTHKLPRHRPLNRTQSAPLPQSTLAQLVIQQQHQQFLEKQKQYQQQIHMNKLLSKSIEQLKQPGSHLEEAEEELQGDQAMQEDRAPSSGNSTRSDSSACVDDTLGQVGAVKVKEEPVDSDEDAQIQEMESGEQAAFMQQVIGKDLAPGFVIKVII

SEQ ID NO: 49235 - protein, 546 aa, Homo sapiens
MHSMISSVDVKSEVPVGLEPISPLDLRTDLRMMMPVVDPVVREKQLQQELLLIQQQQQIQKQLLIAEFQKQHENLTRQHQAQLQEHIKELLAIKQQQELLEKEQKLEQQRQEQEVERHRREQQLPPLRGKDRGRERAVASTEVKQKLQEFLLSKSATKDTPTNGKNHSVSRHPKLWYTAAHHTSLDQSSPPLSGTSPSYKYTLPGAQDAKDDFPLRKTESSVSSSSPGSGPSSPNNGPTGSVTENETSVLPPTPHAEQMVSQQRILIHEDSMNLLSLYTSPSLPNITLGLPAVPSQLNASNSLKEKQKCETQTLRQGVPLPGQYGGSIPASSSHPHVTLEGKPPNSSHQALLQHLLLKEQMRQQKLLVAGGVPLHPQSPLATKERISPGIRGTHKLPRHRPLNRTQSAPLPQSTLAQLVIQQQHQQFLEKQKQYQQQIHMNKLLSKSIEQLKQPGSHLEEAEEELQGDQAMQEDRAPSSGNSTRSDSSACVDDTLGQVGAVKVKEEPVDSDEDAQIQEMESGEQAAFMQQVIGKDLAPGFVIKVII

SEQ ID NO: 49236 - protein, 1011 aa, Homo sapiens
MHSMISSVDVKSEVPVGLEPISPLDLRTDLRMMMPVVDPVVREKQLQQELLLIQQQQQIQKQLLIAEFQKQHENLTRQHQAQLQEHIKELLAIKQQQELLEKEQKLEQQRQEQEVERHRREQQLPPLRGKDRGRERAVASTEVKQKLQEFLLSKSATKDTPTNGKNHSVSRHPKLWYTAAHHTSLDQSSPPLSGTSPSYKYTLPGAQDAKDDFPLRKTASEPNLKVRSRLKQKVAERRSSPLLRRKDGNVVTSFKKRMFEVTESSVSSSSPGSGPSSPNNGPTGSVTENETSVLPPTPHAEQMVSQQRILIHEDSMNLLSLYTSPSLPNITLGLPAVPSQLNASNSLKEKQKCETQTLRQGVPLPGQYGGSIPASSSHPHVTLEGKPPNSSHQALLQHLLLKEQMRQQKLLVAGGVPLHPQSPLATKERISPGIRGTHKLPRHRPLNRTQSAPLPQSTLAQLVIQQQHQQFLEKQKQYQQQIHMNKLLSKSIEQLKQPGSHLEEAEEELQGDQAMQEDRAPSSGNSTRSDSSACVDDTLGQVGAVKVKEEPVDSDEDAQIQEMESGEQAAFMQQPFLEPTHTRALSVRQAPLAAVGMDGLEKHRLVSRTHSSPAASVLPHPAMDRPLQPGSATGIAYDPLMLKHQCVCGNSTTHPEHAGRIQSIWSRLQETGLLNKCERIQGRKASLEEIQLVHSEHHSLLYGTNPLDGQKLDPRILLGDDSQKFFSSLPCGGLGVDSDTIWNELHSSGAARMAVGCVIELASKVASGELKNGFAVVRPPGHHAEESTAMGFCFFNSVAITAKYLRDQLNISKILIVDLDVHHGNGTQQAFYADPSILYISLHRYDEGNFFPGSGAPNEVGTGLGEGYNINIAWTGGLDPPMGDVEYLEAFRTIVKPVAKEFDPDMVLVSAGFDALEGHTPPLGGYKVTAKCFGHLTKQLMTLADGRVVLALEGGHDLTAICDASEACVNALLGNELEPLAEDILHQSPNMNAVISLQKIIEIQSMSLKFS

SEQ ID NO: 49237 - protein, 23 aa, Homo sapiens
MHSMISSVDVKSEVPVGLEPISP

SEQ ID NO: 49238 - protein, 1069 aa, Homo sapiens
MHSMISSVDVKSEVPVGLEPISPLDLRTDLRMMMPVVDPVVREKQLQQELLLIQQQQQIQKQLLIAEFQKQHENLTRQHQAQLQEHIKLQQELLAIKQQQELLEKEQKLEQQRQEQEVERHRREQQLPPLRGKDRGRERAVASTEVKQKLQEFLLSKSATKDTPTNGKNHSVSRHPKLWYTAAHHTSLDQSSPPLSGTSPSYKYTLPGAQDAKDDFPLRKTASEPNLKVRSRLKQKVAERRSSPLLRRKDGNVVTSFKKRMFEVTESSVSSSSPGSGPSSPNNGPTGSVTENETSVLPPTPHAEQMVSQQRILIHEDSMNLLSLYTSPSLPNITLGLPAVPSQLNASNSLKEKQKCETQTLRQGVPLPGQYGGSIPASSSHPHVTLEGKPPNSSHQALLQHLLLKEQMRQQKLLVAGGVPLHPQSPLATKERISPGIRGTHKLPRHRPLNRTQSAPLPQSTLAQLVIQQQHQQFLEKQKQYQQQIHMNKLLSKSIEQLKQPGSHLEEAEEELQGDQAMQEDRAPSSGNSTRSDSSACVDDTLGQVGAVKVKEEPVDSDEDAQIQEMESGEQAAFMQQPFLEPTHTRALSVRQAPLAAVGMDGLEKHRLVSRTHSSPAASVLPHPAMDRPLQPGSATGIAYDPLMLKHQCVCGNSTTHPEHAGRIQSIWSRLQETGLLNKCERIQGRKASLEEIQLVHSEHHSLLYGTNPLDGQKLDPRILLGDDSQKFFSSLPCGGLGVDSDTIWNELHSSGAARMAVGCVIELASKVASGELKNGFAVVRPPGHHAEESTAMGFCFFNSVAITAKYLRDQLNISKILIVDLDVHHGNGTQQAFYADPSILYISLHRYDEGNFFPGSGAPNEVGTGLGEGYNINIAWTGGLDPPMGDVEYLEAFRTIVKPVAKEFDPDMVLVSAGFDALEGHTPPLGGYKVTAKCFGHLTKQLMTLADGRVVLALEGGHDLTAICDASEACVNALLGNELEPLAEDILHQSPNMNAVISLQKIIEIQSKYWKSVRMVAVPRGCALAGAQLQEETETVSALASLTVDVEQPFAQEDSRTAGEPMEEEPAL

SEQ ID NO: 49239 - protein, 562 aa, Homo sapiens
MMMPVVDPVVREKQLQQELLLIQQQQQIQKQLLIAEFQKQHENLTRQHQAQLQEHIKLQQELLAIKQQQELLEKEQKLEQQRQEQEVERHRREQQLPPLRGKDRGRERAVASTEVKQKLQEFLLSKSATKDTPTNGKNHSVSRHPKLWYTAAHHTSLDQSSPPLSGTSPSYKYTLPGAQDAKDDFPLRKTASEPNLKVRSRLKQKVAERRSSPLLRRKDGNVVTSFKKRMFEVTESSVSSSSPGSGPSSPNNGPTGSVTENETSVLPPTPHAEQMVSQQRILIHEDSMNLLSLYTSPSLPNITLGLPAVPSQLNASNSLKEKQKCETQTLRQGVPLPGQYGGSIPASSSHPHVTLEGKPPNSSHQALLQHLLLKEQMRQQKLLVAGGVPLHPQSPLATKERISPGIRGTHKLPRHRPLNRTQSAPLPQSTLAQLVIQQQHQQFLEKQKQYQQQIHMNKLLSKSIEQLKQPGSHLEEAEEELQGDQAMQEDRAPSSGNSTRSDSSACVDDTLGQVGAVKVKEEPVDSDEDAQIQEMESGEQAAFMQQVIGKDLAPGFVIKVII

SEQ ID NO: 49240 - protein, 513 aa, Homo sapiens
MMMPVVDPVVREKQLQQELLLIQQQQQIQKQLLIAEFQKQHENLTRQHQAQLQEHIKELLAIKQQQELLEKEQKLEQQRQEQEVERHRREQQLPPLRGKDRGRERAVASTEVKQKLQEFLLSKSATKDTPTNGKNHSVSRHPKLWAAHHTSLDQSSPPLSGTSPSYKYTLPGAQDAKDDFPLRKTESSVSSSSPGSGPSSPNNGPTGSVTENETSVLPPTPHAEQMVSQQRILIHEDSMNLLSLYTSPSLPNITLGLPAVPSQLNASNSLKEKQKCETQTLRQGVPLPGQYGGSIPASSSHPHVTLEGKPPNSSHQALLQHLLLKEQMRQQKLLVAGGVPLHPQSPLATKERISPGIRGTHKLPRHRPLNRTQSAPLPQSTLAQLVIQQQHQQFLEKQKQYQQQIHMNKLLSKSIEQLKQPGSHLEEAEEELQGDQAMQEDRAPSSGNSTRSDSSACVDDTLGQVGAVKVKEEPVDSDEDAQIQEMESGEQAAFMQQVIGKDLAPGFVIKVII

SEQ ID NO: 49241 - protein, 659 aa, Homo sapiens
MRVNHTVSTMLPTCMVHRQTMSCSGAGGITAFVAFRDVAVYFTQEEWRLLSPAQRTLHREVMLETYNHLVSLEIPSSKPKLIAQLERGEAPWREERKCPLDLCPESKPEIQLSPSCPLIFSSQQALSQHVWLSHLSQLFSSLWAGNPLHLGKHYPEDQKQQQDPFCFSGKAEWIQEGEDSRLLFGRVSKNGTSKALSSPPEEQQPAQSKEDNTVVDIGSSPERRADLEETDKVLHGLEVSGFGEIKYEEFGPGFIKESNLLSLQKTQTGETPYMYTEWGDSFGSMSVLIKNPRTHSGGKPYVCRECGRGFTWKSNLITHQRTHSGEKPYVCKDCGRGFTWKSNLFTHQRTHSGLKPYVCKECGQSFSLKSNLITHQRAHTGEKPYVCRECGRGFRQHSHLVRHKRTHSGEKPYICRECEQGFSQKSHLIRHLRTHTGEKPYVCTECGRHFSWKSNLKTHQRTHSGVKPYVCLECGQCFSLKSNLNKHQRSHTGEKPFVCTECGRGFTRKSTLSTHQRTHSGEKPFVCAECGRGFNDKSTLISHQRTHSGEKPFMCRECGRRFRQKPNLFRHKRAHSGAFVCRECGQGFCAKLTLIKHQRAHAGGKPHVCRECGQGFSRQSHLIRHQRTHSGEKPYICRKCGRGFSRKSNLIRHQRTHSG

SEQ ID NO: 49242 - protein, 640 aa, Homo sapiens
MATGLLRAKKEAFVAFRDVAVYFTQEEWRLLSPAQRTLHREVMLETYNHLVSLEIPSSKPKLIAQLERGEAPWREERKCPLDLCPESKPEIQLSPSCPLIFSSQQALSQHVWLSHLSQLFSSLWAGNPLHLGKHYPEDQKQQQDPFCFSGKAEWIQEGEDSRLLFGRVSKNGTSKALSSPPEEQQPAQSKEDNTVVDIGSSPERRADLEETDKVLHGLEVSGFGEIKYEEFGPGFIKESNLLSLQKTQTGETPYMYTEWGDSFGSMSVLIKNPRTHSGGKPYVCRECGRGFTWKSNLITHQRTHSGEKPYVCKDCGRGFTWKSNLFTHQRTHSGLKPYVCKECGQSFSLKSNLITHQRAHTGEKPYVCRECGRGFRQHSHLVRHKRTHSGEKPYICRECEQGFSQKSHLIRHLRTHTGEKPYVCTECGRHFSWKSNLKTHQRTHSGVKPYVCLECGQCFSLKSNLNKHQRSHTGEKPFVCTECGRGFTRKSTLSTHQRTHSGEKPFVCAECGRGFNDKSTLISHQRTHSGEKPFMCRECGRRFRQKPNLFRHKRAHSGAFVCRECGQGFCAKLTLIKHQRAHAGGKPHVCRECGQGFSRQSHLIRHQRTHSGEKPYICRKCGRGFSRKSNLIRHQRTHSG

SEQ ID NO: 49243 - protein, 438 aa, Homo sapiens
MLETYNHLVSLEIPSSKPKLIAQLERGEAPWREERKCPLDLCPESKPEIQLSPSCPLIFSSQQALSQHVWLSHLSQLFSSLWAGNPLHLGKHYPEDQKQQQDPFCFSGKAEWIQEGEDSRLLFGRVSKNGTSKALSSPPEEQQPAQSKEDNTVVDIGSSPERRADLEETDKVLHGLEVSGFGEIKYEEFGPGFIKESNLLSLQKSHLIRHLRTHTGEKPYVCTECGRHFSWKSNLKTHQRTHSGVKPYVCLECGQCFSLKSNLNKHQRSHTGEKPFVCTECGRGFTRKSTLSTHQRTHSGEKPFVCAECGRGFNDKSTLISHQRTHSGEKPFMCRECGRRFRQKPNLFRHKRAHSGAFVCRECGQGFCAKLTLIKHQRAHAGGKPHVCRECGQGFSRQSHLIRHQRTHSGEKPYICRKCGRGFSRKSNLIRHQRTHSG

SEQ ID NO: 49244 - protein, 598 aa, Homo sapiens
MLETYNHLVSLEIPSSKPKLIAQLERGEAPWREERKCPLDLCPESKPEIQLSPSCPLIFSSQQALSQHVWLSHLSQLFSSLWAGNPLHLGKHYPEDQKQQQDPFCFSGKAEWIQEGEDSRLLFGRVSKNGTSKALSSPPEEQQPAQSKEDNTVVDIGSSPERRADLEETDKVLHGLEVSGFGEIKYEEFGPGFIKESNLLSLQKTQTGETPYMYTEWGDSFGSMSVLIKNPRTHSGGKPYVCRECGRGFTWKSNLITHQRTHSGEKPYVCKDCGRGFTWKSNLFTHQRTHSGLKPYVCKECGQSFSLKSNLITHQRAHTGEKPYVCRECGRGFRQHSHLVRHKRTHSGEKPYICRECEQGFSQKSHLIRHLRTHTGEKPYVCTECGRHFSWKSNLKTHQRTHSGVKPYVCLECGQCFSLKSNLNKHQRSHTGEKPFVCTECGRGFTRKSTLSTHQRTHSGEKPFVCAECGRGFNDKSTLISHQRTHSGEKPFMCRECGRRFRQKPNLFRHKRAHSGAFVCRECGQGFCAKLTLIKHQRAHAGGKPHVCRECGQGFSRQSHLIRHQRTHSGEKPYICRKCGRGFSRKSNLIRHQRTHSG

SEQ ID NO: 49245 - protein, 729 aa, Homo sapiens
SWLGPGKASLLRSFPHLCTLLPDFRLQDPQRAPAFHLSSETLPFSRKSTQETRKMATGLLRAKKEAFVAFRDVAVYFTQEEWRLLSPAQRTLHREVMLETYNHLVSLEIPSSKPKLIAQLERGEAPWREERKCPLDLCPAESKPEIQLSPSCPLIFSSQQALSQHVWLSHLSQLFSSLWAGNPLHLGKHYPEDQKQQQDPFCFSGKAEWIQEGEDSRLLFGRVSKNGTSKALSSPPEEQQPAQSKEDNTVVDIGSSPERRADLEETDKVLHGLEVSGFGEIKYEEFGPGFIKESNLLSLQKTQTGETPYMYTEWGDSFGSMSVLIKNPRTHSGGKPYVCRECGRGFTWKSNLITHQRTHSGEKPYVCKDCGRGFTWKSNLFTHQRTHSGLKPYVCKECGQSFSLKSNLITHQRAHTGEKPYVCRECGRGFRQHSHLVRHKRTHSGEKPYICRECEQGFSQKSHLIRHLRTHTGEKPYVCTECGRHFSWKSNLKTHQRTHSGVKPYVCLECGQCFSLKSNLNKHQRSHTGEKPFVCTECGRGFTRKSTLSTHQRTHSGEKPFVCAECGRGFNDKSTLISHQRTHSGEKPFMCRECGRRFRQKPNLFRHKRAHSGAFVCRECGQGFCAKLTLIKHQRAHGGSLMCAGSVGKALAGSHTSLDTRGHIQERSLIFAESVDGALVGSPTLSDIRGHTQDRNFMCIGNVVQPLARSHTSSDTRGHTQCCGFFSHC

SEQ ID NO: 49246 - protein, 386 aa, Homo sapiens
MYTEWGDSFGSMSVLIKNPRTHSGGKPYVCRECGRGFTWKSNLITHQRTHSGEKPYVCKDCGRGFTWKSNLFTHQRTHSGLKPYVCKECGQSFSLKSNLITHQRAHTGEKPYVCRECGRGFRQHSHLVRHKRTHSGEKPYICRECEQGFSQKSHLIRHLRTHTGEKPYVCTECGRHFSWKSNLKTHQRTHSGVKPYVCLECGQCFSLKSNLNKHQRSHTGEKPFVCTECGRGFTRKSTLSTHQRTHSGEKPFVCAECGRGFNDKSTLISHQRTHSGEKPFMCRECGRRFRQKPNLFRHKRAHSGAFVCRECGQGFCAKLTLIKHQRAHAGGKPHVCRECGQGFSRQSHLIRHQRTHSGEKPYICRKCGRGFSRKSNLIRHQRTHSG

SEQ ID NO: 49247 - protein, 601 aa, Homo sapiens
MAYDDSVKKEDCFDGDHTFEDIGLAAGRSQREKKRSYKDFLREEEEIAAQVRNSSKKKLKDSELYFLGTDTHKKKRKHSSDDYYYGDISSLESSQKKKKKSSPQSTDTAMDLLKAITSPLAAGSKPSKKTGEKSSGSSSHSESKKEHHRKKVSGSSGELPLEDGGSHKSKKMKPLYVNTETLTLREPDGLKMKLILSPKEKGSSSVDEESFQYPSQQATVKKSSKKSARDEQGALLLGHELQSFLKTARKKHKSSSDAHSSPGPEGCGSDASQFAESHSANLDLSGLEPILVESDSSSGGELEAGELVIDDSYREIKKKKKSKKSKKKKDKEKHKEKRHSKSKRSLGLSAVPVGEVTVTSGPPPSIPYAGAAAPPLPLPGLHTDGHSEKKKKKEEKDKERERGEKPKKKNMSAYQVFCKEYRVTIVADHPGIDFGELSKKLAEVWKQLPEKDKLIWKQKAQYLQHKQNKAEATTVKRKASSSEGSMKVKASSVGVLSPQKKSPPTTMLLPASPAKAPETEPIDVAAHLQLLGESLSLIGHRLQETEGMVAVSGSLSVLLDSIICALGPLACLTTQLPELNGCPKQVLSNTLDNIAYIMPGL

SEQ ID NO: 49248 - protein, 492 aa, Homo sapiens
MDLLKAITSPLAAGSKPSKKTGEKSSGSSSHSESKKEHHRKKVSGSSGELPLEDGGSHKSKKMKPLYVNTETLTLREPDGLKMKLILSPKEKGSSSVDEESFQYPSQQATVKKSSKKSARDEQGALLLGHELQSFLKTARKKHKSSSDAHSSPGPEGCGSDASQFAESHSANLDLSGLEPILVESDSSSGGELEAGELVIDDSYREIKKKKKSKKSKKKKDKEKHKEKRHSKSKRSLGLSAVPVGEVTVTSGPPPSIPYAGAAAPPLPLPGLHTDGHSEKKKKKEEKDKERERGEKPKKKNMSAYQVFCKEYRVTIVADHPGIDFGELSKKLAEVWKQLPEKDKLIWKQKAQYLQHKQNKAEATTVKRKASSSEGSMKVKASSVGVLSPQKKSPPTTMLLPASPAKAPETEPIDVAAHLQLLGESLSLIGHRLQETEGMVAVSGSLSVLLDSIICALGPLACLTTQLPELNGCPKQVLSNTLDNIAYIMPGL

SEQ ID NO: 49249 - protein, 631 aa, Homo sapiens
MVSKLSQLQTELLAALLESGLSKEALIQALGEPGPYLLAGEGPLDKGESCGGGRGELAELPNGLGETRGSEDETDDDGEDFTPPILKELENLSPEEAAHQKAVVETLLQEDPWRVAKMVKSYLQQHNIPQREVVDTTGLNQSHLSQHLNKGTPMKTQKRAALYTWYVRKQREVAQQFTHAGQGGLIEEPTGDELPTKKGRRNRFKWGPASQQILFQAYERQKNPSKEERETLVEECNRAECIQRGVSPSQAQGLGSNLVTEVRVYNWFANRRKEEAFRHKLAMDTYSGPPPGPGPGPALPAHSSPGLPPPALSPSKVHGVRYGQPATSETAEVPSSSGGPLVTVSTPLHQVSPTGLEPSHSLLSTEAKLVSAAGGPLPPVSTLTALHSLEQTSPGLNQQPQNLIMASLPGVMTIGPGEPASLGPTFTNTGASTLVIGLASTQAQSVPVINSMGSSLTTLQPVQFSQPLHPSYQQPLMPPVQSHVTQSPFMATMAQLQSPHALYSHKPEVAQYTHTGLLPQTMLITDTTNLSALASLTPTKQVFTSDTEASSESGLHTPASQATTLHVPSQDPASIQHLQPAHRLSASPTVSSSSLVLYQSSDSSNGQSHLLPSNHSVIETFISTQMASSSQ

SEQ ID NO: 49250 - protein, 572 aa, Homo sapiens
MVSKLSQLQTELLAALLESGLSKEALIQALGEPGPYLLAGEGPLDKGESCGGGRGELAELPNGLGETRGSEDETDDDGEDFTPPILKELENLSPEEAAHQKAVVETLLQEDPWRVAKMVKSYLQQHNIPQREVVDTTGLNQSHLSQHLNKGTPMKTQKRAALYTWYVRKQREVAQQFTHAGQGGLIEEPTGDELPTKKGRRNRFKWGPASQQILFQAYERQKNPSKEERETLVEECNRAECIQRGVSPSQAQGLGSNLVTEVRVYNWFANRRKEEAFRHKLAMDTYSGPPPGPGPGPALPAHSSPGLPPPALSPSKVHGVRYGQPATSETAEVPSSSGGPLVTVSTPLHQVSPTGLEPSHSLLSTEAKLVSAAGGPLPPVSTLTALHSLEQTSPGLNQQPQNLIMASLPGVMTIGPGEPASLGPTFTNTGASTLVIGLASTQAQSVPVINSMGSSLTTLQPVQFSQPLHPSYQQPLMPPVQSHVTQSPFMATMAQLQSPHGERPVPHTAGDDDRGWLSMDAGERGAWQALQSACVSGTSVFPYSSNGQSHLLPSNHSVIETFISTQMASSSQ

SEQ ID NO: 49251 - protein, 521 aa, Homo sapiens
MVSKLSQLQTELLAALLESGLSKEALIQALGEPGPYLLAGEGPLDKGESCGGGRGELAELPNGLGETRGSEDETDDDGEDFTPPILKELENLSPEEAAHQKAVVETLLQEDPWRVAKMVKSYLQQHNIPQREVVDTTGLNQSHLSQHLNKGTPMKTQKRAALYTWYVRKQREVAQQFTHAGQGGLIEEPTGDELPTKKGRRNRFKWGPASQQILFQAYERQKNPSKEERETLVEECNRAECIQRGVSPSQAQGLGSNLVTEVRVYNWFANRRKEEAFRHKLAMDTYSGPPPGPGPGPALPAHSSPGLPPPALSPSKVHGVRYGQPATSETAEVPSSSGGPLVTVSTPLHQVSPTGLEPSHSLLSTEAKLVSAAGGPLPPVSTLTALHSLEQTSPGLNQQPQNLIMASLPGVMTIGPGEPASLGPTFTNTGASTLVIGKLVGMGGHLGGRLMGQPQNPGAGRATGTHSFIHQHVFIQCLLWTSHCATSVIPGDSSNGQSHLLPSNHSVIETFISTQMASSSQ

SEQ ID NO: 49252 - protein, 523 aa, Homo sapiens
MVSKLSQLQTELLAALLESGLSKEALIQALGEPGPYLLAGEGPLDKGESCGGGRGELAELPNGLGETRGSEDETDDDGEDFTPPILKELENLSPEEAAHQKAVVETLLQEDPWRVAKMVKSYLQQHNIPQREVVDTTGLNQSHLSQHLNKGTPMKTQKRAALYTWYVRKQREVAQQFTHAGQGGLIEEPTGDELPTKKGRRNRFKWGPASQQILFQAYERQKNPSKEERETLVEECNRAECIQRGVSPSQAQGLGSNLVTEVSAAGGPLPPVSTLTALHSLEQTSPGLNQQPQNLIMASLPGVMTIGPGEPASLGPTFTNTGASTLVIGLASTQAQSVPVINSMGSSLTTLQPVQFSQPLHPSYQQPLMPPVQSHVTQSPFMATMAQLQSPHALYSHKPEVAQYTHTGLLPQTMLITDTTNLSALASLTPTKQVFTSDTEASSESGLHTPASQATTLHVPSQDPASIQHLQPAHRLSASPTVSSSSLVLYQSSDSSNGQSHLLPSNHSVIETFISTQMASSSQ

SEQ ID NO: 49253 - protein, 603 aa, Homo sapiens [sequence omitted]

SEQ ID NO: 49254 - protein, 278 aa, Homo sapiens
MVSKLSQLQTELLAALLESGLSKEALIQALGEPGPYLLAGEGPLDKGESCGGGRGELAELPNGLGETRGSEDETDDDGEDFTPPILKELENLSPEEAAHQKAVVETLLQEDPWRVAKMVKSYLQQHNIPQREVVDTTGLNQSHLSQHLNKGTPMKTQKRAALYTWYVRKQREVAQRRNASREGCPHHRHRGWAPTSSRRCVSTTGLPTGAKKKPSGTSWPWTRTAGPPQGQARDLRCPLTAPLACLHLPSPPVRSTVCAMDSLRPVRLQKYPQAAAVP

SEQ ID NO: 49255 - protein, 119 aa, Homo sapiens
MVSKLSQLQTELLAALLESGLSKEALIQALGEPGPYLLAGEGPLDKGESCGGGRGELAELPNGLGETRGSEDETDDDGEDFTPPILKELENLSPEEAAHQKAVVETLLQVHPCRAGRAD

SEQ ID NO: 49256 - protein, 662 aa, Homo sapiens
MVSKLSQLQTELLAALLESGLSKEALIQALGEPGPYLLAGEGPLDKGESCGGGRGELAELPNGLGETRGSEDETDDDGEDFTPPILKELENLSPEEAAHQKAVVETLLQEDPWRVAKMVKSYLQQHNIPQREVVDTTGLNQSHLSQHLNKGTPMKTQKRAALYTWYVRKQREVAQQFTHAGQGGLIEEPTGDELPTKKGRRNRFKWGPASQQILFQAYERQKNPSKEERETLVEECNRAECIQRGVSPSQAQGLGSNLVTEVRVYNWFANRRKEEAFRHKLAMDTYSGPPPGPGPGPALPAHSSPGLPPPALSPSKVHGVRYGQPATSETAEVPSSSGGPLVTVSTPLHQVSPTGLEPSHSLLSTEAKLVSAAGGPLPPVSTLTALHSLEQTSPGLNQQPQNLIMASLPGVMTIGPGEPASLGPTFTNTGASTLVIGLASTQAQSVPVINSMGSSLTTLQPVQFSQPLHPSYQQPLMPPVQSHVTQSPFMATMAQLQSPHALYSHKPEVAQYTHTGLLPQTMLITDTTNLSALASLTPTKQVRSRPAGPPLACDRAPHPHIPRAQEAALLPQVFTSDTEASSESGLHTPASQATTLHVPSQDPASIQHLQPAHRLSASPTVSSSSLVLYQSSDSSNGQSHLLPSNHSVIETFISTQMASSSQ

SEQ ID NO: 49257 - protein, 247 aa, Homo sapiens
MVSKLSQLQTELLAALLESGLSKEALIQALGEPGPYLLAGEGPLDKGESCGGGRGELAELPNGLGETRGSEDETDDDGEDFTPPILKELENLSPEEAAHQKAVVETLLQEDPWRVAKMVKSYLQQHNIPQREVVDTTGLNQSHLSQHLNKGTPMKTQKRAALYTWYVRKQREVAQQFTHAGQGGLIEEPTGDELPTKKGRRNRFKWGPASQQILFQAYERQKNPSKEERETLVEECNRCALWTACDQ

SEQ ID NO: 49258 - protein, 452 aa, Homo sapiens
MVSKLSQLQTELLAALLESGLSKEALIQALGEPGPYLLAGEGPLDKGESCGGGRGELAELPNGLGETRGSEDETDDDGEDFTPPILKELENLSPEEAAHQKAVVETLLQEDPWRVAKMVKSYLQQHNIPQREVVDTTGLNQSHLSQHLNKGTPMKTQKRAALYTWYVRKQREVAQQFTHAGQGGLIEEPTGDELPTKKGRRNRFKWGPASQQTSPGLNQQPQNLIMASLPGVMTIGPGEPASLGPTFTNTGASTLVIGLASTQAQSVPVINSMGSSLTTLQPVQFSQPLHPSYQQPLMPPVQSHVTQSPFMATMAQLQSPHALYSHKPEVAQYTHTGLLPQTMLITDTTNLSALASLTPTKQVFTSDTEASSESGLHTPASQATTLHVPSQDPASIQHLQPAHRLSASPTVSSSSLVLYQSSDSSNGQSHLLPSNHSVIETFISTQMASSSQ

SEQ ID NO: 49259 - protein, 403 aa, Homo sapiens
MVKSYLQQHNIPQREVVDTTGLNQSHLSQHLNKGTPMKTQKRAALYTWYVRKQREVAQQFTHAGQGGLIEEPTGDELPTKKGRRNRFKWGPASQQILFQAYERQKNPSKEERETLVEECNRAECIQRGVSPSQAQGLGSNLVTEVRVYNWFANRRKEEAFRHKLAMDTYSGPPPGPGPGPALPAHSSPGLPPPALSPSKVHGVRYGQPATSETAEVPSSSGGPLVTVSTPLHQVSPTGLEPSHSLLSTEAKLVSAAGGPLPPVSTLTALHSLEQTSPGLNQQPQNLIMASLPGVMTIGPGEPASLGPTFTNTGASTLVIGKLVGMGGHLGGRLMGQPQNPGAGRATGTHSFIHTTCIYPVPTLDQSLCYISDTWVNQTDQNLSNSSREAGTKHNTSILWYLRR

SEQ ID NO: 49260 - protein, 394 aa, Homo sapiens
MVSKLSQLQTELLAALLESGLSKEALIQALGEPGPYLLAGEGPLDKGESCGGGRGELAELPNGLGETRGSEDETDDDGEDFTPPILKELENLSPEEAAHQKAVVETLLQEDPWRVAKMVKSYLQQHNIPQREVVDTTGLNQSHLSQHLNKGTPMKTQKRAALYTWYVRKQREVAQQFTHAGQGGLIEEPTGDELPTKKGRRNRFKWGPASQQILFQAYERQKNPSKEERETLVEECNRAECIQRGVSPSQAQGLGSNLVTEVRVYNWFANRRKEEAFRHKLAMDTYSGPPPGPGPGPALPAHSSPGLPPPALSPSKVHGVRYGQPATSETAEVPSSSGGPLVTVSTPLHQVSPTGLEPSHSLLSTEAKLVSAAGGPLPPAACSQPGRVARLFNF

SEQ ID NO: 49261 - protein, 638 aa, Homo sapiens
MVSKLSQLQTELLAALLESGLSKEALIQALGEPGPYLLAGEGPLDKGESCGGGRGELAELPNGLGETRGSEDETDDDGEDFTPPILKELENLSPEEAAHQKAVVETLLQEDPWRVAKMVKSYLQQHNIPQREVVDTTGLNQSHLSQHLNKGTPMKTQKRAALYTWYVRKQREVAQQFTHAGQGGLIEEPTGDELPTKKGRRNRFKWGPASQQILFQAYERQKNPSKEERETLVEECNRAECIQRGVSPSQAQGLGSNLVTEVRVYNWFANRRKEEAFRHKLAMDTYSGPPPGPGPGPALPAHSSPGLPPPALSPSKVHGVRYGQPATSETAEVPSSSGGPLVTVSTPLHQVSPTGLEPSHSLLSTEAKLVSAAGGPLPPVSTLTALHSLEQTSPGLNQQPQNLIMASLPGVMTIGPGEPASLGPTFTNTGASTLVIGLASTQAQSVPVINSMGSSLTTLQPVQFSQPLHPSYQQPLMPPVQSHVTQSPFMATMAQLQSPHALYSHKPEVAQYTHTGLLPQTMLITDTTNLSALASLTPTKQEAALLPQVFTSDTEASSESGLHTPASQATTLHVPSQDPASIQHLQPAHRLSASPTVSSSSLVLYQSSDSSNGQSHLLPSNHSVIETFISTQMASSSQ

SEQ ID NO: 49262 - protein, 471 aa, Homo sapiens [sequence omitted]

SEQ ID NO: 49263 - protein, 452 aa, Homo sapiens
MVSKLSQLQTELLAALLESGLSKEALIQALGEPGPYLLAGEGPLDKGESCGGGRGELAELPNGLGETRGSEDETDDDGEDFTPPILKELENLSPEEAAHQKAVVETLLQEDPWRVAKMVKSYLQQHNIPQREVVDTTGLNQSHLSQHLNKGTPMKTQKRAALYTWYVRKQREVAQQFTHAGQGGLIEEPTGDELPTKKGRRNRFKWGPASQQILFQAYERQKNPSKEERETLVEECNRAECIQRGVSPSQAQGLGSNLVTEVRVYNWFANRRKEEAFRHKLAMDTYSGPPPGPGPGPALPAHSSPGLPPPALSPSKVHGVRYGQPATSETAEVPSSSGGPLVTVSTPLHQVSPTGLEPSHSLLSTEAKLVSAAGGPLPPVSTLTALHSLEQTSPGLNQQPQNLIMASLPGVMTIGPGEPASLGPTFTNTGASTLPLFGAGVAELTRQQGPSS

SEQ ID NO: 49264 - protein, 356 aa, Homo sapiens
  VARIANT 1: note = MOD_RES - Any amino acid
XWLVGFWGGSGCKEFGLCLPAGRQTQPTRWGRRLAWWTRAAWPCGSRAMVSKLSQLQTELLAALLESGLSKEALIQALGEPGPYLLAGEGPLDKGESCGGGRGELAELPNGLGETRGSEDETDDDGEDFTPPILKELENLSPEEAAHQKAVVETLLQEDPWRVAKMVKSYLQQHNIPQREVVDTTGLNQSHLSQHLNKGTPMKTQKRAALYTWYVRKQREVAQQFTHAGQGGLIEEPTGDELPTKKGRRNRFKWGPASQQILFQAYERQKNPSKEERETLVEECNRAECIQRGVSPSQPQPAEYRSQAGLSSWGPPPPCQHPDSTAQLGADIPRPQPAAPEPHHGLTSWGHDHRAW

SEQ ID NO: 49265 - protein, 748 aa, Homo sapiens
MLGTLRAMEGEDVEDDQLLQKLRASRRRFQRRMQRLIEKYNQPFEDTPVVQMATLTYETPQGLRIWGGRLIKERNEGEIQDSSMKPADRTDGSVQAAAWGPELPSHRTVLGADSKSGEVDATSDQEESVAWALAPAVPQSPLKNELRRKYLTQVDILLQGAEYFECAGNRAGRDVRVTPLPSLASPAVPAPGYCSRISRKSPGDPAKPASSPREWDPLHPSSTDMALVPRNDSLSLQETSSSSFLSSQPFEDDDICNVTISDLYAGMLHSMSRLLSTKPSSIISTKTFIMQNWNSRRRHRYKSRMNKTYCKGARRSQRSSKENFIPCSEPVKGTGALRDCKNVLDVSCRKTGLKLEKAFLEVNRPQIHKLDPSWKERKVTPSKYSSLIYFDSSATYNLDEENRFRTLKWLISPVKIVSRPTIRQGHGENRQREIEIRFDQLHREYCLSPRNQPRRMCLPDSWAMNMYRGGPASPGGLQGLETRRLSLPSSKAKAKSLSEAFENLGKRSLEAGRCLPKSDSSSSLPKTNPTHSATRPQQTSDLHVQGNSSGIFRKSVSPSKTLSVPDKEVPGHGRNRYDEIKEEFDKLHQKYCLKSPGQMTVPLCIGVSTDKASMEVRYQTEGFLGKLNPDPHFQGFQKLPSSPLGCRKSLLGSTAIEAPSSTCVARAITRDGTRDHQFPAKRPRLSEPQGSGRQGNSLGASDGVDNTVRPGDQGSSSQPNSEERGENTSYRMEEKSDFMLEKLETKSV

SEQ ID NO: 49266 - protein, 694 aa, Homo sapiens
MLGTLRAMEGEDVEDDQLLQKLRASRRRFQRRMQRLIEKYNQPFEDTPVVQMATLTYETPQGLRIWGGRLIKERNEGEIQPAVPQSPLKNELRRKYLTQVDILLQGAEYFECAGNRAGRDVRVTPLPSLASPAVPAPGYCSRISRKSPGDPAKPASSPREWDPLHPSSTDMALVPRNDSLSLQETSSSSFLSSQPFEDDDICNVTISDLYAGMLHSMSRLLSTKPSSIISTKTFIMQNWNSRRRHRYKSRMNKTYCKGARRSQRSSKENFIPCSEPVKGTGALRDCKNVLDVSCRKTGLKLEKAFLEVNRPQIHKLDPSWKERKVTPSKYSSLIYFDSSATYNLDEENRFRTLKWLISPVKIVSRPTIRQGHGENRQREIEIRFDQLHREYCLSPRNQPRRMCLPDSWAMNMYRGGPASPGGLQGLETRRLSLPSSKAKAKSLSEAFENLGKRSLEAGRCLPKSDSSSSLPKTNPTHSATRPQQTSDLHVQGNSSGIFRKSVSPSKTLSVPDKEVPGHGRNRYDEIKEEFDKLHQKYCLKSPGQMTVPLCIGVSTDKASMEVRYQTEGFLGKLNPDPHFQGFQKLPSSPLGCRKSLLGSTAIEAPSSTCVARAITRDGTRDHQFPAKRPRLSEPQGSGRQGNSLGASDGVDNTVRPGDQGSSSQPNSEERGENTSYRMEEKSDFMLEKLETKSV

SEQ ID NO: 49267 - protein, 663 aa, Homo sapiens
MLGTLRAMEGEDVEDDQLLQKLRASRRRFQRRMQRLIEKYNQPFEDTPVVQMATLTYETPQGLRIWGGRLIKERNEGEIQCAGNRAGRDVRVTPLPSLASPAVPAPGYCSRISRKSPGDPAKPASSPREWDPLHPSSTDMALVPRNDSLSLQETSSSSFLSSQPFEDDDICNVTISDLYAGMLHSMSRLLSTKPSSIISTKTFIMQNWNSRRRHRYKSRMNKTYCKGARRSQRSSKENFIPCSEPVKGTGALRDCKNVLDVSCRKTGLKLEKAFLEVNRPQIHKLDPSWKERKVTPSKYSSLIYFDSSATYNLDEENRFRTLKWLISPVKIVSRPTIRQGHGENRQREIEIRFDQLHREYCLSPRNQPRRMCLPDSWAMNMYRGGPASPGGLQGLETRRLSLPSSKAKAKSLSEAFENLGKRSLEAGRCLPKSDSSSSLPKTNPTHSATRPQQTSDLHVQGNSSGIFRKSVSPSKTLSVPDKEVPGHGRNRYDEIKEEFDKLHQKYCLKSPGQMTVPLCIGVSTDKASMEVRYQTEGFLGKLNPDPHFQGFQKLPSSPLGCRKSLLGSTAIEAPSSTCVARAITRDGTRDHQFPAKRPRLSEPQGSGRQGNSLGASDGVDNTVRPGDQGSSSQPNSEERGENTSYRMEEKSDFMLEKLETKSV

SEQ ID NO: 49268 - protein, 726 aa, Homo sapiens
MEDRLHMDNGLVPQKIVSVHLQDSTLKEVKDQVSNKQAQILEPKPEPSLEIKPEQDGMEHVGRDDPKALGEEPKQRRGSASGSEPAGDSDRGGGPVEHYHLHLSSCHECLELENSTIESVKFASAENIPDLPYDYSSSLESVADETSPEREGRRVNLTGKAPNILLYVGSDSQEALGRFHEVRSVLADCVDIDSYILYHLLEDSALRDPWTDNCLLLVIATRESIPEDLYQKFMAYLSQGGKVLGLSSSFTFGGFQVTSKGALHKTVQNLVFSKADQSEVKLSVLSSGCRYQEGPVRLSPGRLQGHLENEDKDRMIVHVPFGTRGGEAVLCQVHLELPPSSNIVQTPEDFNLLKSSNFRRYEVLREILTTLGLSCDMKQVPALTPLYLLSAAEEIRDPLMQWLGKHVDSEGEIKSGQLSLRFVSSYVSEVEITPSCIPVVTNMEAFSSEHFNLEIYRQNLQTKQLGKVILFAEVTPTTMRLLDGLMFQTPQEMGLIVIAARQTEGKGRGGNVWLSPVGCALSTLLISIPLRSQLGQRIPFVQHLMSVAVVEAVRSIPEYQDINLRVKWPNDIYYSDLMKIGGVLVNSTLMGETFYILIGCGFNVTNSNPTICINDLITEYNKQHKAELKPLRADYLIARVVTVLEKLIKEFQDKGPNSVLPLYYRYWVHSGQQVHLGSAEGPKVSIVGLDDSGFLQVHQEGGEVVTVHPDGNSFDMLRNLILPKRR

SEQ ID NO: 49269 - protein, 726 aa, Homo sapiens; identical to SEQ ID NO: 49268

SEQ ID NO: 49270 - protein, 87 aa, Homo sapiens
MEDRLHMDNGLVPQKIVSVHLQDSTLKEVKDQVSNKQAQILEPKPEPSLEIKPEQDGMEHVGRDDPKALGEEPKQRRGSASGSEPAG

SEQ ID NO: 49271 - protein, 77 aa, Homo sapiens
MEDRLHMDNGLVPQKIVSVHLQDSTLKEVKDQVSNKQAQILEPKPEPSLEIKPEQDGMEHVGRDDPKALGEEPKQRR

SEQ ID NO: 49272 - protein, 92 aa, Homo sapiens
MEDRLHMDNGLVPQKIVSVHLQDSTLKEVKDQVSNKQAQILEPKPEPSLEIKPEQDGMEHVGRDDPKALGEEPKQRRGSASGSEPAGDSDRG

SEQ ID NO: 49273 - protein, 268 aa, Homo sapiens
MGLSPSAPAVAVQASNASASPPSGCPMHEGKMKGCPVNTEPSGPTCEKKTYSVPAHQERAYEYVECPIRGTAAENKENLDPSNLMPPPNQTPAPDQPFALSTVREESSIPRADSEKKWVYPSEQMFWNAMLKKGWKWKDEDISQKDMYNIIRIHNQNNEQAWKEILKWEALHAAECPCGPSLIRFGGKAKEYSPRARIRSWMGYELPFDRHDWIINRCGTEVRYVIDYYDGGEVNKDYQFTILDVRPALDSLSAVWDRMKVAWWRWTS

SEQ ID NO: 49274 - protein, 268 aa, Homo sapiens; identical to SEQ ID NO: 49273

SEQ ID NO: 49275 - protein, 268 aa, Homo sapiens; identical to SEQ ID NO: 49273

SEQ ID NO: 49276 - protein, 335 aa, Homo sapiens
MDNARMNSFLEYPILSSGDSGTCSARAYPSDHRITTFQSCAVSANSCGGDDRFLVGRGVQIGSPHHHHHHHHRHPQPATYQTSGNLGVSYSHSSCGPSYGSQNFSAPYSPYALNQEADVSGGYPQCAPAVYSGNLSSPMVQHHHHHQGYAGGAVGSPQYIHHSYGQEHQSLALATYNNSLSPLHASHQEACRSPASETSSPAQTFDWMKVKRNPPKTGKVGEYGYLGQPNAVRTNFTTKQLTELEKEFHFNKYLTRARRVEIAASLQLNETQVKIWFQNRRMKQKKREKEGLLPISPATPPGNDEKAEESSEKSSSSPCVPSPGSSTSDTLTTSH

SEQ ID NO: 49277 - protein, 137 aa, Homo sapiens
MDNARMNSFLEYPILSSGDSGTCSARAYPSDHRITTFQSCAVSANSCGGDDRFLVGRGVQIGSPHHHHHHHHRHPQPATYQTSGNLGVSYSHSSCGPSYGSQNFSAPYSPYALNQEADPPRSLSLPRIGDIFSSADF

SEQ ID NO: 49278 - protein, 410 aa, Homo sapiens
MSARKGYLLPSPNYPTTMSCSESPAANSFLVDSLISSGRGEAGGGGGGAGGGGGGGYYAHGGVYLPPAADLPYGLQSCGLFPTLGGKRNEAASPGSGGGGGGLGPGAHGYGPSPIDLWLDAPRSCRMEPPDGPPPPPQQQPPPPPQPPQPAPQATSCSFAQNIKEESSYCLYDSADKCPKVSATAAELAPFPRGPPPDGCALGTSSGVPVPGYFRLSQAYGTAKGYGSGGGGAQQLGAGPFPAQPPGRGFDLPPALASGSADAARKERALDSPPPPTLACGSGGGSQGDEEAHASSSAAEELSPAPSESSKASPEKDSLGNSKGENAANWLTAKSGRKKRCPYTKHQTLELEKEFLFNMYLTRERRLEISRSVHLTDRQVKIWFQNRRMKLKKMNRENRIRELTANFNFS

SEQ ID NO: 49279 - protein, 202 aa, Homo sapiens
MSCSESPAANSFLVDSLISSGRGEAGGGGGGAGGGGGGGYYAHGGVYLPPAADLPYGLQSCGLFPTLGGKRNEAASPGSGGGGGGLGPGAHGYGPSPIDLWLDAPRSCRRRAATRGWPVPRAAPGARFRSPARASLRLGRCGPEGASPRFAAAPHAGLRQRRGLAGRRGGARVVLGRGGALPGPFREQQSLAGEGFPGQFQR

SEQ ID NO: 49280 - protein, 94 aa, Homo sapiens
MCQGNSKGENAANWLTAKSGRKKRCPYTKHQTLELEKEFLFNMYLTRERRLEISRSVHLTDRQVKIWFQNRRMKLKKMNRENRIRELTANFNFS

SEQ ID NO: 49281 - protein, 313 aa, Homo sapiens
MDFDERGPCSSNMYLPSCTYYVSGPDFSSLPSFLPQTPSSRPMTYSYSSNLPQVQPVREVTFREYAIEPATKWHPRGNLAHCYSAEELVHRDCLQAPSAAGVPGDVLAKSSANVYHHPTPAVSSNFYSTVGRNGVLPQAFDQFFETAYGTPENLASSDYPGDKSAEKGPPAATATSAAAAAAATGAPATSSSDSGGGGGCRETAAAAEEKERRRRPESSSSPESSSGHTEDKAGGSSGQRTRKKRCPYTKYQIRELEREFFFSVYINKEKRLQLSRMLNLTDRQVKIWFQNRRMKEKKINRDRLQYYSANPLL

SEQ ID NO: 49282 - protein, 388 aa, Homo sapiens
MTASVLLHPRWIEPTVMFLYDNGGGLVADELNKNMEGAAAAAAAAAAAAAAGAGGGGFPHPAAAAAGGNFSVAAAAAAAAAAAANQCRNLMAHPAPLAPGAASAYSSAPGEAPPSAAAAAAAAAAAAAAAAAASSSGGPGPAGPAGAEAAKQCSPCSAAAQSSSGPAALPYGYFGSGYYPCARMGPHPNAIKSCAQPASAAAAAAFADKYMDTAGPAAEEFSSRAKEFAFYHQGYAAGPYHHHQPMPGYLDMPVVPGLGGPGESRHEPLGLPMESYQPWALPNGWNGQMYCPKEQAQPPHLWKSTLPDVVSHPSDASSYRRGRKKRVPYTKVQLKELEREYATNKFITKDKRRRISATTNLSERQVTIWFQNRRVKEKKVINKLKTTS

SEQ ID NO: 49283 - protein, 376 aa, Homo sapiens
MNYEFEREIGFINSQPSLAECLTSFPPVADTFQSSSIKTSTLSHSTLIPPPFEQTIPSLNPGSHPRHGAGGRPKPSPAGSRGSPVPAGALQPPEYPWMKEKKAAKKTALLPAAAAAATAAATGPACLSHKESLEIADGSGGGSRRLRTAYTNTQLLELEKEFHFNKYLCRPRRVEIAALLDLTERQVKVWFQNRRMKHKRQTQCKENQNSEGKCKSLEDSEKVEEDEEEKTLFEQALSVSGALLEREGYTFQQNALSQQQAPNGHNGDSQSFPVSPLTSNEKNLKHFQHQSPTVPNCLSTMGQNCGAGLNNDSPEALEVPSLQDFSVFSTDSCLQLSDAVSPSLPGSLDSPVDISADSLDFFTDTLTTIDLQHLNY

SEQ ID NO: 49284 - protein, 320 aa, Homo sapiens
MTMSSFLINSNYIEPKFPPFEEYAQHSGSGGADGGPGGGPGYQQPPAPPTQHLPLQQPQLPHAGGGREPTASYYAPRTAREPAYPAAALYPAHGAADTAYPYGYRGGASPGRPPQPEQPPAQAKGPAHGLHASHVLQPQLPPPLQPRAVPPAAPRRCEAAPATPGVPAGGSAPACPLLLADKSPLGLKGKEPVVYPWMKKIHVSAVNPSYNGGEPKRSRTAYTRQQVLELEKEFHFNRYLTRRRRIEIAHTLCLSERQVKIWFQNRRMKWKKDHKLPNTKMRSSNSASASAGPPGKAQTQSPHLHPHPHPSTSTPVPSSI

SEQ ID NO: 49285 - protein, 320 aa, Homo sapiens; identical to SEQ ID NO: 49284

SEQ ID NO: 49286 - protein, 270 aa, Homo sapiens
MSSYFVNSFCGRYPNGPDYQLHNYGDHSSVSEQFRDSASMHSGRYGYGYNGMDLSVGRSGSGHFGSGERARSYAASASAAPAEPRYSQPATSTHSPQPDPLPCSAVAPSPGSDSHHGGKNSLSNSSGASADAGSTHISSREGVGTASGAEEDAPASSEQASAQSEPSPAPPAQPQIYPWMRKLHISHDNIGGPEGKRARTAYTRYQTLELEKEFHFNRYLTRRRRIEIAHALCLSERQIKIWFQNRRMKWKKDNKLKSMSMAAAGGAFRP

SEQ ID NO: 49287 - protein, 233 aa, Homo sapiens
MSSYFVNPTFPGSLPSGQDSFLGQLPLYQAGYDALRPFPASYGASSLPDKTYTSPCFYQQSNSVLACNRASYEYGASCFYSDKDLSGASPSGSGKQRGPGDYLHFSPEQQYKPDSSSGQGKALHDEGADRKYTSPVYPWMQRMNSCAGAVYGSHGRRGRQTYTRYQTLELEKEFHFNRYLTRRRRIEIANALCLTERQIKIWFQNRRMKWKKENKLINSTQPSGEDSEAKAGE

SEQ ID NO: 49288 - protein, 230 aa, Homo sapiens
MSSSYYVNALFSKYTAGASLFQNAEPTSCSFAPNSQRSGYGAGAGAFASTVPGLYNVNSPLYQSPFASGYGLGADAYGNLPCASYDQNIPGLCSDLAKGACDKTDEGALHGAAEANFRIYPWMRSSGPDRKRGRQTYTRYQTLELEKEFHFNRYLTRRRRIEIAHALCLTERQIKIWFQNRRMKWKKEHKDEGPTAAAAPEGAVPSAAATAAADKADEEDDDEEEEDEEE

SEQ ID NO: 49289 - protein, 30 aa, Homo sapiens
MSSSYYVNALFSKYTAGASLFQNAEPTSCS

SEQ ID NO: 49290 - protein, 263 aa, Homo sapiens
HHWGGNYYVDSFLLGADAADELSVGMRRGPWPPRQAATLAEHPDFSPCSFQSKATVFGASWNPVHRAPTLYPVYHHHHHHPYVHPQAPVAAAAPDGRYMRSWLEPTPGALSFAGLPSSRPYGIKPEPLSARRGDCPTLDTHTLSLTDYACGSPPVDREKQPSEGAFSENNAENESGGDKPPIDPNNPAANWLHARSTRKKRCPYTKHQTLELEKEFLFNMYLTRDRRYEVARLLNLTERQVKIWFQNRRMKMKKINKDRAKDE

SEQ ID NO: 49291 - protein, 272 aa, Homo sapiens
MATTGALGNYYVDSFLLGADAADELSVGRYAPGTLGQPPRQAATLAEHPDFSPCSFQSKATVFGASWNPVHAAGANAVPAAVYHHHHHHPYVHPQAPVAAAAPDGRYMRSWLEPTPGALSFAGLPSSRPYGIKPEPLSARRGDCPTLDTHTLSLTDYACGSPPVDREKQPSEGAFSENNAENESGGDKPPIDPNNPAANWLHARSTRKKRCPYTKHQTLELEKEFLFNMYLTRDRRYEVARLLNLTERQVKIWFQNRRMKMKKINKDRAKDE

SEQ ID NO: 49292 - protein, 196 aa, Homo sapiens
MAGFSPWRRRQRRRRRRRRARQSRAAPELVGDLGSFLLLGSTFLSTARHCFITSVEIVSRYLCARGSGRAGHHGPGRARPAVATSAFPAQEPRVFLRSALPAGRLSPSTTHLHLVTADNPAANWLHARSTRKKRCPYTKHQTLELEKEFLFNMYLTRDRRYEVARLLNLTERQVKIWFQNRRMKMKKINKDRAKDE

SEQ ID NO: 49293 - protein, 301 aa, Homo sapiens
MDYNRMNSFLEYPLCNRGPSAYSAHSAPTSFPPSSAQAVDSYASEGRYGGGLSSPAFQQNSGYPAQQPPSTLGVPFPSSAPSGYAPAACSPSYGPSQYYPLGQSEGDGGYFHPSSYGAQLGGLSDGYGAGGAGPGPYPPQHPPYGNEQTASFAPAYADLLSEDKETPCPSEPNTPTARTFDWMKVKRNPPKTAKVSEPGLGSPSGLRTNFTTRQLTELEKEFHFNKYLSRARRVEIAATLELNETQVKIWFQNRRMKQKKREREEGRVPPAPPGCPKEAAGDASDQSTCTSPEASPSSVTS

SEQ ID NO: 49294 - protein, 284 aa, Homo sapiens
MEPGNYATLDGAKDIEGLLGAGGGRNLVAHSPLTSHPAAPTLMPAVNYAPLDLPGSAEPPKQCHPCPGVPQGTSPAPVPYGYFGGGYYSCRVSRSSLKPCAQAATLAAYPAETPTAGEEYPSRPTEFAFYPGYPGTYQPMASYLDVSVVQTLGAPGEPRHDSLLPVDSYQSWALAGGWNSQMCCQGEQNPPGPFWKAAFADSSGQHPPDACAFRRGRKKRIPYSKGQLRELEREYAANKFITKDKRRKISAATSLSERQITIWFQNRRVKEKKVLAKVKNSATP

SEQ ID NO: 49295 - protein, 176 aa, Homo sapiens
PRCPPGPRVPLDEREEIRQETQPIRHVSFSGRLRRSGGVGSPADGLGRRLVAAGQAAHGLHQHAAAGTGEFHFNKYLCRPRRVEIAALLDLTERQVKVWFQNRRMKHKRQTQHREPPDGEPACPGALEDICDPAEEPAASPGGPLAGGVGSLLSPAGGGAGGLKRGPPAFSRSLRG

SEQ ID NO: 49296 - protein, 356 aa, Homo sapiens
MNFEFEREIGFINSQPSLAECLTSFPAVLETFQTSSIKESTLIPPPPPFEQTFPSLQPGASTLQRPRSQKRAEDGPALPPPPPPPLPAAPPAPEFPWMKEKKSAKKPSQSATSPSPAASAVPASGVGSPADGLGLPEAGGGGARRLRTAYTNTQLLELEKEFHFNKYLCRPRRVEIAALLDLTERQVKVWFQNRRMKHKRQTQHREPPDGEPACPGALEDICDPAEEPAASPGGPSASRAAWEACCHPPEVVPGALSADPRPLAVRLEGAGASSPGCALRGAGGLEPGPLPEDVFSGRQDSPFLPDLNFFAADSCLQLSGGLSPSLQGSLDSPVPFSEEELDFFTSTLCAIDLQFP

SEQ ID NO: 49297 - protein, 431 aa, Homo sapiens
MQKATYYDNAAAALFGGYSSYPGSNGFGFDVPPQPPFQAATHLEGDYQRSACSLQSLGNAAPHAKSKELNGSCMRPGLAPEPLSAPPGSPPPSAAPTSATSNSSNGGGPSKSGPPKCGPGTNSTLTKQIFPWMKESRQTSKLKNNSPGTAEGCGGGGGGGGGGGSGGSGGGGGGGGGGDKSPPGSAASKRARTAYTSAQLVELEKEFHFNRYLCRPRRVEMANLLNLSERQIKIWFQNRRMKYKKDQKAKGLASSSGGPSPAGSPPQPMQSTAGFMNALHSMTPSYESPSPPAFGKAHQNAYALPSNYQPPLKGCGAPQKYPPTPAPEYEPHVLQANGGAYGTPTMQGSPVYVGGGGYADPLPPPAGPSLYGLNHLSHHPSGNLDYNGAPPMAPSQHHGPCEPHPTYTDLSSHHAPPPQGRIQEAPKLTHL

SEQ ID NO: 49298 - protein, 299 aa, Homo sapiens
MKESRQTSKLKNNSPGTAEGCGGGGGGGGGGGSGGSGGGGGGGGGGDKSPPGSAASKRARTAYTSAQLVELEKEFHFNRYLCRPRRVEMANLLNLSERQIKIWFQNRRMKYKKDQKAKGLASSSGGPSPAGSPPQPMQSTAGFMNALHSMTPSYESPSPPAFGKAHQNAYALPSNYQPPLKGCGAPQKYPPTPAPEYEPHVLQANGGAYGTPTMQGSPVYVGGGGYADPLPPPAGPSLYGLNHLSHHPSGNLDYNGAPPMAPSQHHGPCEPHPTYTDLSSHHAPPPQGRIQEAPKLTHL

SEQ ID NO: 49299 - protein, 431 aa, Homo sapiens; identical to SEQ ID NO: 49297

SEQ ID NO: 49300 - protein, 358 aa, Homo sapiens
MRPGLAPEPLSAPPGSPPPSAAPTSATSNSSNGGGPSKSGPPKCGPGTNSTLTKQIFPWMKESRQTSKLKNNSPGTAEGCGGGGGGGGGGGSGGSGGGGGGGGGGDKSPPGSAASKRARTAYTSAQLVELEKEFHFNRYLCRPRRVEMANLLNLSERQIKIWFQNRRMKYKKDQKAKGLASSSGGPSPAGSPPQPMQSTAGFMNALHSMTPSYESPSPPAFGKAHQNAYALPSNYQPPLKGCGAPQKYPPTPAPEYEPHVLQANGGAYGTPTMQGSPVYVGGGGYADPLPPPAGPSLYGLNHLSHHPSGNLDYNGAPPMAPSQHHGPCEPHPTYTDLSSHHAPPPQGRIQEAPKLTHL

SEQ ID NO: 49301 - protein, 431 aa, Homo sapiens; identical to SEQ ID NO: 49297

SEQ ID NO: 49302 - protein, 299 aa, Homo sapiens; identical to SEQ ID NO: 49298

SEQ ID NO: 49303 - protein, 358 aa, Homo sapiens; identical to SEQ ID NO: 49300

SEQ ID NO: 49304 - protein, 431 aa, Homo sapiens; identical to SEQ ID NO: 49297

SEQ ID NO: 49305 - protein, 251 aa, Homo sapiens
MAMSSFLINSNYVDPKFPPCEEYSQSDYLPSDHSPGYYAGGQRRESSFQPEAGFGRRAACTVQRYAACRDPGPPPPPPPPPPPPPPPGLSPRAPAPPPAGALLPEPGQRCEAVSSSPPPPPCAQNPLHPSPSHSACKEPVVYPWMRKVHVSTVNPNYAGGEPKRSRTAYTRQQVLELEKEFHYNRYLTRRRRVEIAHALCLSERQIKIWFQNRRMKWKKDHKLPNTKIRSGGAAGSAGGPPGRPNGGPRAL

SEQ ID NO: 49306 - protein, 269 aa, Homo sapiens
MSSYFVNSFSGRYPNGPDYQLLNYGSGSSLSGSYRDPAAMHTGSYGYNYNGMDLSVNRSSASSSHFGAVGESSRAFPAPAQEPRFRQAASSCSLSSPESLPCTNGDSHGAKPSASSPSDQATSASSSANFTEIDEASASSEPEEAASQLSSPSLARAQPEPMATSTAAPEGQTPQIFPWMRKLHISHDMTGPDGKRARTAYTRYQTLELEKEFHFNRYLTRRRRIEIAHALCLSERQIKIWFQNRRMKWKKDNKLKSMSLATAGSAFQP

SEQ ID NO: 49307 - protein, 224 aa, Homo sapiens
MSSYFVNSTFPVTLASGQESFLGQLPLYSSGYADPLRHYPAPYGPGPGQDKGFATSSYYPPAGGGYGRAAPCDYGPAPAFYREKESACALSGADEQPPFHPEPRKSDCAQDKSVFGETEEQKCSTPVYPWMQRMNSCNSSSFGPSGRRGRQTYTRYQTLELEKEFHYNRYLTRRRRIEIAHALCLTERQIKIWFQNRRMKWKKESKLLSASQLSAEEEEEKQAE

SEQ ID NO: 49308 - protein, 224 aa, Homo sapiens; identical to SEQ ID NO: 49307

SEQ ID NO: 49309 - protein, 217 aa, Homo sapiens
MSSLYYANTLFSKYPASSSVFATGAFPEQTSCAFASNPQRPGYGAGSGASFAASMQGLYPGGGGMAGQSAAGVYAAGYGLEPSSFNMHCAPFEQNLSGVCPGDSAKAAGAKEQRDSDLAAESNFRIYPWMRSSGTDRKRGRQTYTRYQTLELEKEFHYNRYLTRRRRIEIAHTLCLTERQIKIWFQNRRMKWKKENKTAGPGTTGQDRAEAEEEEEE

SEQ ID NO: 49310 - protein, 28 aa, Homo sapiens
MKWKKENKTAGPGTTGQDRAEAEEEEEE

SEQ ID NO: 49311 - protein, 243 aa, Homo sapiens
MSSYFVNSLFSKYKTGESLRPNYYDCGFAQDLGGRPTVVYGPSSGGSFQHPSQIQEFYHGPSSLSTAPYQQNPCAVACHGDPGNFYGYDPLQRQSLFGAQDPDLVQYADCKLAAASGLGEEAEGSEQSPSPTQLFPWMRPQAAAGRRRGRQTYSRYQTLELEKEFLFNPYLTRKRRIEVSHALGLTERQVKIWFQNRRMKWKKENNKDKFPSSKCEQEELEKQKLERAPEAADEGDAQKGDKK

SEQ ID NO: 49312 - protein, 250 aa, Homo sapiens
MSISGTLSSYYVDSIISHESEDAPPAKFPSGQYASSRQPGHAEHLEFPSCSFQPKAPVFGASWAPLSPHASGSLPSVYHPYIQPQGVPPAESRYLRTWLEPAPRGEAAPGQGQAAVKAEPLLGAPGELLKQGTPEYSLETSAGREAVLSNQRPGYGDNKICEGSEDKERPDQTNPSANWLHARSSRKKRCPYTKYQTLELEKEFLFNMYLTRDRRHEVARLLNLSERQVKIWFQNRRMKMKKMNKEQGKE

SEQ ID NO: 49313 - protein, 128 aa, Homo sapiens
MSISGTLSSYYVDSIISHESEDAPPAKFPSGQYASSRQPGHAEHLEFPSCSFQPKAPVFGASWAPLSPHASGSLPSVYHPYIQPQGVPPAESRYLRTWLEPAPRGGAAQTGHARVQFGNFGGQGGRAV

SEQ ID NO: 49314 - protein, 342 aa, Homo sapiens
MTCPRNVTPNSYAEPLAAPGGGERYSRSAGMYMQSGSDFNCGVMRGCGLAPSLSKRDEGSSPSLALNTYPSYLSQLDSWGDPKAAYRLEQPVGRPLSSCSYPPSVKEENVCCMYSAEKRAKSGPEAALYSHPLPESCLGEHEVPVPSYYRASPSYSALDKTPHCSGANDFEAPFEQRASLNPRAEHLESPQLGGKVSFPETPKSDSQTPSPNEIKTEQSLAGPKGSPSESEKERAKAADSSPDTSDNEAKEEIKAENTTGNWLTAKSGRKKRCPYTKHQTLELEKEFLFNMYLTRERRLEISKTINLTDRQVKIWFQNRRMKLKKMNRENRIRELTSNFNFT

SEQ ID NO: 49315 - protein, 304 aa, Homo sapiens
MFNSVNLGNFCSPSRKERGADFGERGSCASNLYLPSCTYYMPEFSTVSSFLPQAPSRQISYPYSAQVPPVREVSYGLEPSGKWHHRNSYSSCYAAADELMHRECLPPSTVTEILMKNEGSYGGHHHPSAPHATPAGFYSSVNKNSVLPQAFDRFFDNAYCGGGDPPAEPPCSGKGEAKGEPEAPPASGLASRAEAGAEAEAEEENTNPSSSGSAHSVAKEPAKGAAPNAPRTRKKRCPYSKFQIRELEREFFFNVYINKEKRLQLSRMLNLTDRQVKIWFQNRRMKEKKLSRDRLQYFSGNPLL

SEQ ID NO: 49316 - protein, 282 aa, Homo sapiens
MGEHNLLNPGFVGPLVNIHTGDTFYFPNFRASGAQLPGLPSLSYPRRDNVCSLSWPSAEPCNGYPQPYLGSPVSLNPPFGRTCELARVEDGKGYYREPCAEGGGGGLKREERGRDPGAGPGAALLPLEPSGPPALGFKYDYAAGGGGGDGGGGAGPPHDPPSCQSLESDSSSSLLNEGNKGAGAGDPGSLVSPLNPGGGLSASGAPWYPINSRSRKKRKPYSKLQLAELEGEFLVNEFITRQRRRELSDRLNLSDQQVKIWFQNRRMKKKRLLLREQALSFF

SEQ ID NO: 49317 - protein, 330 aa, Homo sapiens
MTTSLLLHPRWPESLMYVYEDSAAESGIGGGGGGGGGGTGGAGGGCSGASPGKAPSMDGLGSSCPASHCRDLLPHPVLGRPPAPLGAPQGAVYTDIPAPEAARQCAPPPAPPTSSSATLGYGYPFGGSYYGCRLSHNVNLQQKPCAYHPGDKYPEPSGALPGDDLSSRAKEFAFYPSFASSYQAMPGYLDVSVVPGISGHPEPRHDALIPVEGYQHWALSNGWDSQVYCSKEQSQSAHLWKSPFPDVVPLQPEVSSYRRGRKKRVPYTKVQLKELEKEYAASKFITKEKRRRISATTNLSERQVTIWFQNRRVKEKKVVSKSKAPHLHST

SEQ ID NO: 49318 - protein, 264 aa, Homo sapiens
MIMSSYLMDSNYIDPKFPPCEEYSQNSYIPEHSPEYYGRTRESGFQHHHQELYPPPPPRPSYPERQYSCTSLQGPGNSRGHGPAQAGHHHPEKSQSLCEPAPLSGASASPSPAPPACSQPAPDHPSSAASKQPIVYPWMKKIHVSTVNPNYNGGEPKRSRTAYTRQQVLELEKEFHYNRYLTRRRRIEIAHSLCLSERQIKIWFQNRRMKWKKDHRLPNTKVRSAPPAGAAPSTLSAATPGTSEDHSQSATPPEQQRAEDITRL

SEQ ID NO: 49319 - protein, 264 aa, Homo sapiens; identical to SEQ ID NO: 49318

SEQ ID NO: 49320 - protein, 222 aa, Homo sapiens
MSSYVANSFYKQSPNIPAYNMQTCGNYGSASEVQASRYCYGGLDLSITFPPPAPSNSLHGVDMAANPRAHPDRPACSAAAAPGHAPGRDEAAPLNPGMYSQKAARPALEERAKSSGEIKEEQAQTGQPAGLSQPPAPPQIYPWMTKLHMSHETDGKRSRTSYTRYQTLELEKEFHFNRYLTRRRRIEIANNLCLNERQIKIWFQNRRMKWKKDSKMKSKEAL

SEQ ID NO: 49321 - protein, 235 aa, Homo sapiens
MNSYFTNPSLSCHLAGGQDVLPNVALNSTAYDPVRHFSTYGAAVAQNRIYSTPFYSPQENVVFSSSRGPYDYGSNSFYQEKDMLSNCRQNTLGHNTQTSIAQDFSSEQGRTAPQDQKASIQIYPWMQRMNSHSGVGYGADRRRGRQIYSRYQTLELEKEFHFNRYLTRRRRIEIANALCLTERQIKIWFQNRRMKWKKESNLTSTLSGGGGGATADSLGGKEEKREETEEEKQKE

SEQ ID NO: 49322 - protein, 153 aa, Homo sapiens
MLSNCRQNTLGHNTQTSIAQDFSSEQGRTAPQDQKASIQIYPWMQRMNSHSGVGYGADRRRGRQIYSRYQTLELEKEFHFNRYLTRRRRIEIANALCLTERQIKIWFQNRRMKWKKESNLTSTLSGGGGGATADSLGGKEEKREETEEEKQKE

SEQ ID NO: 49323 - protein, 52 aa, Homo sapiens
MLSNCRQNTLGHNTQTSIAQDFSSEQGRTAPQDQKASIQIYPWMQRMNSHSG

SEQ ID NO: 49324 - protein, 71 aa, Homo sapiens
MLSNCRQNTLGHNTQTSIAQDFSSEQGRTAPQDQKASIQIYPWMQRMNSHSVCFVPGSLGVGYGADRRRGR

SEQ ID NO: 49325 - protein, 242 aa, Homo sapiens
MSSYFVNPLFSKYKAGESLEPAYYDCRFPQSVGRSHALVYGPGGSAPGFQHASHHVQDFFHHGTSGISNSGYQQNPCSLSCHGDASKFYGYEALPRQSLYGAQQEASVVQYPDCKSSANTNSSEGQGHLNQNSSPSLMFPWMRPHAPGRRSGRQTYSRYQTLELEKEFLFNPYLTRKRRIEVSHALGLTERQVKIWFQNRRMKWKKENNKDKLPGARDEEKVEEEGNEEEEKEEEEKEENKD

SEQ ID NO: 49326 - protein, 260 aa, Homo sapiens
MSATGPISNYYVDSLISHDNEDLLASRFPATGAHPAAARPSGLVPDCSDFPSCSFAPKPAVFSTSWAPVPSQSSVVYHPYGPQPHLGADTRYMRTWLEPLSGAVSFPSFPAGGRHYALKPDAYPGRRADCGPGEGRSYPDYMYGSPGELRDRAPQTLPSPEADALAGSKHKEEKADLDPSNPVANWIHARSTRKKRCPYTKYQTLELEKEFLFNMYLTRDRRYEVARVLNLTERQVKIWFQNRRMKMKKMNKEKTDKEQS

SEQ ID NO: 49327 - protein, 260 aa, Homo sapiens; identical to SEQ ID NO: 49326

SEQ ID NO: 49328 - protein, 328 aa, Homo sapiens
MSSYLEYVSCSSSGGVGGDVLSLAPKFCRSDARPVALQPAFPLGNGDGAFVSCLPLAAARPSPSPPAAPARPSVPPPAAPQYAQCTLEGAYEPGAAPAAAAGGADYGFLGSGPAYDFPGVLGRAADDGGSHVHYATSAVFSGGGSFLLSGQVDYAAFGEPGPFPACLKASADGHPGAFQTASPAPGTYPKSVSPASGLPAAFSTFEWMKVKRNASKKGKLAEYGAASPSSAIRTNFSTKQLTELEKEFHFNKYLTRARRIEIANCLHLNDTQVKIWFQNRRMKQKKREREGLLATAIPVAPLQLPLSGTTPTKFIKNPGSPSQSQEPS

SEQ ID NO: 49329 - protein, 209 aa, Homo sapiens
LERAARVERAGGAAQTAAVLLSLCPAPYSGPGLRPHLAFAPGRPRAAVRTASGRAPVRAVHPGGGLRTWCRTCRGSWGRGLRLPGVRAGVRLPGRAGAGGPFPACLKASADGHPGAFQTASPAPGTYPKSVSPASGLPAAFSTFEWMKVKRNASKKDSGLGFVEETRSRANSMESASSTDSENVPGIEKISGRSSPWNFSWQTRRVWGR

SEQ ID NO: 49330 - protein, 340 aa, Homo sapiens
MSFPNSSPAANTFLVDSLISACRSDSFYSSSASMYMPPPSADMGTYGMQTCGLLPSLAKREVNHQNMGMNVHPYIPQVDSWTDPNRSCRIEQPVTQQVPTCSFTTNIKEESNCCMYSDKRNKLISAEVPSYQRLVPESCPVENPEVPVPGYFRLSQTYATGKTQEYNNSPEGSSTVMLQLNPRGAAKPQLSAAQLQMEKKMNEPVSGQEPTKVSQVESPEAKGGLPEERSCLAEVSVSSPEVQEKESKEEIKSDTPTSNWLTAKSGRKKRCPYTKHQTLELEKEFLFNMYLTRERRLEISKSVNLTDRQVKIWFQNRRMKLKKMSRENRIRELTANLTFS

SEQ ID NO: 49331 - protein, 338 aa, Homo sapiens
MNDFDECGQSAASMYLPGCAYYVAPSDFASKPSFLSQPSSCQMTFPYSSNLAPHVQPVREVAFRDYGLERAKWPYRGGGGGGSAGGGSSGGGPGGGGGGAGGYAPYYAAAAAAAAAAAAAEEAAMQRELLPPAGRRPDVLFKAPEPVCAAPGPPHGPAGAASNFYSAVGRNGILPQGFDQFYEAAPGPPFAGPQPPPPPAPPQPEGAADKGDPRTGAGGGGGSPCTKATPGSEPKGAAEGSGGDGEGPPGEAGAEKSSSAVAPQRSRKKRCPYTKYQIRELEREFFFNVYINKEKRLQLSRMLNLTDRQVKIWFQNRRMKEKKLNRDRLQYFTGNPLF

SEQ ID NO: 49332 - protein, 159 aa, Homo sapiens
MYLPGCAYYVAPSDFASKPSFLSQPSSCQMTFPYSSNLAPGGGSPCTKATPGSEPKGAAEGSGGDGEGPPGEAGAEKSSSAVAPQRSRKKRCPYTKYQIRELEREFFFNVYINKEKRLQLSRMLNLTDRQVKIWFQNRRMKEKKLNRDRLQYFTGNPLF

SEQ ID NO: 49333 - protein, 270 aa, Homo sapiens
MCERSLYRAGYVGSLLNLQSPDSFYFSNLRPNGGQLAALPPISYPRGALPWAATPASCAPAQPAGATAFGGFSQPYLAGSGPLGLQPPTAKDGPEEQAKFYAPEAAAGPEERGRTRPSFAPESSLAPAVAALKAAKYDYAGVGRATPGSTTLLQGAPCAPGFKDDTKGPLNLNMTVQAAGVASCLRPSLPDGLPWGAAPGRARKKRKPYTKQQIAELENEFLVNEFINRQKRKELSNRLNLSDQQVKIWFQNRRMKKKRVVLREQALALY

SEQ ID NO: 49334 - protein, 432 aa, Homo sapiens
MLFEQGQQALELPECTMQKAAYYENPGLFGGYGYSKTTDTYGYSTPHQPYPPPAAASSLDTDYPGSACSIQSSAPLRAPAHKGAELNGSCMRPGTGNSQGGGGGSQPPGLNSEQQPPQPPPPPPTLPPSSPTNPGGGVPAKKPKGGPNASSSSATISKQIFPWMKESRQNSKQKNSCATAGESCEDKSPPGPASKRVRTAYTSAQLVELEKEFHFNRYLCRPRRVEMANLLNLTERQIKIWFQNRRMKYKKDQKAKGILHSPASQSPERSPPLGGAAGHVAYSGQLPPVPGLAYDAPSPPAFAKSQPNMYGLAAYTAPLSSCLPQQKRYAAPEFEPHPMASNGGGFASANLQGSPVYVGGNFVESMAPASGPVFNLGHLSHPSSASVDYSCAAQIPGNHHHGPCDPHPTYTDLSAHHSSQGRLPEAPKLTHL

SEQ ID NO: 49335 - protein, 432 aa, Homo sapiens; identical to SEQ ID NO: 49334

SEQ ID NO: 49336 - protein, 100 aa, Homo sapiens
MLFEQGQQALELPECTMQKAAYYENPGLFGGYGYSKTTDTYGYSTPHQPYPPPAAASSLDTDYPGSACSIQSSAPLRAPAHKGAELNGSCMRPGTGNSQG

SEQ ID NO: 49337 - protein, 432 aa, Homo sapiens; identical to SEQ ID NO: 49334

SEQ ID NO: 49338 - protein, 255 aa, Homo sapiens
MVMSSYMVNSKYVDPKFPPCEEYLQGGYLGEQGADYYGGGAQGADFQPPGLYPRPDFGEQPFGGSGPGPGSALPARGHGQEPGGPGGHYAAPGEPCPAPPAPPPAPLPGARAYSQSDPKQPPSGTALKQPAVVYPWMKKVHVNSVNPNYTGGEPKRSRTAYTRQQVLELEKEFHFNRYLTRRRRIEIAHTLCLSERQIKIWFQNRRMKWKKDHKLPNTKGRSSSSSSSSSCSSSVAPSQHLQPMAKDHHTDLTTL

SEQ ID NO: 49339 - protein, 290 aa, Homo sapiens
MSSYFVNPLYSKYKAAAAAAAAAGEAINPTYYDCHFAPEVGGRHAAAAAALQLYGNSAAGFPHAPPQAHAHPHPSPPPSGTGCGGREGRGQEYFHPGGGSPAAAYQAAPPPPPHPPPPPPPPPCGGIACHGEPAKFYGYDNLQRQPIFTTQQEAELVQYPDCKSSSGNIGEDPDHLNQSSSPSQMFPWMRPQAAPGRRRGRQTYSRFQTLELEKEFLFNPYLTRKRRIEVSHALALTERQVKIWFQNRRMKWKKENNKDKFPVSRQEVKDGETKKEAQELEEDRAEGLTN

SEQ ID NO: 49340 - protein, 289 aa, Homo sapiens
MSSYFVNPLYSKYKAAAAAAAAAGEAINPTYYDCHFAPEVGGRHAAAAAALQLYGNSAAGFPHAPPQAHAHPHPSPPPSGTGCGGREGRGQEYFHPGGGSPAAAYQAAPPPPPHPPPPPPPPPCGGIACHGEPAKFYGYDNLQRQPIFTTQQEAELVQYPDCKSSSGNIGEDPDHLNQSSSPSQMFPWMRPQAPGRRRGRQTYSRFQTLELEKEFLFNPYLTRKRRIEVSHALALTERQVKIWFQNRRMKWKKENNKDKFPVSRQEVKDGETKKEAQELEEDRAEGLTN

SEQ ID NO: 49341 - protein, 289 aa, Homo sapiens; identical to SEQ ID NO: 49340

SEQ ID NO: 49342 - protein, 106 aa, Homo sapiens
MFPWMRPQAAPGRRRGRQTYSRFQTLELEKEFLFNPYLTRKRRIEVSHALALTERQVKIWFQNRRMKWKKENNKDKFPVSRQEVKDGETKKEAQELEEDRAEGLTN

SEQ ID NO: 49343 - protein, 352 aa, Homo sapiens
MLGGSAGRLKMSSSGTLSNYYVDSLIGHEGDEVFAARFGPPGPGAQGRPAGVADGPAATAAEFASCSFAPRSAVFSASWSAVPSQPPAAAAMSGLYHPYVPPPPLAASASEPGRYVRSWMEPLPGFPGGAGGGGGGGGGGPGRGPSPGPSGPANGRHYGIKPETRAAPAPATAASTTSSSSTSLSSSSKRTECSVARESQGSSGPEFSCNSFLQEKAAAATGGTGPGAGIGAATGTGGSSEPSACSDHPIPGCSLKEEEKQHSQPQQQQLDPNNPAANWIHARSTRKKRCPYTKYQTLELEKEFLFNMYLTRDRRYEVARILNLTERQVKIWFQNRRMKMKKMSKEKCPKGD

SEQ ID NO: 49344 - protein, 918 aa, Homo sapiens
LQPVYESMASHVQVFSPHTLQSSAFCSVKKLKIEPSSNWDMTGYGSHSKVYSQSKNIPLSQPATTTVSTSLPVPNPSLPYEQTIVFPGSTGHIVVTSASSTSVTGQVLGGPHNLMRRSTVSLLDTYQKCGLKRKSEEIENTSSVQIIEEHPPMIQNNASGATVATATTSTATSKNSGSNSEGDYQLVQHEVLCSMTNTYEVLEFLGRGTFGQVVKCWKRGTNEIVAIKILKNHPSYARQGQIEVSILARLSTESADDYNFVRAYECFQHKNHTCLVFEMLEQNLYDFLKQNKFSPLPLKYIRPVLQQVATALMKLKSLGLIHADLKPENIMLVDPSRQPYRVKVIDFGSASHVSKAVCSTYLQSRYYRAPEIILGLPFCEAIDMWSLGCVIAELFLGWPLYPGASEYDQIRYISQTQGLPAEYLLSAGTKTTRFFNRDTDSPYPLWRLKTPDDHEAETGIKSKEARKYIFNCLDDMAQVNMTTDLEGSDMLVEKADRREFIDLLKKMLTIDADKRITPIETLNHPFVTMTHLLDFPHSTHVKSCFQNMEICKRRVNMYDTVNQSKTPFITHVAPSTSTNLTMTFNNQLTTVHNQAPSSTSATISLANPEVSILNYPSTLYQPSAASMAAVAQRSMPLQTGTAQICARPDPFQQALIVCPPGFQGLQASPSKHAGYSVRMENAVPIVTQAPGAQPLQIQPGLLAQQAWPSGTQQILLPPAWQQLTGVATHTSVQHATVIPETMAGTQQLADWRNTHAHGSHYNPIMQQPALLTGHVTLPAAQPLNVGVAHVMRQQPTSTTSSRKSKQHQSSQRKNVISCVTVHDSPYSDSSSNTSPYSVQQRAGHNNANAFDTKGSLENHCTGNPRTIIVPPLKTQASEVLVECDSLVPGNLGPGQGRNLSLESGFPAFLLLEMLLYGS

SEQ ID NO: 49345 - protein, 1198 aa, Homo sapiens
MAPVYEGMASHVQVFSPHTLQSSAFCSVKKLKIEPSSNWDMTGYGSHSKVYSQSKNIPLSQPATTTVSTSLPVPNPSLPYEQTIVFPGSTGHIVVTSASSTSVTGQVLGGPHNLMRRSTVSLLDTYQKCGLKRKSEEIENTSSVQIIEEHPPMIQNNASGATVATATTSTATSKNSGSNSEGDYQLVQHEVLCSMTNTYEVLEFLGRGTFGQVVKCWKRGTNEIVAIKILKNHPSYARQGQIEVSILARLSTESADDYNFVRAYECFQHKNHTCLVFEMLEQNLYDFLKQNKFSPLPLKYIRPVLQQVATALMKLKSLGLIHADLKPENIMLVDPSRQPYRVKVIDFGSASHVSKAVCSTYLQSRYYRAPEIILGLPFCEAIDMWSLGCVIAELFLGWPLYPGASEYDQIRYISQTQGLPAEYLLSAGTKTTRFFNRDTDSPYPLWRLKTPDDHEAETGIKSKEARKYIFNCLDDMAQVNMTTDLEGSDMLVEKADRREFIDLLKKMLTIDADKRITPIETLNHPFVTMTHLLDFPHSTHVKSCFQNMEICKRRVNMYDTVNQSKTPFITHVAPSTSTNLTMTFNNQLTTVHNQAPSSTSATISLANPEVSILNYPSTLYQPSAASMAAVAQRSMPLQTGTAQICARPDPFQQALIVCPPGFQGLQASPSKHAGYSVRMENAVPIVTQAPGAQPLQIQPGLLAQQAWPSGTQQILLPPAWQQLTGVATHTSVQHATVIPETMAGTQQLADWRNTHAHGSHYNPIMQQPALLTGHVTLPAAQPLNVGVAHVMRQQPTSTTSSRKSKQHQSSVRNVSTCEVSSSQAISSPQRSKRVKENTPPRCAMVHSSPACSTSVTCGWGDVASSTTRERQRQTIVIPDTPSPTVSVITISSDTDEEEEQKHAPTSTVSKQRKNVISCVTVHDSPYSDSSSNTSPYSVQQRAGHNNANAFDTKGSLENHCTGNPRTIIVPPLKTQASEVLVECDSLVPVNTSHHSSSYKSKSSSNVTSTSGHSSGSSSGAITYRQQRPGPHFQQQQPLNLSQAQQHITTDRTGSHRRQQAYITPTMAQAPYSFPHNSPSHGTVHPHLAAAAAAAHLPTQPHLYTYTAPAALGSTGTVAHLVASQGSARHTVQHTAYPASIVHQVPVSMGPRVLPSPTIHPSQYPAQFAHQTYISASPASTVYTGYPLSPAKVNQYPYI

SEQ ID NO: 49346 - protein, 1171 aa, Homo sapiens
MAPVYEGMASHVQVFSPHTLQSSAFCSVKKLKIEPSSNWDMTGYGSHSKVYSQSKNIPLSQPATTTVSTSLPVPNPSLPYEQTIVFPGSTGHIVVTSASSTSVTGQVLGGPHNLMRRSTVSLLDTYQKCGLKRKSEEIENTSSVQIIEEHPPMIQNNASGATVATATTSTATSKNSGSNSEGDYQLVQHEVLCSMTNTYEVLEFLGRGTFGQVVKCWKRGTNEIVAIKILKNHPSYARQGQIEVSILARLSTESADDYNFVRAYECFQHKNHTCLVFEMLEQNLYDFLKQNKFSPLPLKYIRPVLQQVATALMKLKSLGLIHADLKPENIMLVDPSRQPYRVKVIDFGSASHVSKAVCSTYLQSRYYRAPEIILGLPFCEAIDMWSLGCVIAELFLGWPLYPGASEYDQIRYISQTQGLPAEYLLSAGTKTTRFFNRDTDSPYPLWRLKTPDDHEAETGIKSKEARKYIFNCLDDMAQVNMTTDLEGSDMLVEKADRREFIDLLKKMLTIDADKRITPIETLNHPFVTMTHLLDFPHSTHVKSCFQNMEICKRRVNMYDTVNQSKTPFITHVAPSTSTNLTMTFNNQLTTVHNQPSAASMAAVAQRSMPLQTGTAQICARPDPFQQALIVCPPGFQGLQASPSKHAGYSVRMENAVPIVTQAPGAQPLQIQPGLLAQQAWPSGTQQILLPPAWQQLTGVATHTSVQHATVIPETMAGTQQLADWRNTHAHGSHYNPIMQQPALLTGHVTLPAAQPLNVGVAHVMRQQPTSTTSSRKSKQHQSSVRNVSTCEVSSSQAISSPQRSKRVKENTPPRCAMVHSSPACSTSVTCGWGDVASSTTRERQRQTIVIPDTPSPTVSVITISSDTDEEEEQKHAPTSTVSKQRKNVISCVTVHDSPYSDSSSNTSPYSVQQRAGHNNANAFDTKGSLENHCTGNPRTIIVPPLKTQASEVLVECDSLVPVNTSHHSSSYKSKSSSNVTSTSGHSSGSSSGAITYRQQRPGPHFQQQQPLNLSQAQQHITTDRTGSHRRQQAYITPTMAQAPYSFPHNSPSHGTVHPHLAAAAAAAHLPTQPHLYTYTAPAALGSTGTVAHLVASQGSARHTVQHTAYPASIVHQVPVSMGPRVLPSPTIHPSQYPAQFAHQTYISASPASTVYTGYPLSPAKVNQYPYI

SEQ ID NO: 49347 - protein, 1215 aa, Homo sapiens
MASQVLVYPPYVYQTQSSAFCSVKKLKVEPSSCVFQERNYPRTYVNGRNFGNSHPPTKGSAFQTKIPFNRPRGHNFSLQTSAVVLKNTAGATKVIAAQAQQAHVQAPQIGAWRNRLHFLEGPQRCGLKRKSEELDNHSSAMQIVDELSILPAMLQTNMGNPVTVVTATTGSKQNCTTGEGDYQLVQHEVLCSMKNTYEVLDFLGRGTFGQVVKCWKRGTNEIVAIKILKNHPSYARQGQIEVSILARLSTENADEYNFVRAYECFQHRNHTCLVFEMLEQNLYDFLKQNKFSPLPLKVIRPILQQVATALKKLKSLGLIHADLKPENIMLVDPVRQPYRVKVIDFGSASHVSKTVCSTYLQSRYYRAPEIILGLPFCEAIDMWSLGCVIAELFLGWPLYPGALEYDQIRYISQTQGLPGEQLLNVGTKSTRFFCKETDMSHSGWRLKTLEEHEAETGMKSKEARKYIFNSLDDVAHVNTVMDLEGSDLLAEKADRREFVSLLKKMLLIDADLRITPAETLNHPFVNMKHLLDFPHSNHVKSCFHIMDICKSHLNSCDTNNHNKTSLLRPVASSSTATLTANFTKIGTLRSQALTTSAHSVVHHGIPLQAGTAQFGCGDAFQQTLIICPPAIQGIPATHGKPTSYSIRVDNTVPLVTQAPAVQPLQIRPGVLSQTWSGRTQQMLVPAWQQVTPLAPATTTLTSESVAGSHRLGDWGKMISCSNHYNSVMPQPLLTNQITLSAPQPVSVGIAHVVWPQPATTKKNKQCQNRGILVKLMEWEPGREEINAFSWSNSLQNTNIPHSAFISPKIINGKDVEEVSCIETQDNQNSEGEARNCCETSIRQDSDSSVSDKQRQTIIIADSPSPAVSVITISSDTDEEETSQRHSLRECKGSLDCEACQSTLNIDRMCSLSSPDSTLSTSSSGQSSPSPCKRPNSMSDEEQESSCDTVDGSPTSDSSGHDSPFAESTFVEDTHENTELVSSADTETKPAVCSVVVPPVELENGLNADEHMANTDSICQPLIKGRSAPGRLNQPSAVGTRQQKLTSAFQQQHLNFSQVQHFGSGHQEWNGNFGHRRQQAYIPTSVTSNPFTLSHGSPNHTAVHAHLAGNTHLGGQPTLLPYPSSATLSSAAPVAHLLASPCTSRPMLQHPTYNISHPSGIVHQVPVGLNPRLLPSPTIHQTQYKPIFPPHSYIAASPAYTGFPLSPTKLSQYPYM

SEQ ID NO: 49348 - protein, 1194 aa, Homo sapiens
MASQVLVYPPYVYQTQSSAFCSVKKLKVEPSSCVFQERNYPRTYVNGRNFGNSHPPTKGSAFQTKIPFNRPRGHNFSLQTSAVVLKNTAGATKVIAAQAQQAHVQAPQIGAWRNRLHFLEGPQRCGLKRKSEELDNHSSAMQIVDELSILPAMLQTNMGNPVTVVTATTGSKQNCTTGEGDYQLVQHEVLCSMKNTYEVLDFLGRGTFGQVVKCWKRGTNEIVAIKILKNHPSYARQGQIEVSILARLSTENADEYNFVRAYECFQHRNHTCLVFEMLEQNLYDFLKQNKFSPLPLKVIRPILQQVATALKKLKSLGLIHADLKPENIMLVDPVRQPYRVKVIDFGSASHVSKTVCSTYLQSRYYRAPEIILGLPFCEAIDMWSLGCVIAELFLGWPLYPGALEYDQIRYISQTQGLPGEQLLNVGTKSTRFFCKETDMSHSGWRLKTLEEHEAETGMKSKEARKYIFNSLDDVAHVNTVMDLEGSDLLAEKADRREFVSLLKKMLLIDADLRITPAETLNHPFVNMKHLLDFPHSNHVKSCFHIMDICKSHLNSCDTNNHNKTSLLRPVASSSTATLTANFTKIGTLRSQALTTSAHSVVHHGIPLQAGTAQFGCGDAFQQTLIICPPAIQGIPATHGKPTSYSIRVDNTVPLVTQAPAVQPLQIRPGVLSQTWSGRTQQMLVPAWQQVTPLAPATTTLTSESVAGSHRLGDWGKMISCSNHYNSVMPQPLLTNQITLSAPQPVSVGIAHVVWPQPATTKKNKQCQNRSNSLQNTNIPHSAFISPKIINGKDVEEVSCIETQDNQNSEGEARNCCETSIRQDSDSSVSDKQRQTIIIADSPSPAVSVITISSDTDEEETSQRHSLRECKGSLDCEACQSTLNIDRMCSLSSPDSTLSTSSSGQSSPSPCKRPNSMSDEEQESSCDTVDGSPTSDSSGHDSPFAESTFVEDTHENTELVSSADTETKPAVCSVVVPPVELENGLNADEHMANTDSICQPLIKGRSAPGRLNQPSAVGTRQQKLTSAFQQQHLNFSQVQHFGSGHQEWNGNFGHRRQQAYIPTSVTSNPFTLSHGSPNHTAVHAHLAGNTHLGGQPTLLPYPSSATLSSAAPVAHLLASPCTSRPMLQHPTYNISHPSGIVHQVPVGLNPRLLPSPTIHQTQYKPIFPPHSYIAASPAYTGFPLSPTKLSQYPYM

SEQ ID NO: 49349 - protein, 1194 aa, Homo sapiens; identical to SEQ ID NO: 49348

SEQ ID NO: 49350 - protein, 1194 aa, Homo sapiens; identical to SEQ ID NO: 49348

SEQ ID NO: 49351 - protein, 76 aa, Homo sapiens
MASQVLVYPPYVYQTQSSAFCSVKKLKVEPSSCVFQERNYPRTYVNGRNFGNSHPPTKGSAFQTKIPFNRPRGHNF

SEQ ID NO: 49352 - protein, 616 aa, Homo sapiens
MSTIQSETDCYDIIEVLGKGTFGEVAKGWRRSTGEMVAIKILKNDAYRNRIIKNELKLLHCMRGLDPEEAHVIRFLEFFHDALKFYLVFELLEQNLFEFQKENNFAPLPARHIRTVTLQVLTALARLKELAIIHADLKPENIMLVDQTRCPFRVKVIDFGSASIFSEVRYVKEPYIQSRFYRAPEILLGLPFCEKVDVWSLGCVMAELHLGWPLYPGNNEYDQVRYICETQGLPKPHLLHAACKAHHFFKRNPHPDAANPWQLKSSADYLAETKVRPLERRKYMLKSLDQIETVNGGSVASRLTFPDREALAEHADLKSMVELIKRMLTWESHERISPSAALRHPFVSMQQLRSAHETTHYYQLSLRSYRLSLQVEGKPPTPVVAAEDGTPYYCLAEEKEAAGMGSVAGSSPFFREEKAPGMQRAIDQLDDLSLQEAGHGLWGETCTNAVSDMMVPLKAAITGHHVPDSGPEPILAFYSSRLAGRHKARKPPAGSKSDSNFSNLIRLSQVSPEDDRPCRGSSWEEGEHLGASAEPLAILQRDEDGPNIDNMTMEAERPDPELFDPSSCPGEWLSEPDCTLESVRGPRAQGLPPRRSHQHGPPRGATSFLQHVTGHH

SEQ ID NO: 49353 - protein, 581 aa, Homo sapiens
MVAIKILKNDAYRNRIIKNELKLLHCMRGLDPEEAHVIRFLEFFHDALKFYLVFELLEQNLFEFQKENNFAPLPARHIRTVTLQVLTALARLKELAIIHADLKPENIMLVDQTRCPFRVKVIDFGSASIFSEVRYVKEPYIQSRFYRAPEILLGLPFCEKVDVWSLGCVMAELHLGWPLYPGNNEYDQVRYICETQGLPKPHLLHAACKAHHFFKRNPHPDAANPWQLKSSADYLAETKVRPLERRKYMLKSLDQIETVNGGSVASRLTFPDREALAEHADLKSMVELIKRMLTWESHERISPSAALRHPFVSMQQLRSAHETTHYYQLSLRSYRLSLQVEGKPPTPVVAAEDGTPYYCLAEEKEAAGMGSVAGSSPFFREEKAPGMQRAIDQLDDLSLQEAGHGLWGETCTNAVSDMMVPLKAAITGHHVPDSGPEPILAFYSSRLAGRHKARKPPAGSKSDSNFSNLIRLSQVSPEDDRPCRGSSWEEGEHLGASAEPLAILQRDEDGPNIDNMTMEAERPDPELFDPSSCPGEWLSEPDCTLESVRGPRAQGLPPRRSHQHGPPRGATSFLQHVTGHH

SEQ ID NO: 49354 - protein, 224 aa, Homo sapiens
MGEQPIFSTRAHVFQIDPNTKKNWVPTSKHAVTVSYFYDSTRNVYRIISLDGSKAIINSTITPNMTFTKTSQKFGQWADSRANTVYGLGFSSEHHLSKVTELECVSSQANAVHTHKTELNQTIQELEETLKLKEEEIERLKQEIDNARELQEQRDSLTQKLQEVEIRNKDLEGQLSDLEQRLEKSQNEQEAFRNNLKTLLEILDGKIFELTELRDNLAKLLECS

SEQ ID NO: 49355 - protein, 354 aa, Homo sapiens
MGEQPIFSTRAHVFQIDPNTKKNWVPTSKHAVTVSYFYDSTRNVYRIISLDGSKAIINSTITPNMTFTKTSQKFGQWADSRANTVYGLGFSSEHHLSKFAEKFQEFKEAARLAKEKSQEKMELTSTPSQESAGGDLQSPLTPESINGTDDERTPDVTQNSEPRAEPTQNALPFSHSSAISKHWEAELATLKGNNAKLTAALLESTANVKQWKQQLAAYQEEAERLHKRVTELECVSSQANAVHTHKTELNQTIQELEETLKLKEEEIERLKQEIDNARELQEQRDSLTQKLQEVEIRNKDLEGQLSDLEQRLEKSQNEQEAFRNNLKTLLEILDGKIFELTELRDNLAKLLECS

SEQ ID NO: 49356 - protein, 177 aa, Homo sapiens
MGEQPIFSTRAHVFQIDPNTKKNWVPTSKHAVTVSYFYDSTRNVYRIISLDGSKAIINSTITPNMTFTKTSQKFGQWADSRANTVYGLGFSSEHHLSKFAEKFQEFKEAARLAKEKSQEKMELTSTPSQESAGGDLQSPLTPESINGTDDERTPDVTQNSEPRAEPTQNALPFSHRK

SEQ ID NO: 49357 - protein, 180 aa, Homo sapiens
MGSAISKHWEAELATLKGNNAKLTAALLESTANVKQWKQQLAAYQEEAERLHKRVTELECVSSQANAVHTHKTELNQTIQELEETLKLKEEEIERLKQEIDNARELQEQRDSLTQKLQEVEIRNKDLEGQLSDLEQRLEKSQNEQEAFRNNLKTLLEILDGKIFELTELRDNLAKLLECS

SEQ ID NO: 49358 - protein, 354 aa, Homo sapiens
MGEQPIFTTRAHVFQIDPNTKKNWMPASKQAVTVSYFYDVTRNSYRIISVDGAKVIINSTITPNMTFTKTSQKFGQWADSRANTVFGLGFSSEQQLTKFAEKFQEVKEAAKIAKDKTQEKIETSSNHSQESGRETPSSTQASSVNGTDDEKASHAGPANTHLKSENDKLKIALTQSAANVKKWEIELQTLRESNARLTTALQESAASVEQWKRQFSICRDENDRLRNKIDELEEQCSEINREKEKNTQLKRRIEELEAELREKETELKDLRKQSEIIPQLMSECEYVSEKLEAAERDNQNLEDKVRSLKTDIEESKYRQRHLKVELKSFLEVLDGKIDDLHDFRRGLSKLGTDN

SEQ ID NO: 49359 - protein, 288 aa, Homo sapiens
MGEQPIFTTRAHVFQIDPNTKKNWMPASKQAVTVSYFYDVTRNSYRIISVDGAKVIINSTITPNMTFTKTSQKFGQWADSRANTVFGLGFSSEQQLTKFAEKFQEVKEAAKIAKDKTQEKIETSSNHSQASSVNGTDDEKASHAGPANTHLKSENDKLKIALTQSAANVKNEINREKEKNTQLKRRIEELEAELREKETELKDLRKQSEIIPQLMSECEYVSEKLEAAERDNQNLEDKVRSLKTDIEESKYRQRHLKVELKSFLEVLDGKIDDLHDFRRGLSKLGTDN

SEQ ID NO: 49360 - protein, 299 aa, Homo sapiens
MGEQPIFTTRAHVFQIDPNTKKNWMPASKQAVTVSYFYDVTRNSYRIISVDGAKVIINSTITPNMTFTKTSQKFGQWADSRANTVFGLGFSSEQQLTKFAEKFQEVKEAAKIAKDKTQEKIETSSNHSQESGRETPSSTQASSVNGTDDEKASHAGPANTHLKSENDKLKIALTQSAANVKNEINREKEKNTQLKRRIEELEAELREKETELKDLRKQSEIIPQLMSECEYVSEKLEAAERDNQNLEDKVRSLKTDIEESKYRQRHLKVELKSFLEVLDGKIDDLHDFRRGLSKLGTDN

SEQ ID NO: 49361 - protein, 343 aa, Homo sapiens
MGEQPIFTTRAHVFQIDPNTKKNWMPASKQAVTVSYFYDVTRNSYRIISVDGAKVIINSTITPNMTFTKTSQKFGQWADSRANTVFGLGFSSEQQLTKFAEKFQEVKEAAKIAKDKTQEKIETSSNHSQASSVNGTDDEKASHAGPANTHLKSENDKLKIALTQSAANVKKWEIELQTLRESNARLTTALQESAASVEQWKRQFSICRDENDRLRNKIDELEEQCSEINREKEKNTQLKRRIEELEAELREKETELKDLRKQSEIIPQLMSECEYVSEKLEAAERDNQNLEDKVRSLKTDIEESKYRQRHLKVELKSFLEVLDGKIDDLHDFRRGLSKLGTDN

SEQ ID NO: 49362 - skipped

SEQ ID NO: 49363 - protein, 325 aa, Homo sapiens
MSTAREQPIFSTRAHVFQIDPATKRNWIPAGKHALTVSYFYDATRNVYRIISIGGAKAIINSTVTPNMTFTKTSQKFGQWADSRANTVYGLGFASEQHLTQVPPSPLVSANGPGEEKLFRSQSADAPGPTERERLKKMLSEGSVGEVQWEAEFFALQDSNNKLAGALREANAAAAQWRQQLEAQRAEAERLRQRVAELEAQAASEVTPTGEKEGLGQGQSLEQLEALVQTKDQEIQTLKSQTGGPREALEAAEREETQQKVQDLETRNAELEHQLRAMERSLEEARAERERARAEVGRAAQLLDVSLFELSELREGLARLAEAAP

SEQ ID NO: 49364 - protein, 358 aa, Homo sapiens
MSTAREQPIFSTRAHVFQIDPATKRNWIPAGKHALTVSYFYDATRNVYRIISIGGAKAIINSTVTPNMTFTKTSQKFGQWADSRANTVYGLGFASEQHLTQFAEKFQEVKEAARLAREKSQDGGELTSPALGLASHQVPPSPLVSANGPGEEKLFRSQSADAPGPTERERLKKMLSEGSVGEVQWEAEFFALQDSNNKLAGALREANAAAAQWRQQLEAQRAEAERLRQRVAELEAQAASEVTPTGEKEGLGQGQSLEQLEALVQTKDQEIQTLKSQTGGPREALEAAEREETQQKVQTRNAELEHQLRAMERSLEEARAERERARAEVGRAAQLLDVSLFELSELREGLARLAEAAP

SEQ ID NO: 49365 - protein, 145 aa, Homo sapiens
MSTAREQPIFSTRAHVFQIDPATKRNWIPAGKHALTVSYFYDATRNVYRIISIGGAKAIINSTVTPNMTFTKTSQKFGQWADSRANTVYGLGFASEQHLTQFAEKFQEVKEAARLAREKSQDGWGGPQSALVVGSFGAVFELLIV

SEQ ID NO: 49366 - protein, 361 aa, Homo sapiens
MSTAREQPIFSTRAHVFQIDPATKRNWIPAGKHALTVSYFYDATRNVYRIISIGGAKAIINSTVTPNMTFTKTSQKFGQWADSRANTVYGLGFASEQHLTQFAEKFQEVKEAARLAREKSQDGGELTSPALGLASHQVPPSPLVSANGPGEEKLFRSQSADAPGPTERERLKKMLSEGSVGEVQWEAEFFALQDSNNKLAGALREANAAAAQWRQQLEAQRAEAERLRQRVAELEAQAASEVTPTGEKEGLGQGQSLEQLEALVQTKDQEIQTLKSQTGGPREALEAAEREETQQKVQDLETRNAELEHQLRAMERSLEEARAERERARAEVGRAAQLLDVSLFELSELREGLARLAEAAP

SEQ ID NO: 49367 - protein, 358 aa, Homo sapiens; identical to SEQ ID NO: 49364

SEQ ID NO: 49368 - protein, 361 aa, Homo sapiens; identical to SEQ ID NO: 49366

SEQ ID NO: 49369 - protein, 361 aa, Homo sapiens; identical to SEQ ID NO: 49366

SEQ ID NO: 49370 - protein, 325 aa, Homo sapiens; identical to SEQ ID NO: 49363

SEQ ID NO: 49371 - protein, 391 aa, Homo sapiens
MESETEPEPVTLLVKSPNQRHRDLELSGDRGWSVGHLKAHLSRVYPERPRPEDQRLIYSGKLLLDHQCLRDLLPKQEKRHVLHLVCNVKSPSKMPEINAKVAESTEEPAGSNRGQYPEDSSSDGLRQREVLRNLSSPGWENISRPEAAQQAFQGLGPGFSGYTPYGWLQLSWFQQIYARQYYMQYLAATAASGAFVPPPSAQEIPVVSAPAPAPIHNQFPAENQPANQNAAPQVVVNPGANQNLRMNAQGGPIVEEDDEINRDWLDWTYSAATFSVFLSILYFYSSLSRFLMVMGATVVMYLHHVGWFPFRPRPVQNFPNDGPPPDVVNQDPNNNLQEGTDPETEDPNHLPPDRDVLDGEQTSPSFMSTAWLVFKTFFASLLPEGPPAIAN

SEQ ID NO: 49372 - protein, 232 aa, Homo sapiens
MESETEPEPVTLLVKSPNQRHRDLELSGDRGWSVGHLKAHLSRVYPERPRPEDQRLIYSGKLLLDHQCLRDLLPKEKRHVLHLVCNVKSPSKMPEINAKVAESTEEPAGSNRGQYPEDSSSDGLRQREVLRNLSSPGWENISRHHVGWFPFRPRPVQNFPNDGPPPDVVNQDPNNNLQEGTDPETEDPNHLPPDRDVLDGEQTSPSFMSTAWLVFKTFFASLLPEGPPAIAN

SEQ ID NO: 49373 - protein, 366 aa, Homo sapiens
MESETEPEPVTLLVKSPNQRHRDLELSGDRGWSVGHLKAHLSRVYPERPRPEDQRLIYSGKLLLDHQCLRDLLPKVAESTEEPAGSNRGQYPEDSSSDGLRQREVLRNLSSPGWENISRPEAAQQAFQGLGPGFSGYTPYGWLQLSWFQQIYARQYYMQYLAATAASGAFVPPPSAQEIPVVSAPAPAPIHNQFPAENQPANQNAAPQVVVNPGANQNLRMNAQGGPIVEEDDEINRDWLDWTYSAATFSVFLSILYFYSSLSRFLMVMGATVVMYLHHVGWFPFRPRPVQNFPNDGPPPDVVNQDPNNNLQEGTDPETEDPNHLPPDRDVLDGEQTSPSFMSTAWLVFKTFFASLLPEGPPAIAN

SEQ ID NO: 49374 - protein, 390 aa, Homo sapiens
MESETEPEPVTLLVKSPNQRHRDLELSGDRGWSVGHLKAHLSRVYPERPRPEDQRLIYSGKLLLDHQCLRDLLPKEKRHVLHLVCNVKSPSKMPEINAKVAESTEEPAGSNRGQYPEDSSSDGLRQREVLRNLSSPGWENISRPEAAQQAFQGLGPGFSGYTPYGWLQLSWFQQIYARQYYMQYLAATAASGAFVPPPSAQEIPVVSAPAPAPIHNQFPAENQPANQNAAPQVVVNPGANQNLRMNAQGGPIVEEDDEINRDWLDWTYSAATFSVFLSILYFYSSLSRFLMVMGATVVMYLHHVGWFPFRPRPVQNFPNDGPPPDVVNQDPNNNLQEGTDPETEDPNHLPPDRDVLDGEQTSPSFMSTAWLVFKTFFASLLPEGPPAIAN

SEQ ID NO: 49375 - protein, 445 aa, Homo sapiens
MAELKYISGFGNECSSEDPRCPGSLPEGQNNPQVCPYNLYAEQLSGSAFTCPRSTNKRSWLYRILPSVSHKPFESIDEGQVTHNWDEVDPDPNQLRWKPFEIPKASQKKVDFVSGLHTLCGAGDIKSNNGLAIHIFLCNTSMENRCFYNSDGDFLIVPQKGNLLIYTEFGKMLVQPNEICVIQRGMRFSIDVFEETRGYILEVYGVHFELPDLGPIGANGLANPRDFLIPIAWYEDRQVPGGYTVINKYQGKLFAAKQDVSPFNVVAWHGNYTPYKYNLKNFMVINSVAFDHADPSIFTVLTAKSVRPGVAIADFVIFPPRWGVADKTFRPPYYHRNCMSEFMGLIRGHYEAKQGGFLPGGGSLHSTMTPHGPDADCFEKASKVKLAPERIADGTMAFMFESSLSLAVTKWGLKASRCLDENYHKCWEPLKSHFTPNSRNPAEPN

SEQ ID NO: 49376 - protein, 728 aa, Homo sapiens
MEETQPPPQPKLPLCDSLMIWLQTFNTASPCQDVKQLTSGVAMAQVLHQIDAAWFNESWLSRIKEDVGDNWRIKASNVKKVLQGIMSYYHEFLGQQISEALIPDLNQITECSDPVELGRLLQLILGCAINCEKKQEHIQNIMTLEESVQHVVMTAIQELMSKEILSSPPNDAVGELEQQLKRALEELQEALAEKEELRQRCEELDMQVTTLQDEKNSLVSENEMMNEKLDQLDGSFDDPNTVVAKKYFHAQLQLEQLQEENFRLEAAKDDYRVHCEELEKQLIEFQHRNDELTSLAEETRALKDEIDVLRATSDKANKLESTVEIYRQKLQDLNDLRKQVKTLQETNMMYMHNTVSLEEELKKANAARTQLETYKRQVQDLHVKLSSESKRADTLAFEMKRLEEKHEALLKEKERLIEQRDTLKETNEELRCSQVQQDHLNQTDASATKSYENLAAEIMPVEYREVFIRLQHENKMLRLQQEGSENERIEELQEQLEQKHRKMNELETEQRLSKERIRELQQQIEDLQKSLQEQGSKSEGESSSKLKQKLEAHMEKLTEVHEELQKKQELIEDLQPDINQNVQKINELEAALQKKDEDMKAMEERYKMYLEKARNVIKTLDPKLNPASAEIMLLRKQLAEKERRIEILESECKVAKFRDYEEKLIVSAWYNKSLAFQKLGMESRLVSGGGACSDTGACTPARSFLAQQRHITNTRRNLSVKVPATTSD

SEQ ID NO: 49377 - protein, 686 aa, Homo sapiens
MAQVLHQIDAAWFNESWLSRIKEDVGDNWRIKASNVKKVLQGIMSYYHEFLGQQISEALIPDLNQITECSDPVELGRLLQLILGCAINCEKKQEHIQNIMTLEESVQHVVMTAIQELMSKEILSSPPNDAVGELEQQLKRALEELQEALAEKEELRQRCEELDMQVTTLQDEKNSLVSENEMMNEKLDQLDGSFDDPNTVVAKKYFHAQLQLEQLQEENFRLEAAKDDYRVHCEELEKQLIEFQHRNDELTSLAEETRALKDEIDVLRATSDKANKLESTVEIYRQKLQDLNDLRKQVKTLQETNMMYMHNTVSLEEELKKANAARTQLETYKRQVQDLHVKLSSESKRADTLAFEMKRLEEKHEALLKEKERLIEQRDTLKETNEELRCSQVQQDHLNQTDASATKSYENLAAEIMPVEYREVFIRLQHENKMLRLQQEGSENERIEELQEQLEQKHRKMNELETEQRLSKERIRELQQQIEDLQKSLQEQGSKSEGESSSKLKQKLEAHMEKLTEVHEELQKKQELIEDLQPDINQNVQKINELEAALQKKDEDMKAMEERYKMYLEKARNVIKTLDPKLNPASAEIMLLRKQLAEKERRIEILESECKVAKFRDYEEKLIVSAWYNKSLAFQKLGMESRLVSGGGACSDTGACTPARSFLAQQRHITNTRRNLSVKVPATTSD

SEQ ID NO: 49378 - protein, 137 aa, Homo sapiens
MEETQPPPQPKLPLCDSLMIWLQTFNTASPCQDVKQLTSGVAMAQVLHQIDAAWFNESWLSRIKEDVGDNWRIKASNVKKVLQGIMSYYHEFLGQQISEALIPDLNQITECSDPVELGRLLQLILGCAINCEKKQEH

SEQ ID NO: 49379 - protein, 717 aa, Homo sapiens
MSVDKAELCGSLLTWLQTFHVPSPCASPQDLSSGLAVAYVLNQIDPSWFNEAWLQGISEDPGPNWKLKVSNLKMVLRSLVEYSQDVLAHPVSEEHLPDVSLIGEFSDPAELGKLLQLVLGCAISCEKKQDHIQRIMTLEESVQHVVMEAIQELMTKDTPDSLSPETYGNFDSQSRRYYFLSEEAEEGDELQQRCLDLERQLMLLSEEKQSLAQENAGLRERMGRPEGEGTPGLTAKKLLLLQSQLEQLQEENFRLESGREDERLRCAELEREVAELQHRNQALTSLAQEAQALKDEMDELRQSSERAGQLEATLTSCRRRLGELRELRRQVRQLEERNAGHAERTRQLEDELRRAGSLRAQLEAQRRQVQELQGQRQEEAMKAEKWLFECRNLEEKYESVTKEKERLLAERDSLREANEELRCAQLQPRGLTQADPSLDPTSTPVDNLAAEILPAELRETLLRLQLENKRLCRQEAADRERQEELQRHLEDANRARHGLETQHRLNQQQLSELRAQVEDLQKALQEQGGKTEDSILLKRKLEEHLQKLHEADLELQRKREYIEELEPPTDSSTARRIEELQHNLQKKDADLRAMEERYRRYVDKARMVMQTMEPKQRPAAGAPPELHSLRTQLRERDVRIRHLEMDFEKSRSQREQEEKLLISAWYNMGMALQQRAGEERAPAHAQSFLAQQRLATNSRRGPLGRLASLNLRPTDKH

SEQ ID NO: 49380 - protein, 719 aa, Homo sapiens
MSVDKAELCGSLLTWLQTFHVPSPCASPQDLSSGLAVAYVLNQIDPSWFNEAWLQGISEDPGPNWKLKVSNLKMVLRSLVEYSQDVLAHPVSEEHLPDVSLIGEFSDPAELGKLLQLVLGCAISCEKKQDHIQRIMTLEESVQHVVMEAIQELMTKDTPDSLSPETYGNFDSQSRRYYFLSEEAEEGDELQQRCLDLERQLMLLSEEKQSLAQENAGLRERMGRPEGEGTPGLTAKKLLLLQSQLEQLQEENFRLESGREDERLRCAELEREVAELQHRNQALTSLAQEAQALKDEMDELRQSSERAGQLEATLTSCRRRLGELRELRRQVRQLEERNAGHAERTRQLEDELRRAGSLRAQLEAQRRQVQELQGQRQEEAMKAEKWLFECRNLEEKYESVTKEKERLLAERDSLREANEELRCAQLQPRGLTQADPSLDPTSTPVDNLAAEILPAELRETLLRLQLENKRLCRQEAADRERQEELQRHLEDANRARHGLETQHRLNQQQLSELRAQVEDLQKALQEQGGKTEDAISILLKRKLEEHLQKLHEADLELQRKREYIEELEPPTDSSTARRIEELQHNLQKKDADLRAMEERYRRYVDKARMVMQTMEPKQRPAAGAPPELHSLRTQLRERDVRIRHLEMDFEKSRSQREQEEKLLISAWYNMGMALQQRAGEERAPAHAQSFLAQQRLATNSRRGPLGRLASLNLRPTDKH

SEQ ID NO: 49381 - protein, 718 aa, Homo sapiens
MFSVESLERAELCESLLTWIQTFNVDAPCQTVEDLTNGVVMAQVLQKIDPAYFDENWLNRIKTEVGDNWRLKISNLKKILKGILDYNHEILGQQINDFTLPDVNLIGEHSDAAELGRMLQLILGCAVNCEQKQEYIQAIMMMEESVQHVVMTAIQELMSKESPVSAGNDAYVDLDRQLKKTTEELNEALSAKEEIAQRCHELDMQVAALQEEKSSLLAENQVLMERLNQSDSIEDPNSPAGRRHLQLQTQLEQLQEETFRLEAAKDDYRIRCEELEKEISELRQQNDELTTLADEAQSLKDEIDVLRHSSDKVSKLEGQVESYKKKLEDLGDLRRQVKLLEEKNTMYMQNTVSLEEELRKANAARSQLETYKRQVVELQNRLSEESKKADKLDFEYKRLKEKVDSLQKEKDRLRTERDSLKETIEELRCVQAQEGQLTTQGLMPLGSQESSDSLAAEIVTPEIREKLIRLQHENKMLKLNQEGSDNEKIALLQSLLDDANLRKNELETENRLVNQRLLEVQSQVEELQKSLQDQGSKAEDSVLLKKKLEEHLEKLHEANNELQKKRAIIEDLEPRFNNSSLKIEELQEALRKKEEEMKQMEERYKKYLEKAKSVIRTLDPKQNQGAAPEIQALKNQLQERDRLFHSLEKEYEKTKSQREMEEKYIVSAWYNMGMTLHKKAAEDRLASTGSGQSFLARQRQATSSRRSYPGHVQPATAR

SEQ ID NO: 49382 - protein, 73 aa, Homo sapiens
MSAETASGPTEDQVEILEYNFNKVDKHPDSTTLCLIAAEAGLSEEETQKWFKQRLAKWRRSEGLPSECRSVTD

SEQ ID NO: 49383 - protein, 73 aa, Homo sapiens; identical to SEQ ID NO: 49382

SEQ ID NO: 49384 - protein, 73 aa, Homo sapiens; identical to SEQ ID NO: 49382

SEQ ID NO: 49385 - protein, 94 aa, Homo sapiens
MSAETASGPTEDQVEILEYNFNKVDKHPDSTTLCLIAAEAGLSEEETQGSDLISRSKIWHPESSPQREGYPHDSLPCLAFDYFSLLPPQCKEMV

SEQ ID NO: 49386 - protein, 91 aa, Homo sapiens
MLIFLGCYRRRLEERAGTMSAETASGPTEDQVEILEYNFNKVDKHPDSTTLCLIAAEAGLSEEETQKWFKQRLAKWRRSEGLPSECRSVTD

SEQ ID NO: 49387 - protein, 73 aa, Homo sapiens; identical to SEQ ID NO: 49382

SEQ ID NO: 49388 - protein, 94 aa, Homo sapiens; identical to SEQ ID NO: 49385

SEQ ID NO: 49389 - protein, 73 aa, Homo sapiens; identical to SEQ ID NO: 49382

SEQ ID NO: 49390 - protein, 91 aa, Homo sapiens; identical to SEQ ID NO: 49386

SEQ ID NO: 49391 - protein, 94 aa, Homo sapiens; identical to SEQ ID NO: 49385

SEQ ID NO: 49392 - protein, 73 aa, Homo sapiens; identical to SEQ ID NO: 49382

SEQ ID NO: 49393 - protein, 73 aa, Homo sapiens; identical to SEQ ID NO: 49382

SEQ ID NO: 49394 - protein, 112 aa, Homo sapiens
MLIFLGCYRRRLEERAGTMSAETASGPTEDQVEILEYNFNKVDKHPDSTTLCLIAAEAGLSEEETQGSDLISRSKIWHPESSPQREGYPHDSLPCLAFDYFSLLPPQCKEMV

SEQ ID NO: 49395 - protein, 73 aa, Homo sapiens; identical to SEQ ID NO: 49382

SEQ ID NO: 49396 - protein, 73 aa, Homo sapiens; identical to SEQ ID NO: 49382

SEQ ID NO: 49397 - protein, 73 aa, Homo sapiens; identical to SEQ ID NO: 49382

SEQ ID NO: 49398 - protein, 47 aa, Homo sapiens
MSAETASGPTEDQVEILEYNFNKVDKHPDSTTLCLIAAEAGLSEEET

SEQ ID NO: 49399 - protein, 387 aa, Homo sapiens
MATAQLQRTPMSALVFPNKISTEHQSLVLVKRLLAVSVSCITYLRGIFPECAYGTRYLDDLCVKILREDKNCPGSTQLVKWMLGCYDALQKKYVYTNPEDPQTISECYQFKFKYTNNGPLMDFISKNQSNESSMLSTDTKKASILLIRKIYILMQNLGPLPNDVCLTMKLFYYDEVTPPDYQPPGFKDGDCEGVIFEGEPMYLNVGEVSTPFHIFKVKVTTERERMENIDSTILSPKQIKTPFQKILRDKDVEDEQEHYTSDDLDIETKMEEQEKNPASSELEEPSLVCEEDEIMRSKESPDLSISHSQVEQLVNKTSELDMSESKTRSGKVFQNKMANGNQPVKSSKENRKRSQHESGRIVLHHFDSSSQESVPKRRKFSEPKEHI

SEQ ID NO: 49400 - protein, 394 aa, Homo sapiens
MATAQLQRTPMSALVFPNKISTEHQSLVLVKRLLAVSVSCITYLRGIFPECAYGTRYLDDLCVKILREDKNCPGSTQLVKWMLGCYDALQKKYLRMVVLAVYTNPEDPQTISECYQFKFKYTNNGPLMDFISKNQSNESSMLSTDTKKASILLIRKIYILMQNLGPLPNDVCLTMKLFYYDEVTPPDYQPPGFKDGDCEGVIFEGEPMYLNVGEVSTPFHIFKVKVTTERERMENIDSTILSPKQIKTPFQKILRDKDVEDEQEHYTSDDLDIETKMEEQEKNPASSELEEPSLVCEEDEIMRSKESPDLSISHSQVEQLVNKTSELDMSESKTRSGKVFQNKMANGNQPVKSSKENRKRSQHESGRIVLHHFDSSSQESVPKRRKFSEPKEHI

SEQ ID NO: 49401 - protein, 190 aa, Homo sapiens
MRLWNKISRWMLGCYDALQKKYLRMVVLAVYTNPEDPQTISECYQFKFKYTNNGPLMDFISKNQSNESSMLSTDTKKASILLIRKIYILMQNLGPLPNDVCLTMKLFYYDEVTPPDYQPPGFKDGDCEGVIFEGEPMYLNVGEVSTPFHIFKVKVTTERERMENIDSTILSPKQIKTPFQKILRDKDVED

SEQ ID NO: 49402 - protein, 323 aa, Homo sapiens
MRLWNKISRWMLGCYDALQKKYLKIMELTVYTNPEDPQTISECYQFKFKYTNNGPLMDFISKNQSNESSMLSTDTKKASILLIRKIYILMQNLGPLPNDVCLTMKLFYYDEVTPPDYQPPGFKDGDCEGVIFEGEPMYLNVGEVSTPFHIFKVKVTTERERMENIDSTILSPKQIKTPFQKILRDKDVEDEQEHYTSDDLDIETKMEEQEKNPASSELEEPSLVCEEDEIMRSKESPDLSISHSQVEQLVNKTSELDMSESKTRSGKVFQNKMANGNQPVKSSKENRKRSQHESGRIVLHHFDSSSQESVPKRRKFSEPKEHI

SEQ ID NO: 49403 - protein, 394 aa, Homo sapiens
MATAQLQRTPMSALVFPNKISTEHQSLVLVKRLLAVSVSCITYLRGIFPECAYGTRYLDDLCVKILREDKNCPGSTQLVKWMLGCYDALQKKYLKIMELTVYTNPEDPQTISECYQFKFKYTNNGPLMDFISKNQSNESSMLSTDTKKASILLIRKIYILMQNLGPLPNDVCLTMKLFYYDEVTPPDYQPPGFKDGDCEGVIFEGEPMYLNVGEVSTPFHIFKVKVTTERERMENIDSTILSPKQIKTPFQKILRDKDVEDEQEHYTSDDLDIETKMEEQEKNPASSELEEPSLVCEEDEIMRSKESPDLSISHSQVEQLVNKTSELDMSESKTRSGKVFQNKMANGNQPVKSSKENRKRSQHESGRIVLHHFDSSSQESVPKRRKFSEPKEHI

SEQ ID NO: 49404 - protein, 314 aa, Homo sapiens
MRLWNKISRWMLGCYDALQKKYLRMVVLATISECYQFKFKYTNNGPLMDFISKNQSNESSMLSTDTKKASILLIRKIYILMQNLGPLPNDVCLTMKLFYYDEVTPPDYQPPGFKDGDCEGVIFEGEPMYLNVGEVSTPFHIFKVKVTTERERMENIDSTILSPKQIKTPFQKILRDKDVEDEQEHYTSDDLDIETKMEEQEKNPASSELEEPSLVCEEDEIMRSKESPDLSISHSQVEQLVNKTSELDMSESKTRSGKVFQNKMANGNQPVKSSKENRKRSQHESGRIVLHHFDSSSQESVPKRRKFSEPKEHI

SEQ ID NO: 49405 - protein, 164 aa, Homo sapiens
MRLWNKISRWMLGCYDALQKKYVYTNPEDPQTISECYQFKFKYTNNGPLMDFISKNQSNESSMLSTDTKKASILLIRKIYILMQNLGPLPNDVCLTMKLFYYDEVTPPDYQPPGFKDGDCEGVIFEGEPMYLNVGEVSTPFHIFKVKVTTERERMENIDSTILS

SEQ ID NO: 49406 - protein, 314 aa, Homo sapiens
MRLWNKISRWMLGCYDALQKKYLRYFLFKTISECYQFKFKYTNNGPLMDFISKNQSNESSMLSTDTKKASILLIRKIYILMQNLGPLPNDVCLTMKLFYYDEVTPPDYQPPGFKDGDCEGVIFEGEPMYLNVGEVSTPFHIFKVKVTTERERMENIDSTILSPKQIKTPFQKILRDKDVEDEQEHYTSDDLDIETKMEEQEKNPASSELEEPSLVCEEDEIMRSKESPDLSISHSQVEQLVNKTSELDMSESKTRSGKVFQNKMANGNQPVKSSKENRKRSQHESGRIVLHHFDSSSQESVPKRRKFSEPKEHI

SEQ ID NO: 49407 - protein, 2035 aa, Homo sapiens
MASAVSPANLPAVLLQPRWKRVVGWSGPVPRPRHGHRAVAIKELIVVFGGGNEGIVDELHVYNTATNQWFIPAVRGDIPPGCAAYGFVCDGTRLLVFGGMVEYGKYSNDLYELQASRWEWKRLKAKTPKNGPPPCPRLGHSFSLVGNKCYLFGGLANDSEDPKNNIPRYLNDLYILELRPGSGVVAWDIPITYGVLPPPRESHTAVVYTEKDNKKSKLVIYGGMSGCRLGDLWTLDIDTLTWNKPSLSGVAPLPRSLHSATTIGNKMYVFGGWVPLVMDDVKVATHEKEWKCTNTLACLNLDTMAWETILMDTLEDNIPRARAGHCAVAINTRLYIWSGRDGYRKAWNNQVCCKDLWYLETEKPPPPARVQLVRANTNSLEVSWGAVATADSYLLQLQKYDIPATAATATSPTPNPVPSVPANPPKSPAPAAAAPAVQPLTQVGITLLPQAAPAPPTTTTIQVLPTVPGSSISVPTAARTQGVPAVLKVTGPQATTGTPLVTMRPASQAGKAPVTVTSLPAGVRMVVPTQSAQGTVIGSSPQMSGMAALAAAAAATQKIPPSSAPTVLSVPAGTTIVKTMAVTPGTTTLPATVKVASSPVMVSNPATRMLKTAAAQVGTSVSSATNTSTRPIITVHKSGTVTVAQQAQVVTTVVGGVTKTITLVKSPISVPGGSALISNLGKVMSVVQTKPVQTSAVTGQASTGPVTQIIQTKGPLPAGTILKLVTSADGKPTTIITTTQASGAGTKPTILGISSVSPSTTKPGTTTIIKTIPMSAIITQAGATGVTSSPGIKSPITIITTKVMTSGTGAPAKIITAVPKIATGHGQQGVTQVVLKGAPGQPGTILRTVPMGGVRLVTPVTVSAVKPAVTTLVVKGTTGVTTLGTVTGTVSTSLAGAGGHSTSASLATPITTLGTIATLSSQVINPTAITVSAAQTTLTAAGGLTTPTITMQPVSQPTQVTLITAPSGVEAQPVHDLPVSILASPTTEQPTATVTIADSGQGDVQPGTVTLVCSNPPCETHETGTTNTATTTVVANLGGHPQPTQVQFVCDRQEAAASLVTSTVGQQNGSVVRVCSNPPCETHETGTTNTATTATSNMAGQHGCSNPPCETHETGTTNTATTAMSSVGANHQRDARRACAAGTPAVIRISVATGALEAAQGSKSQCQTRQTSATSTTMTVMATGAPCSAGPLLGPSMAREPGGRSPAFVQLAPLSSKVRLSSPSIKDLPAGRHSHAVSTAAMTRSSVGAGEPRMAPVCESLQGGSPSTTVTVTALEALLCPSATVTQVCSNPPCETHETGTTNTATTSNAGSAQRVCSNPPCETHETGTTHTATTATSNGGTGQPEGGQQPPAGRPCETHQTTSTGTTMSVSVGALLPDATSSHRTVESGLEVAAAPSVTPQAGTALLAPFPTQRVCSNPPCETHETGTTHTATTVTSNMSSNQDPPPAASDQGEVESTQGDSVNITSSSAITTTVSSTLTRAVTTVTQSTPVPGPSVPPPEELQVSPGPRQQLPPRQLLQSASTALMGESAEVLSASQTPELPAAVDLSSTGEPSSGQESAGSAVVATVVVQPPPPTQSEVDQLSLPQELMAEAQAGTTTLMVTGLTPEELAVTAAAEAAAQAAATEEAQALAIQAVLQAAQQAVMGTGEPMDTSEAAATVTQAELGHLSAEGQEGQATTIPIVLTQQELAALVQQQQLQEAQAQQQHHHLPTEALAPADSLNDPAIESNCLNELAGTVPSTVALLPSTATESLAPSNTFVAPQPVVVASPAKLQAAATLTEVANGIESLGVKPDLPPPPSKAPMKKENQWFDVGVIKGTNVMVTHYFLPPDDAVPSDDDLGTVPDYNQLKKQELQPGTAYKFRVAGINACGRGPFSEISAFKTCLPGFPGAPCAIKISKSPDGAHLTWEPPSVTSGKIIEYSVYLAIQSSQAGGELKSSTPAQLAFMRVYCGPSPSCLVQSSSLSNAHIDYTTKPAIIFRIAARNEKGYGPATQVRWLQETSKDSSGTKPANKRPMSSPEMKSAPKKSKADGQ

SEQ ID NO: 49408 - protein, 1966 aa, Homo sapiens
MASAVSPANLPAVLLQPRWKRVVGWSGPVPRPRHGHRAVAIKELIVVFGGGNEGIVDELHVYNTATNQWFIPAVRGDIPPGCAAYGFVCDGTRLLVFGGMVEYGKYSNDLYELQASRWEWKRLKAKTPKNGPPPCPRLGHSFSLVGNKCYLFGGLANDSEDPKNNIPRYLNDLYILELRPGSGVVAWDIPITYGVLPPPRESHTAVVYTEKDNKKSKLVIYGGMSGCRLGDLWTLDIDTLTWNKPSLSGVAPLPRSLHSATTIGNKMYVFGGWVPLVMDDVKVATHEKEWKCTNTLACLNLDTMAWETILMDTLEDNIPRARAGHCAVAINTRLYIWSGRDGYRKAWNNQVCCKDLWYLETEKPPPPARVQLVRANTNSLEAAPAPPTTTTIQVLPTVPGSSISVPTAARTQGVPAVLKVTGPQATTGTPLVTMRPASQAGKAPVTVTSLPAGVRMVVPTQSAQGTVIGSSPQMSGMAALAAAAAATQKIPPSSAPTVLSVPAGTTIVKTMAVTPGTTTLPATVKVASSPVMVSNPATRMLKTAAAQVGTSVSSATNTSTRPIITVHKSGTVTVAQQAQVVTTVVGGVTKTITLVKSPISVPGGSALISNLGKVMSVVQTKPVQTSAVTGQASTGPVTQIIQTKGPLPAGTILKLVTSADGKPTTIITTTQASGAGTKPTILGISSVSPSTTKPGTTTIIKTIPMSAIITQAGATGVTSSPGIKSPITIITTKVMTSGTGAPAKIITAVPKIATGHGQQGVTQVVLKGAPGQPGTILRTVPMGGVRLVTPVTVSAVKPAVTTLVVKGTTGVTTLGTVTGTVSTSLAGAGGHSTSASLATPITTLGTIATLSSQVINPTAITVSAAQTTLTAAGGLTTPTITMQPVSQPTQVTLITAPSGVEAQPVHDLPVSILASPTTEQPTATVTIADSGQGDVQPGTVTLVCSNPPCETHETGTTNTATTTVVANLGGHPQPTQVQFVCDRQEAAASLVTSTVGQQNGSVVRVCSNPPCETHETGTTNTATTATSNMAGQHGCSNPPCETHETGTTNTATTAMSSVGANHQRDARRACAAGTPAVIRISVATGALEAAQGSKSQCQTRQTSATSTTMTVMATGAPCSAGPLLGPSMAREPGGRSPAFVQLAPLSSKVRLSSPSIKDLPAGRHSHAVSTAAMTRSSVGAGEPRMAPVCESLQGGSPSTTVTVTALEALLCPSATVTQVCSNPPCETHETGTTNTATTSNAGSAQRVCSNPPCETHETGTTHTATTATSNGGTGQPEGGQQPPAGRPCETHQTTSTGTTMSVSVGALLPDATSSHRTVESGLEVAAAPSVTPQAGTALLAPFPTQRVCSNPPCETHETGTTHTATTVTSNMSSNQDPPPAASDQGEVESTQGDSVNITSSSAITTTVSSTLTRAVTTVTQSTPVPGPSVPPPEELQVSPGPRQQLPPRQLLQSASTALMGESAEVLSASQTPELPAAVDLSSTGEPSSGQESAGSAVVATVVVQPPPPTQSEVDQLSLPQELMAEAQAGTTTLMVTGLTPEELAVTAAAEAAAQAAATEEAQALAIQAVLQAAQQAVMGTGEPMDTSEAAATVTQAELGHLSAEGQEGQATTIPIVLTQQELAALVQQQQLQEAQAQQQHHHLPTEALAPADSLNDPAIESNCLNELAGTVPSTVALLPSTATESLAPSNTFVAPQPVVVASPAKLQAAATLTEVANGIESLGVKPDLPPPPSKAPMKKENQWFDVGVIKGTNVMVTHYFLPPDDAVPSDDDLGTVPDYNQLKKQELQPGTAYKFRVAGINACGRGPFSEISAFKTCLPGFPGAPCAIKISKSPDGAHLTWEPPSVTSGKIIEYSVYLAIQSSQAGGELKSSTPAQLAFMRVYCGPSPSCLVQSSSLSNAHIDYTTKPAIIFRIAARNEKGYGPATQVRWLQETSKDSSGTKPANKRPMSSPEMKSAPKKSKADGQ

SEQ ID NO: 49409 - protein, 2080 aa, Homo sapiens
MASAVSPANLPAVLLQPRWKRVVGWSGPVPRPRHGHRAVAIKELIVVFGGGNEGIVDELHVYNTATNQWFIPAVRGDIPPGCAAYGFVCDGTRLLVFGGMVEYGKYSNDLYELQASRWEWKRLKAKTPKNGPPPCPRLGHSFSLVGNKCYLFGGLANDSEDPKNNIPRYLNDLYILELRPGSGVVAWDIPITYGVLPPPRESHTAVVYTEKDNKKSKLVIYGGMSGCRLGDLWTLDIDTLTWNKPSLSGVAPLPRSLHSATTIGNKMYVFGGWVPLVMDDVKVATHEKEWKCTNTLACLNLDTMAWETILMDTLEDNIPRARAGHCAVAINTRLYIWSGRDGYRKAWNNQVCCKDLWYLETEKPPPPARVQLVRANTNSLEVSWGAVATADSYLLQLQKYDIPATAATATSPTPNPVPSVPANPPKSPAPAAAAPAVQPLTQVGITLLPQAAPAPPTTTTIQVLPTVPGSSISVPTAARTQGVPAVLKVTGPQATTGTPLVTMRPASQAGKAPVTVTSLPAGVRMVVPTQSAQGTVIGSSPQMSGMAALAAAAAATQKIPPSSAPTVLSVPAGTTIVKTMAVTPGTTTLPATVKVASSPVMVSNPATRMLKTAAAQVGTSVSSATNTSTRPIITVHKSGTVTVAQQAQVVTTVVGGVTKTITLVKSPISVPGGSALISNLGKVMSVVQTKPVQTSAVTGQASTGPVTQIIQTKGPLPAGTILKLVTSADGKPTTIITTTQASGAGTKPTILGISSVSPSTTKPGTTTIIKTIPMSAIITQAGATGVTSSPGIKSPITIITTKVMTSGTGAPAKIITAVPKIATGHGQQGVTQVVLKGAPGQPGTILRTVPMGGVRLVTPVTVSAVKPAVTTLVVKGTTGVTTLGTVTGTVSTSLAGAGGHSTSASLATPITTLGTIATLSSQVINPTAITVSAAQTTLTAAGGLTTPTITMQPVSQPTQVTLITAPSGVEAQPVHDLPVSILASPTTEQPTATVTIADSGQGDVQPGTVTLVCSNPPCETHETGTTNTATTTVVANLGGHPQPTQVQFVCDRQEAAASLVTSTVGQQNGSVVRVCSNPPCETHETGTTNTATTATSNMAGQHGCSNPPCETHETGTTNTATTAMSSVGANHQRDARRACAAGTPAVIRISVATGALEAAQGSKSQCQTRQTSATSTTMTVMATGAPCSAGPLLGPSMAREPGGRSPAFVQLAPLSSKVRLSSPSIKDLPAGRHSHAVSTAAMTRSSVGAGEPRMAPVCESLQGGSPSTTVTVTALEALLCPSATVTQVCSNPPCETHETGTTNTATTSNAGSAQRVCSNPPCETHETGTTHTATTATSNGGTGQPEGGQQPPAGRPCETHQTTSTGTTMSVSVGALLPDATSSHRTVESGLEVAAAPSVTPQAGTALLAPFPTQRVCSNPPCETHETGTTHTATTVTSNMSSNQDPPPAASDQGEVESTQGDSVNITSSSAITTTVSSTLTRAVTTVTQSTPVPGPSVPKISSMTETAPRALTTEVPIPAKITVTIANTETSDMPFSAVDILQPPEELQVSPGPRQQLPPRQLLQSASTALMGESAEVLSASQTPELPAAVDLSSTGEPSSGQESAGSAVVATVVVQPPPPTQSEVDQLSLPQELMAEAQAGTTTLMVTGLTPEELAVTAAAEAAAQAAATEEAQALAIQAVLQAAQQAVMAGTGEPMDTSEAAATVTQAELGHLSAEGQEGQATTIPIVLTQQELAALVQQQQLQEAQAQQQHHHLPTEALAPADSLNDPAIESNCLNELAGTVPSTVALLPSTATESLAPSNTFVAPQPVVVASPAKLQAAATLTEVANGIESLGVKPDLPPPPSKAPMKKENQWFDVGVIKGTNVMVTHYFLPPDDAVPSDDDLGTVPDYNQLKKQELQPGTAYKFRVAGINACGRGPFSEISAFKTCLPGFPGAPCAIKISKSPDGAHLTWEPPSVTSGKIIEYSVYLAIQSSQAGGELKSSTPAQLAFMRVYCGPSPSCLVQSSSLSNAHIDYTTKPAIIFRIAARNEKGYGPATQVRWLQETSKDSSGTKPANKRPMSSPEMKSAPKKSKADGQ

SEQ ID NO: 49410 - protein, 792 aa, Homo sapiens
MAAPSLLNWRRVSSFTGPVPRARHGHRAVAIRELMIIFGGGNEGIADELHVYNTATNQWFLPAVRGDIPPGCAAHGFVCDGTRILVFGGMVEYGRYSNELYELQASRWLWKKVKPHPPPSGLPPCPRLGHSFSLYGNKCYLFGGLANESEDSNNNVPRYLNDFYELELQHGSGVVGWSIPVTKGVVPSPRESHTAVIYCKKDSGSPKMYVFGGMCGARLDDLWQLDLETMSWSKPETKGTVPLPRSLHTASVIGNKMYIFGGWVPHKGENTETSPHDCEWRCTSSFSYLNLDTTEWTTLVSDSQEDKKNSRPRPRAGHCAVAIGTRLYFWSGRDGYKKALNSQVCCKDLWYLDTEKPPAPSQVQLIKATTNSFHVKWDEVSTVEGYLLQLSTDLPYQAASSDSSAAPNMQGVRMDPHRQGSNNIVPNSINDTINSTKTEQPATKETSMKNKPDFKALTDSNAILYPSLASNASNHNSHVVDMLRKNEGPHTSANVGVLSSCLDVRTVIPETSVSSTVSSTQTMVTQQTIKTESSSTNGAVVKDETSLTTFSTKSEVDETYALPATKISRVETHATATPFSKETPSNPVATVKAGERQWCDVGIFKNNTALVSQFYLLPKGKQSISKVGNADVPDYSLLKKQDLVPGTGYRFRVAAINGCGIGPFSKISEFKTCIPGFPGAPSAVRISKNVEGIHLSWEPPTSPSGNILEYSAYLAIRTAQIQDNPSQLVFMRIYCGLKTSCIVTAGQLANAHIDYTSRPAIVFRISAKNEKGYGPATQVRWLQGNNKKAPLN

SEQ ID NO: 49411 - protein, 168 aa, Homo sapiens
MAFNDCFSLNYPGNPCPGDLIEVFRPGYQHWALYLGDGYVINIAPVDGIPASFTSAKSVFSSKALVKMQLLKDVVGNDTYRINNKYDETYPPLPVEEIIKRSEFVIGQEVAYNLLVNNCEHFVTLLRYGEGVSEQANRAISTVEFVTAAVGVFSFLGLFPKGQRAKYY

SEQ ID NO: 49412 - protein, 162 aa, Homo sapiens
MALARPRPRLGDLIEISRFGYAHWAIYVGDGYVVHLAPASEIAGAGAASVLSALTNKAIVKKELLSVVAGGDNYRVNNKHDDRYTPLPSNKIVKRAEELVGQELPYSLTSDNCEHFVNHLRYGVSRSDQVTGAVTTVGVAAGLLAAASLVGILLARSKRERQ

SEQ ID NO: 49413 - protein, 235 aa, Homo sapiens
MWRGRAGALLRVWGFWPTGVPRRRPLSCDAASQAGSNYPRCWNCGGPWGPGREDRFFCPQCRALQAPDPTRDYFSLMDCNRSFRVDTAKLQHRYQQLQRLVHPDFFSQRSQTEKDFSEKHSTLVNDAYKTLLAPLSRGLYLLKLHGIEIPERTDYEMDRQFLIEIMEINEKLAEAESEAAMKEIESIVKAKQKEFTDNVSSAFEQDDFEEAKEILTKMRYFSNIEEKIKLKKIPL

SEQ ID NO: 49414 - protein, 359 aa, Homo sapiens
MSDEGSRGSRLPLALPPASQGCSSGGGGGGSSAGGSGNSRPPRNLQGLLQMAITAGSEEPDPPPEPMSEERRQWLQEAMSAAFRGQREEVEQMKSCLRVLSQPMPPTAGEAEQAADQQEREGALELLADLCENMDNAADFCQLSGMHLLVGRYLEAGAAGLRWRAAQLIGTCSQNVAAIQEQVLGLGALRKLLRLLDRDACDTVRVKALFAISCLVREQEAGLLQFLRLDGFSVLMRAMQQQVQKLKVKSAFLLQNLLVGHPEHKGTLCSMGMVQQLVALVRTEHSPFHEHVLGALCSLVTDFPQGVRECREPELGLEELLRHRCQLLQQHEEYQEELEFCEKLLQTCFSSPADDSMDR

SEQ ID NO: 49415 - protein, 257 aa, Homo sapiens
MSDEGSRGSRLPLALPPASQGCSSGGGGGGSSAGGSGNSRPPRNLQGLLQMAITAGSEEPDPPPEPMSEERRQWLQEAMSAAFRGQREEVEQMKSCLRVLSQPMPPTAGEAEQAADQQEREGALELLADLCENMDNAADFCQLSGMHLLVGRYLEAGAAGLRWRAAQLIGTCSQNVAAIQEQVLGLGALRKLLRLLDRDACDTGVRECREPELGLEELLRHRCQLLQQHEEYQEELEFCEKLLQTCFSSPADDSMDR

SEQ ID NO: 49416 - protein, 359 aa, Homo sapiens; identical to SEQ ID NO: 49414

SEQ ID NO: 49417 - protein, 480 aa, Homo sapiens
MQIPRAALLPLLLLLLAAPASAQLSRAGRSAPLAAGCPDRCEPARCPPQPEHCEGGRARDACGCCEVCGAPEGAACGLQEGPCGEGLQCVVPFGVPASATVRRRAQAGLCVCASSEPVCGSDANTYANLCQLRAASRRSERLHRPPVIVLQRGACGQGQEDPNSLRHKYNFIADVVEKIAPAVVHIELFRKLPFSKREVPVASGSGFIVSEDGLIVTNAHVVTNKHRVKVELKNGATYEAKIKDVDEKADIALIKIDHQGKLPVLLLGRSSELRPGEFVVAIGSPFSLQNTVTTGIVSTTQRGGKELGLRNSDMDYIQTDAIINYGNSGGPLVNLDGEVIGINTLKVTAGISFAIPSDKIKKFLTESHDRQAKGKAITKKKYIGIRMMSLTSSKAKELKDRHRDFPDVISGAYIIEVIPDTPAEAGGLKENDVIISINGQSVVSANDVSDVIKRESTLNMVVRRGNEDIMITVIPEEIDP

SEQ ID NO: 49418 - protein, 221 aa, Homo sapiens
GKLPVLLLGRSSELRPGEFVVAIGSPFSLQNTVTTGIVSTTQRGGKELGLRNSDMDYIQTDAIINYGNSGGPLVNLDGEVIGINTLKVTAGISFAIPSDKIKKFLTESHDRQAKGKAITKKKYIGIRMMSLTSSKAKELKDRHRDFPDVISGAYIIEVIPDTPAEAGGLKENDVIISINGQSVVSANDVSDVIKRESTLNMVVRRGNEDIMITVIPEEIDP

SEQ ID NO: 49419 - protein, 447 aa, Homo sapiens
MGWAARPRALAPAAPEALLHSPRRRSPALALSAATAAAARGPGRVRLLRGVRRARGRRVRPAGGPVRRGAAVRGALRGASLGHGAAARAGRPLCVRQQLRAASRRSERLHRPPVIVLQRGACGQGQEDPNSLRHKYNFIADVVEKIAPAVVHIELFRKLPFSKREVPVASGSGFIVSEDGLIVTNAHVVTNKHRVKVELKNGATYEAKIKDVDEKADIALIKIDHQGKLPVLLLGRSSELRPGEFVVAIGSPFSLQNTVTTGIVSTTQRGGKELGLRNSDMDYIQTDAIINYGNSGGPLVNLDGEVIGINTLKVTAGISFAIPSDKIKKFLTESHDRQAKGKAITKKKYIGIRMMSLTSSKAKELKDRHRDFPDVISGAYIIEVIPDTPAEAGGLKENDVIISINGQSVVSANDVSDVIKRESTLNMVVRRGNEDIMITVIPEEIDP

SEQ ID NO: 49420 - protein, 458 aa, Homo sapiens
MAAPRAGRGAGWSLRAWRALGGIRWGRRPRLTPDLRALLTSGTSDPRARVTYGTPSLWARLSVGVTEPRACLTSGTPGPRAQLTAVTPDTRTREASENSGTRSRAWLAVALGAGGAVLLLLWGGGRGPPAVLAAVPSPPPASPRSQYNFIADVVEKTAPAVVYIEILDRHPFLGREVPISNGSGFVVAADGLIVTNAHVVADRRRVRVRLLSGDTYEAVVTAVDPVADIATLRIQTKEPLPTLPLGRSADVRQGEFVVAMGSPFALQNTITSGIVSSAQRPARDLGLPQTNVEYIQTDAAIDFGNSGGPLVNLDGEVIGVNTMKVTAGISFAIPSDRLREFLHRGEKKNSSSGISGSQRRYIGVMMLTLSPSILAELQLREPSFPDVQHGVLIHKVILGSPAHRAGLRPGDVILAIGEQMVQNAEDVYEAVRTQSQLAVQIRRGRETLTLYVTPEVTE

SEQ ID NO: 49421 - protein, 361 aa, Homo sapiens
MAAPRAGRGAGWSLRAWRALGGIRWGRRPRLTPDLRALLTSGTSDPRARVTYGTPSLWARLSVGVTEPRACLTSGTPGPRAQLTAVTPDTRTREASENSGTRSRAWLAVALGAGGAVLLLLWGGGRGPPAVLAAVPSPPPASPRSQYNFIADVVEKTAPAVVYIEILDRHPFLGREVPISNGSGFVVAADGLIVTNAHVVADRRRVRVRLLSGDTYEAVVTAVDPVADIATLRIQTKFGNSGGPLVNLDGEVIGVNTMKVTAGISFAIPSDRLREFLHRGEKKNSSSGISGSQRRYIGVMMLTLSPRAGLRPGDVILAIGEQMVQNAEDVYEAVRTQSQLAVQIRRGRETLTLYVTPEVTE

SEQ ID NO: 49422 - protein, 453 aa, Homo sapiens
MQARALLLAALAALALAREPPAAPCPARCDVSRCPSPRCPGGYVPDLCNCCLVCAASEGEPCGGPLDSPCGESLECVRGLCRCRWSHAVCGTDGHTYANVCALQAASRRALQLSGTPVRQLQKGACPLGLHQLSSPRYKFNFIADVVEKIAPAVVHIELFLRHPLFGRNVPLSSGSGFIMSEAGLIITNAHVVSSNSAAPGRQQLKVQLQNGDSYEATIKDIDKKSDIATIKIHPKKKLPVLLLGHSADLRPGEFVVAIGSPFALQNTVTTGIVSTAQREGRELGLRDSDMDYIQTDAIINYGNSGGPLVNLDGEVIGINTLKVTAGISFAIPSDRITRFLTEFQDKQIKDWKKRFIGIRMRTITPSLVDELKASNPDFPEVSSGIYVQEVAPNSPSQRGGIQDGDIIVKVNGRPLVDSSELQEAVLTESPLLLEVRRGNDDLLFSIAPEVVM

SEQ ID NO: 49423 - protein, 476 aa, Homo sapiens
MIRPQLRTAGLGRCLLPGLLLLLVPVLWAGAEKLHTQPSCPAVCQPTRCPALPTCALGTTPVFDLCRCCRVCPAAEREVCGGAQGQPCAPGLQCLQPLRPGFPSTCGCPTLGGAVCGSDRRTYPSMCALRAENRAARRLGKVPAVPVQWGNCGDTGTRSAGPLRRNYNFIAAVVEKVAPSVVHVQLWGRLLHGSRLVPVYSGSGFIVSEDGLIITNAHVVRNQQWIEVVLQNGARYEAVVKDIDLKLDLAVIKIESNAELPVLMLGRSSDLRAGEFVVALGSPFSLQNTATAGIVSTKQRGGKELGMKDSDMDYVQIDATINYGNSGGPLVNLDGDVIGVNSLRVTDGISFAIPSDRVRQFLAEYHEHQMKGKAFSNKKYLGLQMLSLTVPLSEELKMHYPDFPDVSSGVYVCKVVEGTAAQSSGLRDHDVIVNINGKPITTTTDVVKALDSDSLSMAVLRGKDNLLLTVIPETIN

SEQ ID NO: 49424 - protein, 2718 aa, Homo sapiens
MPRTKQIHPRNLRDKIEEAQKELNGAEVSKKEILQAGVKGTSESLKGVKRKKIVAENHLKKIPKSPLRNPLQAKHKQNTEESSFAVLHSASESHKKQNYIPVKNGKQFTKQNGETPGIIAEASKSEESVSPKKPLFLQQPSELRRWRSEGADPAKFSDLDEQCDSSSLSSKTRTDNSECISSHCGTTSPSYTNTAFDVLLKAMEPELSTLSQKGSPCAIKTEKLRPNKTARSPPKLKNSSMDAPNQTSQELVAESQSSCTSYTVHMSAAQKNEQGAMQSASHLYHQHEHFVPKSNQHNQQLPGCSGFTGSLTNLQNQENAKLEQVYNIAVTSSVGLTSPSSRSQVTPQNQQMDSASPLSISPANSTQSPPMPIYNSTHVASVVNQSVEQMCNLLLKDQKPKKQGKYICEYCNRACAKPSVLLKHIRSHTGERPYPCVTCGFSFKTKSNLYKHKKSHAHTIKLGLVLQPDAGGLFLSHESPKALSIHSDVEDSGESEEEGATDERQHDLGAMELQPVHIIKRMSNAETLLKSSFTPSSPENVIGDFLLQDRSAESQAVTELPKVVVHHVTVSPLRTDSPKAMDPKPELSSAQKQKDLQVTNVQPLSANMSQGGVSRLETNENSHQKGDMNPLEGKQDSHVGTVHAQLQRQQATDYSQEQQGKLLSPRSLGSTDSGYFSRSESADQTVSPPTPFARRLPSTEQDSGRSNGPSAALVTTSTPSALPTGEKALLLPGQMRPPLATKTLEERISKLISDNEALVDDKQLDSVKPRRTSLSRRGSIDSPKSYIFKDSFQFDLKPVGRRTSSSSDIPKSPFTPTEKSKQVFLLSVPSLDCLPITRSNSMPTTGYSAVPANIIPPPHPLRGSQSFDDKIGTFYDDVFVSGPNAPVPQSGHPRTLVRQAAIEDSSANESHVLGTGQSLDESHQGCHAAGEAMSVRSKALAQGPHIEKKKSHQGRGTMFECETCRNRYRKLENFENHKKFYCSELHGPKTKVAMREPEHSPVPGGLQPQILHYRVAGSSGIWEQTPQIRKRRKMKSVGDDEELQQNESGTSPKSSEGLQFQNALGCNPSLPKHNVTIRSDQQHKNIQLQNSHIHLVARGPEQTMDPKLSTIMEQQISSAAQDKIELQRHGTGISVIQHTNSLSRPNSFDKPEPFERASPVSFQELNRTGKSGSLKVIGISQEESHPSRDGSHPHQLALSDALRGELQESSRKSPSERHVLGQPSRLVRQHNIQVPEILVTEEPDRDLEAQCHDQEKSEKFSWPQRSETLSKLPTEKLPPKKKRLRLAEIEHSSTESSFDSTLSRSLSRESSLSHTSSFSASLDIEDVSKTEASPKIDFLNKAEFLMIPAGLNTLNVPGCHREMRRTASEQINCTQTSMEVSDLRSKSFDCGSITPPQTTPLTELQPPSSPSRVGVTGHVPLLERRRGPLVRQISLNIAPDSHLSPVHPTSFQNTALPSVNAVPYQGPQLTSTSLAEFSANTLHSQTQVKDLQAETSNSSSTNVFPVQQLCDINLLNQIHAPPSHQSTQLSLQVSTQGSKPDKNSVLSGSSKSEDCFAPKYQLHCQVFTSGPSCSSNPVHSLPNQVISDPVGTDHCVTSATLPTKLIDSMSNSHPLLPPELRPLGSQVQKVPSSFMLPIRLQSSVPAYCFATLTSLPQILVTQDLPNQPICQTNHSVVPISEEQNSVPTLQKGHQNALPNPEKEFLCENVFSEMSQNSSLSESLPITQKISVGRLSPQQESSASSKRMLSPANSLDIAMEKHQKRAKDENGAVCATDVRPLEALSSRVNEASKQKKPILVRQVCTTEPLDGVMLEKDVFSQPEISNEAVNLTNVLPADNSSTGCSKFVVIEPISELQEFENIKSSTSLTLTVRSSPAPSENTHISPLKCTDNNQERKSPGVKNQGDKVNIQEQSQQPVTSLSLFNIKDTQQLAFPSLKTTTNFTWCYLLRQKSLHLPQKDQKTSAYTDWTVSASNPNPLGLPTKVALALLNSKQNTGKSLYCQAITTHSKSDLLVYSSKWKSSLSKRALGNQKSTVVEFSNKDASEINSEQDKENSLIKSEPRRIKIFDGGYKSNEEYVYVRGRGRGKYICEECGIRCKKPSMLKKHIRTHTDVRPYHCTYCNFSFKTKGNLTKHMKSKAHSKKCVDLGVSVGLIDEQDTEESDEKQRFSYERSGYDLEESDGPDEDDNENEDDDEDSQAESVLSATPSVTASPQHLPSRSSLQDPVSTDEDVRITDCFSGVHTDPMDVLPRALLTRMTVLSTAQSDYNRKTLSPGKARQRAARDENDTIPSVDTSRSPCHQMSVDYPESEEILRSSMAGKAVAITQSPSSVRLPPAAAEHSPQTAAGMPSVASPHPDPQEQKQQITLQPTPGLPSPHTHLFSHLPLHSQQQSRTPYNMVPVGGIHVVPAGLTYSTFVPLQAGPVQLTIPAVSVVHRTLGTHRNTVTEVSGTTNPAGVAELSSVVPCIPIGQIRVPGLQNLSTPGLQSLPSLSMETVNIVGLANTNMAPQVHPPGLALNAVGLQVLTANPSSQSSPAPQAHIPGLQILNIALPTLIPSVSQVAVDAQGAPEMPASQSKACETQPKQTSVASANQVSRTESPQGLPTVQRENAKKVLNPPAPAGDHARLDGLSKMDTEKAASANHVKPKPELTSIQGQPASTSQPLLKAHSEVFTKPSGQQTLSPDRQVPRPTALPRRQPTVHFSDVSSDDDEDRLVIAT

SEQ ID NO: 49425 - protein, 128 aa, Homo sapiens
MPRTKQIHPRNLRDKIEEAQKELNGAEVSKKEILQAGVKGTSESLKGVKRKKIVAENHLKKIPKSPLRNPLQAKHKQNTEESSFAVLHSASESHKKQNYIPVKNGKQFTKQNGETPGIIAEASKSEES

SEQ ID NO: 49426 - protein, 142 aa, Homo sapiens
MPRTKQIHPRNLRDKIEEAQKELNGAEVSKKEILQAGVKGTSESLKGVKRKKIVAENHLKKIPKSPLRNPLQAKHKQNTEESSFAVLHSASESHKKQNYIPVKNGKQFTKQNGETPGIIAEASKSEESVSPKKPLFLQQPSE

SEQ ID NO: 49427 - protein, 120 aa, Homo sapiens
MPRTKQIHPRNLRDKIEEAQKELNGAEVSKKEILQAGVKGTSESLKGVKRKKIVAENHLKKIPKSPLRNPLQAKHKQNTEESSFAVLHSASESHKKQNYIPVKNGKQFTKQNGETPGIIA

SEQ ID NO: 49428 - protein, 583 aa, Homo sapiens
MLKKHIRTHTDVRPYHCTYCNFSFKTKDEKQRFSYERSGYDLEESDGPDEDDNENEDDDEDSQAESVLSATPSVTASPQHLPSRSSLQDPVSTDEDVRITDCFSGVHTDPMDVLPRALLTRMTVLSTAQSDYNRKTLSPGKARQRAARDENDTIPSVDTSRSPCHQMSVDYPESEEILRSSMAGKAVAITQSPSSVRLPPAAAEHSPQTAAGMPSVASPHPDPQEQKQQITLQPTPGLPSPHTHLFSHLPLHSQQQSRTPYNMVPVGGIHVVPAGLTYSTFVPLQAGPVQLTIPAVSVVHRTLGTHRNTVTEVSGTTNPAGVAELSSVVPCIPIGQIRVPGLQNLSTPGLQSLPSLSMETVNIVGLANTNMAPQVHPPGLALNAVGLQVLTANPSSQSSPAPQAHIPGLQILNIALPTLIPSVSQVAVDAQGAPEMPASQSKACETQPKQTSVASANQVSRTESPQGLPTVQRENAKKVLNPPAPAGDHARLDGLSKMDTEKAASANHVKPKPELTSIQGQPASTSQPLLKAHSEVFTKPSGQQTLSPDRQVPRPTALPRRQPTVHFSDVSSDDDEDRLVIAT

SEQ ID NO: 49429 - protein, 700 aa, Homo sapiens
GDKFSFQRALGNQKSTVVEFSNKDASEINSEQDKENSLIKSEPRRIKIFDGGYKSNEEYVYVRGRGRGKYICEECGIRCKKPSMLKKHIRTHTDVRPYHCTYCNFSFKTKGNLTKHMKSKAHSKKCVDLGVSVGLIDEQDTEESDEKQRFSYERSGYDLEESDGPDEDDNENEDDDEDSQAESVLSATPSVTASPQHLPSRSSLQDPVSTDEDVRITDCFSGVHTDPMDVLPRALLTRMTVLSTAQSDYNRKTLSPGKARQRAARDENDTIPSVDTSRSPCHQMSVDYPESEEILRSSMAGKAVAITQSPSSVRLPPAAAEHSPQTAAGMPSVASPHPDPQEQKQQITLQPTPGLPSPHTHLFSHLPLHSQQQSRTPYNMVPVGGIHVVPAGLTYSTFVPLQAGPVQLTIPAVSVVHRTLGTHRNTVTEVSGTTNPAGVAELSSVVPCIPIGQIRVPGLQNLSTPGLQSLPSLSMETVNIVGLANTNMAPQVHPPGLALNAVGLQVLTANPSSQSSPAPQAHIPGLQILNIALPTLIPSVSQVAVDAQGAPEMPASQSKACETQPKQTSVASANQVSRTESPQGLPTVQRENAKKVLNPPAPAGDHARLDGLSKMDTEKAASANHVKPKPELTSIQGQPASTSQPLLKAHSEVFTKPSGQQTLSPDRQVPRPTALPRRQPTVHFSDVSSDDDEDRLVIAT

SEQ ID NO: 49430 - protein, 2446 aa, Homo sapiens
MDTGDTALGQKATSRSGETDKASGRWRQEQSAVIKMSTFGSHEGQRQPQIEPEQIGNTASAQLFGSGKLASPSEVVQQVAEKQYPPHRPSPYSCQHSLSFPQHSLPQGVMHSTKPHQSLEGPPWLFPGPLPSVASEDLFPFPIHGHSGGYPRKKISSLNPAYSQYSQKSIEQAEEAHKKEHKPKKPGKYICPYCSRACAKPSVLKKHIRSHTGERPYPCIPCGFSFKTKSNLYKHRKSHAHAIKAGLVPFTESAVSKLDLEAGFIDVEAEIHSDGEQSTDTDEESSLFAEASDKMSPGPPIPLDIASRGGYHGSLEESLGGPMKVPILIIPKSGIPLPNESSQYIGPDMLPNPSLNTKADDSHTVKQKLALRLSEKKGQDSEPSLNLLSPHSKGSTDSGYFSRSESAEQQISPPNTNAKSYEEIIFGKYCRLSPRNALSVTTTSQERAAMGRKGIMEPLPHVNTRLDVKMFEDPVSQLIPSKGDVDPSQTSMLKSTKFNSESRQPQIIPSSIRNEGKLYPANFQGSNPVLLEAPVDSSPLIRSNSVPTSSATNLTIPPSLRGSHSFDERMTGSDDVFYPGTVGIPPQRMLRRQAAFELPSVQEGHVEVEHHGRMLKGISSSSLKEKKLSPGDRVGYDYDVCRKPYKKWEDSETPKQNYRDISCLSSLKHGGEYFMDPVVPLQGVPSMFGTTCENRKRRKEKSVGDEEDTPMICSSIVSTPVGIMASDYDPKLQMQEGVRSGFAMAGHENLSHGHTERFDPCRPQLQPGSPSLVSEESPSAIDSDKMSDLGGRKPPGNVISVIQHTNSLSRPNSFERSESAELVACTQDKAPSPSETCDSEISEAPVSPEWAPPGDGAESGGKPSPSQQVQQQSYHTQPRLVRQHNIQVPEIRVTEEPDKPEKEKEAQSKEPEKPVEEFQWPQRSETLSQLPAEKLPPKKKRLRLADMEHSSGESSFESTGTGLSRSPSQESNLSHSSSFSMSFEREETSKLSALPKQDEFGKHSEFLTVPAGSYSLSVPGHHHQKEMRRCSSEQMPCPHPAEVPEVRSKSFDYGNLSHAPVSGAAASTVSPSRERKKCFLVRQASFSGSPEISQGEVGMDQSVKQEQLEHLHAGLRSGWHHGPPAVLPPLQQEDPGKQVAGPCPPLSSGPLHLAQPQIMHMDSQESLRNPLIQPTSYMTSKHLPEQPHLFPHQETIPFSPIQNALFQFQYPTVCMVHLPAQQPPWWQAHFPHPFAQHPQKSYGKPSFQTEIHSSYPLEHVAEHTGKKPAEYAHTKEQTYPCYSGASGLHPKNLLPKFPSDQSSKSTETPSEQVLQEDFASANAGSLQSLPGTVVPVRIQTHVPSYGSVMYTSISQILGQNSPAIVICKVDENMTQRTLVTNAAMQGIGFNIAQVLGQHAGLEKYPIWKAPQTLPLGLESSIPLCLPSTSDSVATLGGSKRMLSPASSLELFMETKQQKRVKEEKMYGQIVEELSAVELTNSDIKKDLSRPQKPQLVRQGCASEPKDGLQSGSSSFSSLSPSSSQDYPSVSPSSREPFLPSKEMLSGSRAPLPGQKSSGPSESKESSDELDIDETASDMSMSPQSSSLPAGDGQLEEEGKGHKRPVGMLVRMASAPSGNVADSTLLLTDMADFQQILQFPSLRTTTTVSWCFLNYTKPNYVQQATFKSSVYASWCISSCNPNPSGLNTKTTLALLRSKQKITAEIYTLAAMHRPGTGKLTSSSAWKQFTQMKPDASFLFGSKLERKLVGNILKERGKGDIHGDKDIGSKQTEPIRIKIFEGGYKSNEDYVYVRGRGRGKYICEECGIRCKKPSMLKKHIRTHTDVRPYVCKLCNFAFKTKGNLTKHMKSKAHMKKCLELGVSMTSVDDTETEEAENLEDLHKAAEKHSMSSISTDHQFSDAEESDGEDGDDNDDDDEDEDDFDDQGDLTPKTRSRSTSPQPPRFSSLPVNVGAVPHGVPSDSSLGHSSLISYLVTLPSIRVTQLMTPSDSCEDTQMTEYQRLFQSKSTDSEPDKDRLDIPSCMDEECMLPSEPSSSPRDFSPSSHHSSPGYDSSPCRDNSPKRYLIPKGDLSPRRHLSPRRDLSPMRHLSPRKEAALRREMSQRDVSPRRHLSPRRPVSPGKDITARRDLSPRRERRYMTTIRAPSPRRALYHNPPLSMGQYLQAEPIVLGPPNLRRGLPQVPYFSLYGDQEGAYEHPGSSLFPEGPNDYVFSHLPLHSQQQVRAPIPMVPVGGIQMVHSMPPALSSLHPSPTLPLPMEGFEEKKGASGESFSKDPYVLSKQHEKRGPHALQSSGPPSTPSSPRLLMKQSTSEDSLNATEREQEENIQTCTKAIASLRIATEEAALLGPDQPARVQEPHQNPLGSAHVSIRHFSRPEPGQPCTSATHPDLHDGEKDNFGTSQTPLAHSTFYSKSCVDDKQLDFHSSKELSSSTEESKDPSSEKSQLH

SEQ ID NO: 49431 - protein, 2446 aa, Homo sapiens; identical to SEQ ID NO: 49430

SEQ ID NO: 49432 - protein, 2446 aa, Homo sapiens; identical to SEQ ID NO: 49430

SEQ ID NO: 49433 - protein, 2406 aa, Homo sapiens
MDPEQSVKGTKKAEGSPRKRLTKGEAIQTSVSSSVPYPGSGTAATQESPAQELLAPQPFPGPSSVLREGSQEKTGQQQKPPKRPPIEASVHISQLPQHPLTPAFMSPGKPEHLLEGSTWQLVDPMRPGPSGSFVAPGLHPQSQLLPSHASIIPPEDLPGVPKVFVPRPSQVSLKPTEEAHKKERKPQKPGKYICQYCSRPCAKPSVLQKHIRSHTGERPYPCGPCGFSFKTKSNLYKHRKSHAHRIKAGLASGMGGEMYPHGLEMERIPGEEFEEPTEGESTDSEEETSATSGHPAELSPRPKQPLLSSGLYSSGSHSSSHERCSLSQSSTAQSLEDPPPFVEPSSEHPLSHKPEDTHTIKQKLALRLSERKKVIDEQAFLSPGSKGSTESGYFSRSESAEQQVSPPNTNAKSYAEIIFGKCGRIGQRTAMLTATSTQPLLPLSTEDKPSLVPLSVPRTQVIEHITKLITINEAVVDTSEIDSVKPRRSSLSRRSSMESPKSSLYREPLSSHSEKTKPEQSLLSLQHPPSTAPPVPLLRSHSMPSAACTISTPHHPFRGSYSFDDHITDSEALSHSSHVFTSHPRMLKRQPAIELPLGGEYSSEEPGPSSKDTASKPSDEVEPKESELTKKTKKGLKTKGVIYECNICGARYKKRDNYEAHKKYYCSELQIAKPISAGTHTSPEAEKSQIEHEPWSQMMHYKLGTTLELTPLRKRRKEKSLGDEEEPPAFESTKSQFGSPGPSDAARNLPLESTKSPAEPSKSVPSLEGPTGFQPRTPKPGSGSESGKERRTTSKEISVIQHTSSFEKSDSLEQPSGLEGEDKPLAQFPSPPPAPHGRSAHSLQPKLVRQPNIQVPEILVTEEPDRPDTEPEPPPKEPEKTEEFQWPQRSQTLAQLPAEKLPPKKKRLRLAEMAQSSGESSFESSVPLSRSPSQESNVSLSGSSRSASFERDDHGKAEAPSPSSDMRPKPLGTHMLTVPSHHPHAREMRRSASEQSPNVSHSAHMTETRSKSFDYGSLSLTGPSAPAPVAPPARVAPPERRKCFLVRQASLSRPPESELEVAPKGRQESEEPQPSSSKPSAKSSLSQISSAATSHGGPPGGKGPGQDRPPLGPTVPYTEALQVFHHPVAQTPLHEKPYLPPPVSLFSFQHLVQHEPGQSPEFFSTQAMSSLLSSPYSMPPLPPSLFQAPPLPLQPTVLHPGQLHLPQLMPHPANIPFRQPPSFLPMPYPTSSALSSGFFLPLQSQFALQLPGDVESHLPQIKTSLAPLATGSAGLSPSTEYSSDIRLPPVAPPASSSAPTSAPPLALPACPDTMVSLVVPVRVQTNMPSYGSAMYTTLSQILVTQSQGSSATVALPKFEEPPSKGTTVCGADVHEVGPGPSGLSEEQSRAFPTPYLRVPVTLPERKGTSLSSESILSLEGSSSTAGGSKRVLSPAGSLELTMETQQQKRVKEEEASKADEKLELVKPCSVVLTSTEDGKRPEKSHLGNQGQGRRELEMLSSLSSDPSDTKEIPPLPHPALSHGTAPGSEALKEYPQPSGKPHRRGLTPLSVKKEDSKEQPDLPSLAPPSSLPLSETSSRPAKSQEGTDSKKVLQFPSLHTTTNVSWCYLNYIKPNHIQHADRRSSVYAGWCISLYNPNLPGVSTKAALSLLRSKQKVSKETYTMATAPHPEAGRLVPSSSRKPRMTEVHLPSLVSPEGQKDLARVEKEEERRGEPEEDAPASQRGEPARIKIFEGGYKSNEEYVYVRGRGRGKYVCEECGIRCKKPSMLKKHIRTHTDVRPYVCKHCHFAFKTKGNLTKHMKSKAHSKKCQETGVLEELEAEEGTSDDLFQDSEGREGSEAVEEHQFSDLEDSDSDSDLDEDEDEDEEESQDELSRPSSEAPPPGPPHALRADSSPILGPQPPDAPASGTEATRGSSVSEAERLTASSCSMSSQSMPGLPWLGPAPLGSVEKDTGSALSYKPVSPRRPWSPSKEAGSRPPLARKHSLTKNDSSPQRCSPAREPQASAPSPPGLHVDPGRGMGALPCGSPRLQLSPLTLCPLGRELAPRAHVLSKLEGTTDPGLPRYSPTRRWSPGQAESPPRSAPPGKWALAGPGSPSAGEHGPGLGLDPRVLFPPAPLPHKLLSRSPETCASPWQKAESRSPSCSPGPAHPLSSRPFSALHDFHGHILARTEENIFSHLPLHSQHLTRAPCPLIPIGGIQMVQARPGAHPTLLPGPTAAWVSGFSGGGSDLTGAREAQERGRWSPTESSSASVSPVAKVSKFTLSSELEGGDYPKERERTGGGPGRPPDWTPHGTGAPAEPTPTHSPCTPPDTLPRPPQGRRAAQSWSPRLESPRAPTNPEPSATPPLDRSSSVGCLAEASARFPARTRNLSGEPRTRQDSPKPSGSGEPRAHPHQPEDRVPPNA

SEQ ID NO: 49434 - protein, 2406 aa, Homo sapiens; identical to SEQ ID NO: 49433

SEQ ID NO: 49435 - protein, 2405 aa, Homo sapiens
MDPEQSVKGTKKAEGSPRKRLTKGEAIQTSVSSSVPYPGSGTAATQESPAQELLAPQPFPGPSSVLREGSQEKTGQQQKPPKRPPIEASVHISQLPQHPLTPAFMSPGKPEHLLEGSTWQLVDPMRPGPSGSFVAPGLHPQSQLLPSHASIIPPEDLPGVPKVFVPRPSQVSLKPTEEAHKKERKPQKPGKYICQYCSRPCAKPSVLQKHIRSHTGERPYPCGPCGFSFKTKSNLYKHRKSHAHRIKAGLASGMGGEMYPHGLEMERIPGEEFEEPTEGESTDSEEETSATSGHPAELSPRPKQPLLSSGLYSSGSHSSSHERCSLSQSSTAQSLEDPPPFVEPSSEHPLSHKPEDTHTIKQKLALRLSERKKVIDEQAFLSPGSKGSTESGYFSRSESAEQQVSPPNTNAKSYAEIIFGKCGRIGQRTAMLTATSTQPLLPLSTEDKPSLVPLSVPRTQVIEHITKLITINEAVVDTSEIDSVKPRRSSLSRRSSMESPKSSLYREPLSSHSEKTKPEQSLLSLQHPPSTAPPVPLLRSHSMPSAACTISTPHHPFRGSYSFDDHITDSEALSHSSHVFTSHPRMLKRQPAIELPLGGEYSSEEPGPSSKDTASKPSDEVEPKESELTKKTKKGLKTKGVIYECNICGARYKKRDNYEAHKKYYCSELQIAKPISAGTHTSPEAEKSQIEHEPWSQMMHYKLGTTLELTPLRKRRKEKSLGDEEEPPAFESTKSQFGSPGPSDAARNLPLESTKSPAEPSKSVPSLEGPTGFQPRTPKPGSGSESGKERRTTSKEISVIQHTSSFEKSDSLEQPSGLEGEDKPLAQFPSPPPAPHGRSAHSLQPKLVRQPNIQVPEILVTEEPDRPDTEPEPPPKEPEKTEEFQWPQRSQTLAQLPAEKLPPKKKRLRLAEMAQSSGESSFESSVPLSRSPSQESNVSLSGSSRSASFERDDHGKAEAPSPSSDMRPKPLGTHMLTVPSHHPHAREMRRSASEQSPNVSHSAHMTETRSKSFDYGSLSLTGPSAPAPVAPPARVAPPERRKCFLVRQASLSRPPESELEVAPKGRQESEEPQPSSSKPSAKSSLSQISSAATSHGGPPGGKGPGQDRPPLGPTVPYTEALQVFHHPVAQTPLHEKPYLPPPVSLFSFQHLVQHEPGQSPEFFSTQAMSSLLSSPYSMPPLPPSLFQAPPLPLQPTVLHPGQLHLPQLMPHPANIPFRQPPSFLPMPYPTSSALSSGFFLPLQSQFALQLPGDVESHLPQIKTSLAPLATGSAGLSPSTEYSSDIRLPPVAPPASSSAPTSAPPLALPACPDTMVSLVVPVRVQTNMPSYGSAMYTTLSQILVTQSQGSSATVALPKFEEPPSKGTTVCGADVHEVGPGPSGLSEEQSRAFPTPYLRVPVTLPERKGTSLSSESILSLEGSSSTAGGSKRVLSPAGSLELTMETQQQKRVKEEEASKADEKLELVKPCSVVLTSTEDGKRPEKSHLGNQGQGRRELEMLSSLSSDPSDTKEIPPLPHPALSHGTAPGSEALKEYPQPSGKPHRRGLTPLSVKKEDSKEQPDLPSLAPPSSLPLSETSSRPAKSQEGTDSKKVLQFPSLHTTTNVSWCYLNYIKPNHIQHADRRSSVYAGWCISLYNPNLPGVSTKAALSLLRSKQKVSKETYTMATAPHPEAGRLVPSSSRKPRMTEVHLPSLVSPEGQKDLARVEKEEERRGEPEEDAPASQRGEPARIKIFEGGYKSNEEYVYVRGRGRGKYVCEECGIRCKKPSMLKKHIRTHTDVRPYVCKHCHFAFKTKGNLTKHMKSKAHSKKCQETGVLEELEAEEGTSDDLFQDSEGREGSEAVEEHQFSDLEDSDSDSDLDEDEDEDEEESQDELSRPSSEAPPPGPPHALRADSSPILGPQPPDAPASGTEATRGSSVSEAERLTASSCSMSSQSMPGLPWLGPAPLGSVEKDTGSALSYKPVSPRRPWSPSKEAGSRPPLARKHSLTKNDSSPQRCSPAREPQASAPSPPGLHVDPGRGMGALPCGSPRLQLSPLTLCPLGRELAPRAHVLSKLEGTTDPGLPRYSPTRRWSPGQAESPPRSAPPGKWALAGPGSPSAGEHGPGLGLDPRVLFPPAPLPHKLLSRSPETCASPWKAESRSPSCSPGPAHPLSSRPFSALHDFHGHILARTEENIFSHLPLHSQHLTRAPCPLIPIGGIQMVQARPGAHPTLLPGPTAAWVSGFSGGGSDLTGAREAQERGRWSPTESSSASVSPVAKVSKFTLSSELEGGDYPKERERTGGGPGRPPDWTPHGTGAPAEPTPTHSPCTPPDTLPRPPQGRRAAQSWSPRLESPRAPTNPEPSATPPLDRSSSVGCLAEASARFPARTRNLSGEPRTRQDSPKPSGSGEPRAHPHQPEDRVPPNA

SEQ ID NO: 49436 - protein, 2405 aa, Homo sapiens; identical to SEQ ID NO: 49435

SEQ ID NO: 49437 - protein, 3142 aa, Homo sapiens
MATLEKLMKAFESLKSFQQQQQQQQQQQQQQQQQQQQQPPPPPPPPPPPQLPQPPPQAQPLLPQPQPPPPPPPPPPGPAVAEEPLHRPKKELSATKKDRVNHCLTICENIVAQSVRNSPEFQKLLGIAMELFLLCSDDAESDVRMVADECLNKVIKALMDSNLPRLQLELYKEIKKNGAPRSLRAALWRFAELAHLVRPQKCRPYLVNLLPCLTRTSKRPEESVQETLAAAVPKIMASFGNFANDNEIKVLLKAFIANLKSSSPTIRRTAAGSAVSICQHSRRTQYFYSWLLNVLLGLLVPVEDEHSTLLILGVLLTLRYLVPLLQQQVKDTSLKGSFGVTRKEMEVSPSAEQLVQVYELTLHHTQHQDHNVVTGALELLQQLFRTPPPELLQTLTAVGGIGQLTAAKEESGGRSRSGSIVELIAGGGSSCSPVLSRKQKGKVLLGEEEALEDDSESRSDVSSSALTASVKDEISGELAASSGVSTPGSAGHDIITEQPRSQHTLQADSVDLASCDLTSSATDGDEEDILSHSSSQVSAVPSDPAMDLNDGTQASSPISDSSQTTTEGPDSAVTPSDSSEIVLDGTDNQYLGLQIGQPQDEDEEATGILPDEASEAFRNSSMALQQAHLLKNMSHCRQPSDSSVDKFVLRDEATEPGDQENKPCRIKGDIGQSTDDDSAPLVHCVRLLSASFLLTGGKNVLVPDRDVRVSVKALALSCVGAAVALHPESFFSKLYKVPLDTTEYPEEQYVSDILNYIDHGDPQVRGATAILCGTLICSILSRSRFHVGDWMGTIRTLTGNTFSLADCIPLLRKTLKDESSVTCKLACTAVRNCVMSLCSSSYSELGLQLIIDVLTLRNSSYWLVRTELLETLAEIDFRLVSFLEAKAENLHRGAHHYTGLLKLQERVLNNVVIHLLGDEDPRVRHVAAASLIRLVPKLFYKCDQGQADPVVAVARDQSSVYLKLLMHETQPPSHFSVSTITRIYRGYNLLPSITDVTMENNLSRVIAAVSHELITSTTRALTFGCCEALCLLSTAFPVCIWSLGWHCGVPPLSASDESRKSCTVGMATMILTLLSSAWFPLDLSAHQDALILAGNLLAASAPKSLRSSWASEEEANPAATKQEEVWPALGDRALVPMVEQLFSHLLKVINICAHVLDDVAPGPAIKAALPSLTNPPSLSPIRRKGKEKEPGEQASVPLSPKKGSEASAASRQSDTSGPVTTSKSSSLGSFYHLPSYLKLHDVLKATHANYKVTLDLQNSTEKFGGFLRSALDVLSQILELATLQDIGKCVEEILGYLKSCFSREPMMATVCVQQLLKTLFGTNLASQFDGLSSNPSKSQGRAQRLGSSSVRPGLYHYCFMAPYTHFTQALADASLRNMVQAEQENDTSGWFDVLQKVSTQLKTNLTSVTKNRADKNAIHNHIRLFEPLVIKALKQYTTTTCVQLQKQVLDLLAQLVQLRVNYCLLDSDQVFIGFVLKQFEYIEVGQFRESEAIIPNIFFFLVLLSYERYHSKQIIGIPKIIQLCDGIMASGRKAVTHAIPALQPIVHDLFVLRGTNKADAGKELETQKEVVVSMLLRLIQYHQVLEMFILVLQQCHKENEDKWKRLSRQIADIILPMLAKQQMHIDSHEALGVLNTLFEILAPSSLRPVDMLLRSMFVTPNTMASVSTVQLWISGILAILRVLISQSTEDIVLSRIQELSFSPYLISCTVINRLRDGDSTSTLEEHSEGKQIKNLPEETFSRFLLQLVGILLEDIVTKQLKVEMSEQQHTFYCQELGTLLMCLIHIFKSGMFRRITAAATRLFRSDGCGGSFYTLDSLNLRARSMITTHPALVLLWCQILLLVNHTDYRWWAEVQQTPKRHSLSSTKLLSPQMSGEEEDSDLAAKLGMCNREIVRRGALILFCDYVCQNLHDSEHLTWLIVNHIQDLISLSHEPPVQDFISAVHRNSAASGLFIQAIQSRCENLSTPTMLKKTLQCLEGIHLSQSGAVLTLYVDRLLCTPFRVLARMVDILACRRVEMLLAANLQSSMAQLPMEELNRIQEYLQSSGLAQRHQRLYSLLDRFRLSTMQDSLSPSPPVSSHPLDGDGHVSLETVSPDKDWYVHLVKSQCWTRSDSALLEGAELVNRIPAEDMNAFMMNSEFNLSLLAPCLSLGMSEISGGQKSALFEAAREVTLARVSGTVQQLPAVHHVFQPELPAEPAAYWSKLNDLFGDAALYQSLPTLARALAQYLVVVSKLPSHLHLPPEKEKDIVKFVVATLEALSWHLIHEQIPLSLDLQAGLDCCCLALQLPGLWSVVSSTEFVTHACSLIYCVHFILEAVAVQPGEQLLSPERRTNTPKAISEEEEEVDPNTQNPKYITAACEMVAEMVESLQSVLALGHKRNSGVPAFLTPLLRNIIISLARLPLVNSYTRVPPLVWKLGWSPKPGGDFGTAFPEIPVEFLQEKEVFKEFIYRINTLGWTSRTQFEETWATLLGVLVTQPLVMEQEESPPEEDTERTQINVLAVQAITSLVLSAMTVPVAGNPAVSCLEQQPRNKPLKALDTRFGRKLSIIRGIVEQEIQAMVSKRENIATHHLYQAWDPVPSLSPATTGALISHEKLLLQINPERELGSMSYKLGQVSIHSVWLGNSITPLREEEWDEEEEEEADAPAPSSPPTSPVNSRKHRAGVDIHSCSQFLLELYSRWILPSSSARRTPAILISEVVRSLLVVSDLFTERNQFELMYVTLTELRRVHPSEDEILAQYLVPATCKAAAVLGMDKAVAEPVSRLLESTLRSSHLPSRVGALHGVLYVLECDLLDDTAKQLIPVISDYLLSNLKGIAHCVNIHSQQHVLVMCATAFYLIENYPLDVGPEFSASIIQMCGVMLSGSEESTPSIIYHCALRGLERLLLSEQLSRLDAESLVKLSVDRVNVHSPHRAMAALGLMLTCMYTGKEKVSPGRTSDPNPAAPDSESVIVAMERVSVLFDRIRKGFPCEARVVARILPQFLDDFFPPQDIMNKVIGEFLSNQQPYPQFMATVVYKVFQTLHSTGQSSMVRDWVMLSLSNFTQRAPVAMATWSLSCFFVSASTSPWVAAILPHVISRMGKLEQVDVNLFCLVATDFYRHQIEEELDRRAFQSVLEVVAAPGSPYHRLLTCLRNVHKVTTC

SEQ ID NO: 49438 - protein, 1037 aa, Homo sapiens
MDRMASSMKQVPNPLPKVLSRRGVGAGLEAAERESFERTQTVSINKAINTQEVAVKEKHARTCILGTHHEKGAQTFWSVVNRLPLSSNAVLCWKFCHVFHKLLRDGHPNVLKDSLRYRNELSDMSRMWGHLSEGYGQLCSIYLKLLRTKMEYHTKNPRFPGNLQMSDRQLDEAGESDVNNFFQLTVEMFDYLECELNLFQTVFNSLDMSRSVSVTAAGQCRLAPLIQVILDCSHLYDYTVKLLFKLHSCLPADTLQGHRDRFMEQFTKLKDLFYRSSNLQYFKRLIQIPQLPENPPNFLRASALSEHISPVVVIPAEASSPDSEPVLEKDDLMDMDASQQNLFDNKFDDIFGSSFSSDPFNFNSQNGVNKDEKDHLIERLYREISGLKAQLENMKTESQRVVLQLKGHVSELEADLAEQQHLRQQAADDCEFLRAELDELRRQREDTEKAQRSLSEIERKAQANEQRYSKLKEKYSELVQNHADLLRKNAEVTKQVSMARQAQVDLEREKKELEDSLERISDQGQRKTQEQLEVLESLKQELATSQRELQVLQGSLETSAQSEANWAAEFAELEKERDSLVSGAAHREEELSALRKELQDTQLKLASTEESMCQLAKDQRKMLLVGSRKAAEQVIQDALNQLEEPPLISCAGSADHLLSTVTSISSCIEQLEKSWSQYLACPEDISGLLHSITLLAHLTSDAIAHGATTCLRAPPEPADSLTEACKQYGRETLAYLASLEEEGSLENADSTAMRNCLSKIKAIGEELLPRGLDIKQEELGDLVDKEMAATSAAIETATARIEEMLSKSRAGDTGVKLEVNERILGCCTSLMQAIQVLIVASKDLQREIVESGRGTASPKEFYAKNSRWTEGLISASKAVGWGATVMVDAADLVVQGRGKFEELMVCSHEIAASTAQLVAASKVKADKDSPNLAQLQQASRGVNQATAGVVASTISGKSQIEETDNMDFSSMTLTQIKRQEMDSQVRVLELENELQKERQKLGELRKKHYELAGVAEGWEEGTEASPPTLQEVVTEKE

SEQ ID NO: 49439 - protein, 986 aa, Homo sapiens
MDRMASSMKQVPNPLPKVLSRRGVGAGLEAAERESFERTQTVSINKAINTQEVAVKEKHARTCILGTHHEKGAQTFWSVVNRLPLSSNAVLCWKFCHVFHKLLRDGHPNVLKDSLRYRNELSDMSRMWGHLSEGYGQLCSIYLKLLRTKMEYHTKNPRFPGNLQMSDRQLDEAGESDVNNFFQLTVEMFDYLECELNLFQTVFNSLDMSRSVSVTAAGQCRLAPLIQVILDCSHLYDYTVKLLFKLHSCLPADTLQGHRDRFMEQFTKLKDLFYRSSNLQYFKRLIQIPQLPENPPNFLRASALSEHISPVVVIPAEASSPDSEPVLEKDDLMDMDASQQNLFDNKFDDIFGSSFSSDPFNFNSQNGVNKDEKDHLIERLYREISGLKAQLENMKTESQRVVLQLKGHVSELEADLAEQQHLRQQAADDCEFLRAELDELRRQREDTEKAQRSLSEIERKAQANEQRYSKLKEKYSELVQNHADLLRKNAEVTKQVSMARQAQVDLEREKKELEDSLERISDQGQRKTQEQLEVLESLKQELATSQRELQVLQGSLETSAQSEANWAAEFAELEKERDSLVSGAAHREEELSALRKELQDTQLKLASTEESMCQLAKDQRKMLLVGSRKAAEQVIQDALNQLEEPPLISCAGSADHLLSTVTSISSCIEQLEKSWSQYLACPEDISGLLHSITLLAHLTSDAIAHGATTCLRAPPEPADSLTEACKQYGRETLAYLASLEEEGSLENADSTAMRNCLSKIKAIGEELLPRGLDIKQEELGDLVDKEMAATSAAIETATARIEGTASPKEFYAKNSRWTEGLISASKAVGWGATVMVDAADLVVQGRGKFEELMVCSHEIAASTAQLVAASKVKADKDSPNLAQLQQASRGVNQATAGVVASTISGKSQIEETDNMDFSSMTLTQIKRQEMDSQVRVLELENELQKERQKLGELRKKHYELAGVAEGWEEGTEASPPTLQEVVTEKE

SEQ ID NO: 49440 - protein, 1068 aa, Homo sapiens
MNSIKNVPARVLSRRPGHSLEAEREQFDKTQAISISKAINTQEAPVKEKHARRIILGTHHEKGAFTFWSYAIGLPLPSSSILSWKFCHVLHKVLRDGHPNVLHDCQRYRSNIREIGDLWGHLHDRYGQLVNVYTKLLLTKISFHLKHPQFPAGLEVTDEVLEKAAGTDVNNIFQLTVEMFDYMDCELKLSESVFRQLNTAIAVSQMSSGQCRLAPLIQVIQDCSHLYHYTVKLLFKLHSCLPADTLQGHRDRFHEQFHSLRNFFRRASDMLYFKRLIQIPRLPEGPPNFLRASALAEHIKPVVVIPEEAPEDEEPENLIEISTGPPAGEPVVVADLFDQTFGPPNGSVKDDRDLQIESLKREVEMLRSELEKIKLEAQRYIAQLKSQVNALEGELEEQRKQKQKALVDNEQLRHELAQLRAAQLEGERSQGLREEAERKASATEARYNKLKEKHSELVHVHAELLRKNADTAKQLTVTQQSQEEVARVKEQLAFQVEQVKRESELKLEEKSDQLEKLKRELEAKAGELARAQEALSHTEQSKSELSSRLDTLSAEKDALSGAVRQREADLLAAQSLVRETEAALSREQQRSSQEQGELQGRLAERESQEQGLRQRLLDEQFAVLRGAAAEAAGILQDAVSKLDDPLHLRCTSSPDYLVSRAQEALDAVSTLEEGHAQYLTSLADASALVAALTRFSHLAADTIINGGATSHLAPTDPADRLIDTCRECGARALELMGQLQDQQALRHMQASLVRTPLQGILQLGQELKPKSLDVRQEELGAVVDKEMAATSAAIEDAVRRIEDMMNQARHASSGVKLEVNERILNSCTDLMKAIRLLVTTSTSLQKEIVESGRGAATQQEFYAKNSRWTEGLISASKAVGWGATQLVEAADKVVLHTGKYEELIVCSHEIAASTAQLVAASKVKANKHSPHLSRLQECSRTVNERAANVVASTKSGQEQIEDRDTMDFSGLSLIKLKKQEMETQVRVLELEKTLEAERMRLGELRKQHYVLAGASGSPGEEVAIRPSTAPRSVTTKKPPLAQKPSVAPRQDHQLDKKDGIYPAQLVNY

SEQ ID NO: 49441 - protein, 250 aa, Homo sapiens
MAHVGTSRVGSVLSMSLSIHLLVPTMTKGETGKPGHHEAPRTLQAFPWTWARASPGVSVDMSAGLPQSLLCWPGAPLLPTPPLPSATYVGHSLGLPRAGSSVGPWFSGRWVGGALVQWPLGGGGPGSVAAGLGGPLVRWLLGGGALVRWPLGGGGPGSVAAGWGGPWFGGRWVGGPPGSVAAGWGGPVRWPLGGGGPGSVATGWGGPWFGGRWVGGPPGSVAAGCGGALVQWPLGGGSLHSIPSFPRAWR

SEQ ID NO: 49442 - protein, 671 aa, Homo sapiens
MRPKRLGRCCAGSRLGPGDPAALTCAPSPSASPAPEPSAQPQARGTGQRVGSRATSGSQFLSEARTGARPASEAGAKAGARRPSAFSAIQGDVRSMPDNSDAPWTRFVFQGPFGSRATGRGTGKAAGIWKTPAAYVGRRPGVSGPERAAFIRELEEALCPNLPPPVKKITQEDVKVMLYLLEELLPPVWESVTYGMVLQRERDLNTAARIGQSLVKQNSVLMEENSKLEALLGSAKEEILYLRHQVNLRDELLQLYSDSDEEDEDEEEEEEEKEAEEEQEEEEAEEDLQCAHPCDAPKLISQEALLHQHHCPQLEALQEKLRLLEEENHQLREEASQLDTLEDEEQMLILECVEQFSEASQQMAELSEVLVLRLENYERQQQEVARLQAQVLKLQQRCRMYGAETEKLQKQLASEKEIQMQLQEESVWVGSQLQDLREKYMDCGGMLIEMQEEVKTLRQQPPVSTGSATHYPYSVPLETLPGFQETLAEELRTSLRRMISDPVYFMERNYEMPRGDTSSLRYDFRYSEDREQVRGFEAEEGLMLAADIMRGEDFTPAEEFVPQEELGAAKKVPAEEGVMEEAELVSEETEGWEEVELELDEATRMNVVTSALEASGLGPSHLDMNYVLQQLANWQDAHYRRQLRWKMLQKGECPHGALPAASRTSCRSSCR

SEQ ID NO: 49443 - protein, 602 aa, Homo sapiens
MRPKRLGRCCAGSRLGPGDPAALTCAPSPSASPAPEPSAQPQARGTGQRVGSRATSGSQFLSEARTGARPASEAGAKAGARRPSAFSAIQGDVRSMPDNSDAPWTRFVFQGPFGSRATGRGTGKAAGIWKTPAAYVGRRPGVSGPERAAFIRELEEALCPNLPPPVKKITQEDVKVMLYLLEEVCTAFLIQLLPPVWESVTYGMVLQRERDLNTAARIGQSLVKQNSVLMEENSKLEALLGSAKEEILYLRHQVNLRDELLQLYSDSDEEDEDEEEEEEEKEAEEEQEEEEAEEDLQCAHPCDAPKLISQEALLHQHHCPQLEALQEKLRLLEEENHQLREEASQLDTLEDEEQMLILECVEQFSEASQQMAELSEVLVLRLENYERQQQEVARLQAQVLKLQQRCRMETLPGFQETLAEELRTSLRRMISDPVYFMERNYEMPRGDTSSLRYDFRYSEDREQVRGFEAEEGLMLAADIMRGEDFTPAEEFVPQEELGAAKKVPAEEGVMEEAELVSEETEGWEEVELELDEATRMNVVTSALEASGLGPSHLDMNYVLQQLANWQDAHYRRQLRWKMLQKGECPHGALPAASRTSCRSSCR

SEQ ID NO: 49444 - protein, 619 aa, Homo sapiens
MRPKRLGRCCAGSRLGPGDPAALTCAPSPSASPAPEPSAQPQARGTGQRVGSRATSGSQFLSEARTGARPASEAGAKAGARRPSAFSAIQGDVRSMPDNSDAPWTRFVFQGPFGSRATGRGTGKAAGIWKTPAAYVGRRPGVSGPERAAFIRELEEALCPNLPPPVKKITQEDVKVMLYLLEELLPPVWESVTYGMVLQRERDLNTAARIGQSLVKQNSVLMEENSKLEALLGSAKEEILYLRHQVNLRDELLQLYSDSDEEDEDEEEEEEEKEAEEEQEEEEAEEDLQCAHPCDAPKLISQEALLHQHHCPQLEALQEKLRLLEEENHQLREEASQLDTLEDEEQMLILECVEQFSEASQQMAELSEVLVLRLENYERQQQEVARLQAQVLKLQQRCRMYGAETEKLQKQLASEKEIQMQLQEEETLPGFQETLAEELRTSLRRMISDPVYFMERNYEMPRGDTSSLRYDFRYSEDREQVRGFEAEEGLMLAADIMRGEDFTPAEEFVPQEELGAAKKVPAEEGVMEEAELVSEETEGWEEVELELDEATRMNVVTSALEASGLGPSHLDMNYVLQQLANWQDAHYRRQLRWKMLQKGECPHGALPAASRTSCRSSCR

SEQ ID NO: 49445 - protein, 594 aa, Homo sapiens
MRPKRLGRCCAGSRLGPGDPAALTCAPSPSASPAPEPSAQPQARGTGQRVGSRATSGSQFLSEARTGARPASEAGAKAGARRPSAFSAIQGDVRSMPDNSDAPWTRFVFQGPFGSRATGRGTGKAAGIWKTPAAYVGRRPGVSGPERAAFIRELEEALCPNLPPPVKKITQEDVKVMLYLLEELLPPVWESVTYGMVLQRERDLNTAARIGQSLVKQNSVLMEENSKLEALLGSAKEEILYLRHQVNLRDELLQLYSDSDEEDEDEEEEEEEKEAEEEQEEEEAEEDLQCAHPCDAPKLISQEALLHQHHCPQLEALQEKLRLLEEENHQLREEASQLDTLEDEEQMLILECVEQFSEASQQMAELSEVLVLRLENYERQQQEVARLQAQVLKLQQRCRMETLPGFQETLAEELRTSLRRMISDPVYFMERNYEMPRGDTSSLRYDFRYSEDREQVRGFEAEEGLMLAADIMRGEDFTPAEEFVPQEELGAAKKVPAEEGVMEEAELVSEETEGWEEVELELDEATRMNVVTSALEASGLGPSHLDMNYVLQQLANWQDAHYRRQLRWKMLQKGECPHGALPAASRTSCRSSCR

SEQ ID NO: 49446 - protein, 278 aa, Homo sapiens
MKFRAKITGKGCLELFIHVSGTVARLAKVCVLRVRPDSLCFGPAGSGGLHEARLWCEVRQGAFQQFRMEGVSEDLDEIHLELTAEHLSRAARSAAGASSLKLQLTHKRRPSLTVAVELVSSLGRARSVVHDLPVRVLPRRVWRDCLPPSLRASDASIRLPRWRTLRSIVERMANVGSHVLVEANLSGRMTLSIETEVVSIQSYFKNLGNPPQSAVGVPENRDLESMVQVRVDNRKLLQFLEGQQIHPTTALCNIWDNTLLQLVLVQEDVSLQYFIPAL

SEQ ID NO: 49447 - protein, 354 aa, Homo sapiens
MKSLLLLVLISICWADHLSDNYTLDHDRAIHIQAENGPHLLVEAEQAKVFSHRGGNVTLPCKFYRDPTAFGSGIHKIRIKWTKLTSDYLKEVDVFVSMGYHKKTYGGYQGRVFLKGGSDSDASLVITDLTLEDYGRYKCEVIEGLEDDTVVVALDLQGVVFPYFPRLGRYNLNFHEAQQACLDQDAVIASFDQLYDAWRGGLDWCNAGWLSDGSVQYPITKPREPCGGQNTVPGVRNYGFWDKDKSRYDVFCFTSNFNGRFYYLIHPTKLTYDEAVQACLNDGAQIAKVGQIFAAWKILGYDRCDAGWLADGSVRYPISRPRRRCSPTEAAVRFVGFPDKKHKLYGVYCFRAYN

SEQ ID NO: 49448 - protein, 182 aa, Homo sapiens
MKSLLLLVLISICWADHLSDNYTLDHDRAIHIQENGPHLLVEAEQAKVFSHRGGNVTLPCKFYRDPTAFGSGIHKIRIKWTKLTSDYLKEVDVFVSMGYHKKTYGGYQGRVFLKGGSDSDASLVITDLTLEDYGRYKCEVIEGLEDDTVVVALDLQGVVFPYFPRLGRYNLNFHEAQQACLD

SEQ ID NO: 49449 - protein, 158 aa, Homo sapiens
MKSLLLLVLISICWADHLSDNYTLDHDRAIHIQAENGPHLLVEAEQAKVFSHRGGNVTLPCKFYRDPTAFGSGIHKIRIKWTKLTSDYLKEVDVFVSMGYHKKTYGGYQGRVFLKGGSDSDASLVITDLTLEDYGRYKCEVIEGLEDDTVVVALDLQG

SEQ ID NO: 49450 - protein, 199 aa, Homo sapiens
MKSLLLLVLISICWADHLSDNYTLDHDRAIHIQAENGPHLLVEAEQAKVFSHRGGNVTLPCKFYRDPTAFGSGIHKIRIKWTKLTSDYLKEVDVFVSMGYHKKTYGGYQGRVFLKGGSDSDASLVITDLTLEDYGRYKCEVIEGLEDDTVVVALDLQGVVFPYFPRLGRYNLNFHEAQQACLDQDAVIASFDQLYDAWR

SEQ ID NO: 49451 - protein, 258 aa, Homo sapiens
MKSLLLLVLISICWADHLSDNYTLDHDRAIHIQAENGPHLLVEAEQAKVFSHRGGNVTLPCKFYRDPTAFGSGIHKIRIKWTKLTSDYLKEVDVFVSMGYHKKTYGGYQGRVFLKGGSDSDASLVITDLTLEDYGRYKCEVIEGLEDDTVVVALDLQGVVFPYFPRLGRYNLNFHEAQQACLDQDAVIASFDQLYDAWRGGLDWCNAGWLSDGSVQYPITKPREPCGGQNTVPGVRNYGFWDKDKSRYDVFCFTSNFN

SEQ ID NO: 49452 - protein, 153 aa, Homo sapiens
MKSLLLLVLISICWADHLSDNYTLDHDRAIHIQAENGPHLLVEAEQAKVFSHRGGNVTLPCKFYRDPTAFGSGIHKIRIKWTKLTSDYLKEVDVFVSMGYHKKTYGGYQGRVFLKGGSDSDASLVITDLTLEDYGRYKCEVIEGLEDDTVVVA

SEQ ID NO: 49453 - protein, 560 aa, Homo sapiens
MFARMSDLHVLLLMALVGKTACGFSLMSLLESLDPDWTPDQYDYSYEDYNQEENTSSTLTHAENPDWYYTEDQADPCQPNPCEHGGDCLVHGSTFTCSCLAPFSGNKCQKVQNTCKDNPCGRGQCLITQSPPYYRCVCKHPYTGPSCSQVVPVCRPNPCQNGATCSRHKRRSKFTCACPDQFKGKFCEIGSDDCYVGDGYSYRGKMNRTVNQHACLYWNSHLLLQENYNMFMEDAETHGIGEHNFCRNPDADEKPWCFIKVTNDKVKWEYCDVSACSAQDVAYPEESPTEPSTKLPGFDSCGKTEIAERKIKRIYGGFKSTAGKHPWQASLQSSLPLTISMPQGHFCGGALIHPCWVLTAAHCTDIKTRHLKVVLGDQDLKKEEFHEQSFRVEKIFKYSHYNERDEIPHNDIALLKLKPVDGHCALESKYVKTVCLPDGSFPSGSECHISGWGVTETGKGSRQLLDAKVKLIANTLCNSRQLYDHMIDDSMICAGNLQKPGQDTCQGDSGGPLTCEKDGTYYVYGIVSWGLECGKRPGVYTQVTKFLNWIKATIKSESGF

SEQ ID NO: 49454 - protein, 177 aa, Homo sapiens
MEENFICSRKTMALSSTWILSPKKTGPLTSMITATRIIIRKRTPVAHLPTLRILTGTTLRTKLIHASPTPVNTVGTASSMGAPSHAAAWLLSLGISVRKCKIRARTTHVAGANVSLPRVLPTTAVSVNTLTQVPAAPKWFLYAGQTPARMGLPAPGISGDPSSPVPVPTSSRGNSVK

SEQ ID NO: 49455 - protein, 280 aa, Homo sapiens
MFARMSDLHVLLLMALVGKTACGFSLMSLLESLDPDWTPDQYDYSYEDYNQEENTSSTLTHAENPDWYYTEDQADPCQPNPCEHGGDCLVHGSTFTCSCLAPFSGNKCQKVQNTCKDNPCGRGQCLITQSPPYYRCVCKHPYTGPSCSQVVPVCRPNPCQNGATCSRHKRRSKFTCACPDQFKGKFCEIGSDDCYVGDGYSYRGKMNRTVNQHACLYWNSHLLLQENYNMFMEDAETHGIGEHNFCRNPDADEKPWCFIKVTNDKVKWEYCDVSACSAQA

SEQ ID NO: 49456 - protein, 534 aa, Homo sapiens
MSLLESLDPDWTPDQYDYSYEDYNQEENTSSTLTHAENPDWYYTEDQADPCQPNPCEHGGDCLVHGSTFTCSCLAPFSGNKCQKVQNTCKDNPCGRGQCLITQSPPYYRCVCKHPYTGPSCSQVVPVCRPNPCQNGATCSRHKRRSKFTCACPDQFKGKFCEIGSDDCYVGDGYSYRGKMNRTVNQHACLYWNSHLLLQENYNMFMEDAETHGIGEHNFCRNPDADEKPWCFIKVTNDKVKWEYCDVSACSAQDVAYPEESPTEPSTKLPGFDSCGKTEIAERKIKRIYGGFKSTAGKHPWQASLQSSLPLTISMPQGHFCGGALIHPCWVLTAAHCTDIKTRHLKVVLGDQDLKKEEFHEQSFRVEKIFKYSHYNERDEIPHNDIALLKLKPVDGHCALESKYVKTVCLPDGSFPSGSECHISGWGVTETGKGSRQLLDAKVKLIANTLCNSRQLYDHMIDDSMICAGNLQKPGQDTCQGDSGGPLTCEKDGTYYVYGIVSWGLECGKRPGVYTQVTKFLNWIKATIKSESGF

SEQ ID NO: 49457 - protein, 578 aa, Homo sapiens
MRQQDAPKPTPAACRCSGLARRVLTIAFALLILGLMTWAYAAGVPLASDRYGLLAFGLYGAFLSAHLVAQSLFAYLEHRRVAAAARGPLDAATARSVALTISAYQEDPAYLRQCLASARALLYPRARLRVLMVVDGNRAEDLYMVDMFREVFADEDPATYVWDGNYHQPWEPAAAGAVGAGAYREVEAEDPGRLAVEALVRTRRCVCVAQRWGGKREVMYTAFKALGDSVDYVQVCDSDTRLDPMALLELVRVLDEDPRVGAVGGDVRILNPLDSWVSFLSSLRYWVAFNVERACQSYFHCVSCISGPLGLYRNNLLQQFLEAWYNQKFLGTHCTFGDDRHLTNRMLSMGYATKYTSRSRCYSETPSSFLRWLSQQTRWSKSYFREWLYNALWWHRHHAWMTYEAVVSGLFPFFVAATVLRLFYAGRPWALLWVLLCVQGVALAKAAFAAWLRGCLRMVLLSLYAPLYMCGLLPAKFLALVTMNQSGWGTSGRRKLAANYVPLLPLALWALLLLGGLVRSVAHEARADWSGPSRAAEAYHLAAGAGAYVGYWVAMLTLYWVGVRRLCRRRTGGYRVQV

SEQ ID NO: 49458 - protein, 185 aa, Homo sapiens
MFREVFADEDPATYVWDGNYHQPWEPAAAGAVGAGAYREVEAEDPGRLAVEALVRTRRCVCVAQRWGGKREVMYTAFKALGDSVDYVQFCRVCDSDTRLDPMALLELVRVLDEDPRVGAVGGDVRILNPLDSWVSFLSSLRYWVAFNVERACQSYFHCVSCISGPLGTPPGPAATQRRPRPSCGG

SEQ ID NO: 49459 - protein, 214 aa, Homo sapiens
MFREVFADEDPATYVWDGNYHQPWEPAAAGAVGAGAYREVEAEDPGRLAVEALVRTRRCVCVAQRWGGKREVMYTAFKALGDSVDYVQVCDSDTRLDPMALLELVRVLDEDPRVGAVGGDVRILNPLDSWVSFLSSLRYWVAFNVERACQSYFHCVSCISGPLESCPGPREHAMMPSFLAPVQVHLQVPLLLRDALVLPAVAEPADTLVQVVLP

SEQ ID NO: 49460 - protein, 577 aa, Homo sapiens
MRQDAPKPTPAACRCSGLARRVLTIAFALLILGLMTWAYAAGVPLASDRYGLLAFGLYGAFLSAHLVAQSLFAYLEHRRVAAAARGPLDAATARSVALTISAYQEDPAYLRQCLASARALLYPRARLRVLMVVDGNRAEDLYMVDMFREVFADEDPATYVWDGNYHQPWEPAAAGAVGAGAYREVEAEDPGRLAVEALVRTRRCVCVAQRWGGKREVMYTAFKALGDSVDYVQVCDSDTRLDPMALLELVRVLDEDPRVGAVGGDVRILNPLDSWVSFLSSLRYWVAFNVERACQSYFHCVSCISGPLGLYRNNLLQQFLEAWYNQKFLGTHCTFGDDRHLTNRMLSMGYATKYTSRSRCYSETPSSFLRWLSQQTRWSKSYFREWLYNALWWHRHHAWMTYEAVVSGLFPFFVAATVLRLFYAGRPWALLWVLLCVQGVALAKAAFAAWLRGCLRMVLLSLYAPLYMCGLLPAKFLALVTMNQSGWGTSGRRKLAANYVPLLPLALWALLLLGGLVRSVAHEARADWSGPSRAAEAYHLAAGAGAYVGYWVAMLTLYWVGVRRLCRRRTGGYRVQV

SEQ ID NO: 49461 - protein, 552 aa, Homo sapiens
MHCERFLCILRIIGTTLFGVSLLLGITAAYIVGYQFIQTDNYYFSFGLYGAFLASHLIIQSLFAFLEHRKMKKSLETPIKLNKTVALCIAAYQEDPDYLRKCLQSVKRLTYPGIKVVMVIDGNSEDDLYMMDIFSEVMGRDKSATYIWKNNFHEKGPGETDESHKESSQHVTQLVLSNKSICIMQKWGGKREVMYTAFRALGRSVDYVQVCDSDTMLDPASSVEMVKVLEEDPMVGGVGGDVQILNKYDSWISFLSSVRYWMAFNIERACQSYFGCVQCISGPLGMYRNSLLHEFVEDWYNQEFMGNQCSFGDDRHLTNRVLSLGYATKYTARSKCLTETPIEYLRWLNQQTRWSKSYFREWLYNAMWFHKHHLWMTYEAIITGFFPFFLIATVIQLFYRGKIWNILLFLLTVQLVGLIKSSFASCLRGNIVMVFMSLYSVLYMSSLLPAKMFAIATINKAGWGTSGRKTIVVNFIGLIPVSVWFTILLGGVIFTIYKESKRPFSESKQTVLIVGTLLYACYWVMLLTLYVVLINKCGRRKKGQQYDMVLDV

SEQ ID NO: 49462 - protein, 316 aa, Homo sapiens
MHCERFLCILRIIGTTLFGVSLLLGITAAYIVGYQFIQTDNYYFSFGLYGAFLASHLIIQSLFAFLEHRKMKKSLETPIKLNKTVALCIAAYQEDPDYLRKCLQSVKRLTYPGIKVVMVIDGNSEDDLYMMDIFSEVMGRDKSATYIWKNNFHEKGPGETDESHKESSQHVTQLVLSNKSICIMQKWGGKREVMYTAFRALGRSVDYVQVCDSDTMLDPASSVEMVKVLEEDPMVGGVGGDVQILNKYDSWISFLSSVRYWMAFNIERACQSYFGCVQCISGPLGMYRNSLLHVLTFAVTHNTLVPLGAVQYCGIR

SEQ ID NO: 49463 - protein, 281 aa, Homo sapiens
MPVQLTTALRVVGTSLFALAVLGGILAAYVTGYQFIHTEKHYLSFGLYGAILGLHLLIQSLFAFLEHRRMRRAGQALKLPSPRRGSVALCIAAYQEDPDYLRKCLRSAQRISFPDLKVVMVVDGNRQEDAYMLDIFHEVLGGTEQAGFFVWRSNFHEAGEGETEASLQEGMDRVRDVVRASTFSCIMQKWGGKREVMYTAFKALGDSVDYIQVCDSDTVLDPACTIEMLRVLEEDPQVGGVGGDVQPPGKGMAVEDDQVQAAQVRATEAWSVHQRHVSREQ

SEQ ID NO: 49464 - protein, 553 aa, Homo sapiens
MPVQLTTALRVVGTSLFALAVLGGILAAYVTGYQFIHTEKHYLSFGLYGAILGLHLLIQSLFAFLEHRRMRRAGQALKLPSPRRGSVALCIAAYQEDPDYLRKCLRSAQRISFPDLKVVMVVDGNRQEDAYMLDIFHEVLGGTEQAGFFVWRSNFHEAGEGETEASLQEGMDRVRDVVRASTFSCIMQKWGGKREVMYTAFKALGDSVDYIQVCDSDTVLDPACTIEMLRVLEEDPQVGGVGGDVQILNKYDSWISFLSSVRYWMAFNVERACQSYFGCVQCISGPLGMYRNSLLQQFLEDWYHQKFLGSKCSFGDDRHLTNRVLSLGYRTKYTARSKCLTETPTKYLRWLNQQTRWSKSYFREWLYNSLWFHKHHLWMTYESVVTGFFPFFLIATVIQLFYRGRIWNILLFLLTVQLVGIIKATYACFLRGNAEMIFMSLYSLLYMSSLLPAKIFAIATINKSGWGTSGRKTIVVNFIGLIPVSIWVAVLLGGLAYTAYCQDLFSETELAFLVSGAILYGCYWVALLMLYLAIIARRCGKKPEQYSLAFAEV

SEQ ID NO: 49465 - protein, 435 aa, Homo sapiens
MAAHLLPICALFLTLLDMAQGFRGPLLPNRPFTTVWNANTQWCLERHGVDVDVSVFDVVANPGQTFRGPDMTIFYSSQLGTYPYYTPTGEPVFGGLPQNASLIAHLARTFQDILAAIPAPDFSGLAVIDWEAWRPRWAFNWDTKDIYRQRSRALVQAQHPDWPAPQVEAVAQDQFQGAARAWMAGTLQLGRALRPRGLWGFYGFPDCYNYDFLSPNYTGQCPSGIRAQNDQLGWLWGQSRALYPSIYMPAVLEGTGKSQMYVQHRVAEAFRVAVAAGDPNLPVLPYVQIFYDTTNHFLPLDELEHSLGESAAQGAAGVVLWVSWENTRTKESCQAIKEYMDTTLGPFILNVTSGALLCSQALCSGHGRCVRRTSHPKALLLLNPASFSIQLTPGGGPLSLRGALSLEDQAQMAVEFKCRCYPGWQAPWCERKSMW

SEQ ID NO: 49466 - protein, 435 aa, Homo sapiens; identical to SEQ ID NO: 49465

SEQ ID NO: 49467 - protein, 405 aa, Homo sapiens
MAAHLLPICALFLTLLDMAQGFRGPLLPNRPFTTVWNANTQWCLERHGVDVDVSVFDVVANPGQTFRGPDMTIFYSSQLGTYPYYTPTGEPVFGGLPQNASLIAHLARTFQDILAAIPAPDFSGLAVIDWEAWRPRWAFNWDTKDIYRQRSRALVQAQHPDWPAPQVEAVAQDQFQGAARAWMAGTLQLGRALRPRGLWGFYGFPDCYNYDFLSPNYTGQCPSGIRAQNDQLGWLWGQSRALYPSIYMPAVLEGTGKSQMYVQHRVAEAFRVAVAAGDPNLPVLPYVQIFYDTTNHFLPLESCQAIKEYMDTTLGPFILNVTSGALLCSQALCSGHGRCVRRTSHPKALLLLNPASFSIQLTPGGGPLSLRGALSLEDQAQMAVEFKCRCYPGWQAPWCERKSMW

SEQ ID NO: 49468 - protein, 435 aa, Homo sapiens; identical to SEQ ID NO: 49465

SEQ ID NO: 49469 - protein, 103 aa, Homo sapiens
MAAHLLPICALFLTLLDMAQGFRGPLLPNRPFTTVWNANTQWCLERHGVDVDVSVFDVVANPGQTFRGPDMTIFYSSQLGTYPYYTPTGEPVFGGLPQNASLI

SEQ ID NO: 49470 - protein, 176 aa, Homo sapiens
MYVQHRVAEAFRVAVAAGDPNLPVLPYVQIFYDTTNHFLPLDELEHSLGESAAQGAAGVVLWVSWENTRTKESCQAIKEYMDTTLGPFILNVTSGALLCSQALCSGHGRCVRRTSHPKALLLLNPASFSIQLTPGGGPLSLRGALSLEDQAQMAVEFKCRCYPGWQAPWCERKSMW

SEQ ID NO: 49471 - protein, 69 aa, Homo sapiens
MAAHLLPICALFLTLLDMAQGFRGPLLPNRPFTTVWNANTQWCLERHGVDVDVSVFDVVANPGQTFRGP

SEQ ID NO: 49472 - protein, 253 aa, Homo sapiens
MAGTLQLGRALRPRGLWGFYGFPDCYNYDFLSPNYTGQCPSGIRAQNDQLGWLWGQSRALYPSIYMPAVLEGTGKSQMYVQHRVAEAFRVAVAAGDPNLPVLPYVQIFYDTTNHFLPLDELEHSLGESAAQGAAGVVLWVSWENTRTKESCQAIKEYMDTTLGPFILNVTSGALLCSQALCSGHGRCVRRTSHPKALLLLNPASFSIQLTPGGGPLSLRGALSLEDQAQMAVEFKCRCYPGWQAPWCERKSMW

SEQ ID NO: 49473 - protein, 473 aa, Homo sapiens
MRAGPGPTVTLALVLAVSWAMELKPTAPPIFTGRPFVVAWDVPTQDCGPRLKVPLDLNAFDVQASPNEGFVNQNITIFYRDRLGLYPRFDSAGRSVHGGVPQNVSLWAHRKMLQKRVEHYIRTQESAGLAVIDWEDWRPVWVRNWQDKDVYRRLSRQLVASRHPDWPPDRIVKQAQYEFEFAAQQFMLETLRYVKAVRPRHLWGFYLFPDCYNHDYVQNWESYTGRCPDVEVARNDQLAWLWAESTALFPSVYLDETLASSRHGRNFVSFRVQEALRVARTHHANHALPVYVFTRPTYSRRLTGLSEMDLISTIGESAALGAAGVILWGDAGYTTSTETCQYLKDYLTRLLVPYVVNVSWATQYCSRAQCHGHGRCVRRNPSASTFLHLSTNSFRLVPGHAPGEPQLRPVGELSWADIDHLQTHFRCQCYLGWSGEQCQWDHRQAAGGASEAWAGSHLTSLLALAALAFTWTL

SEQ ID NO: 49474 - protein, 473 aa, Homo sapiens; identical to SEQ ID NO: 49473

SEQ ID NO: 49475 - protein, 48 aa, Homo sapiens
MRAGPGPTVTLALVLAVSWAMELKPTAPPIFTGRPFVVAWDVPTQDCG

SEQ ID NO: 49476 - protein, 117 aa, Homo sapiens
MRAGPGPTVTLALVLAVSWAMELKPTAPPIFTGRPFVVAWDVPTQDCGPRLKVPLDLNAFDVQASPNEGFVNQNITIFYRDRLGLYPRFDSAGRSVHGGVPQNVSLWAHRKMLQKRV

SEQ ID NO: 49477 - protein, 81 aa, Homo sapiens
MRAGPGPTVTLALVLAVSWAMELKPTAPPIFTGRPFVVAWDVPTQDCGPRLKVPLDLNAFDVQASPNEGFVNQNITIFYRD

SEQ ID NO: 49478 - protein, 76 aa, Homo sapiens
MRAGPGPTVTLALVLAVSWAMELKPTAPPIFTGRPFVVAWDVPTQDCGPRLKVPLDLNAFDVQASPNEGFVNQNIT

SEQ ID NO: 49479 - protein, 473 aa, Homo sapiens; identical to SEQ ID NO: 49473

SEQ ID NO: 49480 - protein, 473 aa, Homo sapiens; identical to SEQ ID NO: 49473

SEQ ID NO: 49481 - protein, 121 aa, Homo sapiens
MRAGPGPTVTLALVLAVSWAMELKPTAPPIFTGRPFVVAWDVPTQDCGPRLKVPLDLNAFDVQASPNEGFVNQNITIFYRDRLGLYPRFDSAGRSVHGGVPQNVSLWAHRKMLQKRVEHYI

SEQ ID NO: 49482 - protein, 417 aa, Homo sapiens
MTTQLGPALVLGVALCLGCGQPLPQVPERPFSVLWNVPSAHCEARFGVHLPLNALGIIANRGQHFHGQNMTIFYKNQLGLYPYFGPRGTAHNGGIPQALPLDRHLALAAYQIHHSLRPGFAGPAVLDWEEWCPLWAGNWGRRRAYQAASWAWAQQVFPDLDPQEQLYKAYTGFEQAARALMEDTLRVAQALRPHGLWGFYHYPACGNGWHSMASNYTGRCHAATLARNTQLHWLWAASSALFPSIYLPPRLPPAHHQAFVRHRLEEAFRVALVGHRHPLPVLAYVRLTHRRSGRFLSQDDLVQSIGVSAALGAAGVVLWGDLSLSSSEEECWHLHDYLVDTLGPYVINVTRAAMACSHQRCHGHGRCARRDPGQMEAFLHLWPDGSLGDWKSFSCHCYWGWAGPTCQEPRPGPKEAV

SEQ ID NO: 49483 - protein, 387 aa, Homo sapiens
MTTQLGPALVLGVALCLGCGQPLPQVPERPFSVLWNVPSAHCEARFGVHLPLNALGIIANRGQHFHGQNMTIFYKNQLGLYPYFGPRGTAHNGGIPQALPLDRHLALAAYQIHHSLRPGFAGPAVLDWEEWCPLWAGNWGRRRAYQAASWAWAQQVFPDLDPQEQLYKAYTGFEQAARALMEDTLRVAQALRPHGLWGFYHYPACGNGWHSMASNYTGRCHAATLARNTQLHWLWAASSALFPSIYLPPRLPPAHHQAFVRHRLEEAFRVALVGHRHPLPVLAYVRLTHRRSGRFLSQEECWHLHDYLVDTLGPYVINVTRAAMACSHQRCHGHGRCARRDPGQMEAFLHLWPDGSLGDWKSFSCHCYWGWAGPTCQEPRPGPKEAV

SEQ ID NO: 49484 - protein, 168 aa, Homo sapiens
MLPPAHHQAFVRHRLEEAFRVALVGHRHPLPVLAYVRLTHRRSGRFLSQDDLVQSIGVSAALGAAGVVLWGDLSLSSSEEECWHLHDYLVDTLGPYVINVTRAAMACSHQRCHGHGRCARRDPGQMEAFLHLWPDGSLGDWKSFSCHCYWGWAGPTCQEPRPGPKEAV

SEQ ID NO: 49485 - protein, 160 aa, Homo sapiens
MTTQLGPALVLGVALCLGCGQPLPQVPERPFSVLWNVPSAHCEARFGVHLPLNALGIIANRGQHFHGQNMTIFYKNQLGLYPYFGPRGTAHNGGIPQALPLDRHLALAAYQIHHSLRPGFAGPAVLDWEEWCPLWAGNWGRRRAYQAASWAWAQQVFPDL

SEQ ID NO: 49486 - protein, 387 aa, Homo sapiens; identical to SEQ ID NO: 49483

SEQ ID NO: 49487 - protein, 138 aa, Homo sapiens
MLPPAHHQAFVRHRLEEAFRVALVGHRHPLPVLAYVRLTHRRSGRFLSQEECWHLHDYLVDTLGPYVINVTRAAMACSHQRCHGHGRCARRDPGQMEAFLHLWPDGSLGDWKSFSCHCYWGWAGPTCQEPRPGPKEAV

SEQ ID NO: 49488 - protein, 481 aa, Homo sapiens
MKVLSEGQLKLCVVQPVHLTSWLLIFFILKSISCLKPARLPIYQRKPFIAAWNAPTDQCLIKYNLRLNLKMFPVIGSPLAKARGQNVTIFYVNRLGYYPWYTSQGVPINGGLPQNISLQVHLEKADQDINYYIPAEDFSGLAVIDWEYWRPQWARNWNSKDVYRQKSRKLISDMGKNVSATDIEYLAKVTFEESAKAFMKETIKLGIKSRPKGLWGYYLYPDCHNYNVYAPNYSGSCPEDEVLRNNELSWLWNSSAALYPSIGVWKSLGDSENILRFSKFRVHESMRISTMTSHDYALPVFVYTRLGYRDEPLFFLSKQDLVSTIGESAALGAAGIVIWGDMNLTASKANCTKVKQFVSSDLGSYIANVTRAAEVCSLHLCRNNGRCIRKMWNAPSYLHLNPASYHIEASEDGEFTVKGKASDTDLAVMADTFSCHCYQGYEGADCREIKTADGCSGVSPSPGSLMTLCLLLLASYRSIQL

SEQ ID NO: 49489 - protein, 481 aa, Homo sapiens; identical to SEQ ID NO: 49488

SEQ ID NO: 49490 - protein, 45 aa, Homo sapiens
MKVLSEGQLKLCVVQPVHLTSWLLIFFILKSISCLKPARLPIYQR

SEQ ID NO: 49491 - protein, 63 aa, Homo sapiens
MKVLSEGQLKLCVVQPVHLTSWLLIFFILKSISCLKPARLPIYQRKPFIAAWNAPTDQCLIKY

SEQ ID NO: 49492 - protein, 5121 aa, Homo sapiens
MTSRRLEESMGAVQMGLVNMFKGFQSKVLPPLSPKVVTEEEVNRMLTPSEFLKEMSLTTEQRLAKTRLMCRPQIIELLDMGETTHQKFSGIDLDQALFQPFPSEIIFQNYTPCEVYEVPLILRNNDKIPRLVKVVEESSPYFKVISPKDIGHKVAPGVPSIFRILFTPEENKDYAHTLTCVTEREKFIVPIKARGARAILDFPDKLNFSTCPVKYSTQKILLVRNIGNKNAVFHIKTCRPFSIEPAIGTLNVGESMQLEVEFEPQSVGDHSGRLIVCYDTGEKVFVSLYGAAIDMNIRLDKNSLTIEKTYISLANQRTITIHNRSNIIAHFLWKVFATQQEEDREKYRACDDLIKEEKDETDEFFEECITDPLLREHLSVLSRTFANQRRLVQGDSKLFFNNVFTVEPLEGDVWPNSSAEITVYFNPLEAKLYQQTIYCDILGREIRLPLRIKGEGMGPKIHFNFELLDIGKVFTGSAHCYEAILYNKGSIDALFNMTPPTSALGACFVFSPKEGIIEPSGVQAIQISFSSTILGNFEEEFLVNVNGSPEPVKLTIRGCVIGPTFHFNVPALHFGDVSFGFPHTLICSLNNTSLIPMTYKLRIPGDGLGHKSISYCEQHVDYKRPSWTKEEISSMKPKEFTISPDCGTIRPQGFAAIRVTLCSNTVQKYELALVVDVEGIGEEVLALLITARCVVPALHLVNTEVDFGHCFLKYPYEKTLQLANQDDLPGFYEVQPQVCEEVPTVLFSSPTPSGVISPSSTIHIPLVLETQVTGEHRSTVYISIFGSQDPPLVCHLKSAGEGPVIYVHPNQVDFGNIYVLKDSSRILNLCNQSFIPAFFQAHMAHKKSLWTIEPNEGMVPPETDVQLALTANLNDTLTFKDCVILDIENSSTYRIPVQASGTGSTIVSDKPFAPELNLGAHFSLDTHYYHFKLINKGRRIQQLFWMNDSFRPQAKLSKKGRVKKGHAHVQPQPSGSQEPRDPQSPVFHLHPASMELYPGQAIDVILEGYSATPRIVKEKLVCHAIIGAQKGKSLVMAVNITCEFVAPLIQLSTKQLIYRLEKKPNSILKPDYQPLAIKNISTLPVNLLLSTSGPFFICETDKSLLPATPEPIKLEIDEEKNLLIKFDPSYRNDLNNWVAEEILAIKYVEHPQIDSLDLRGEVHYPNLSFETKELDFGCILNDTELIRYVTITNCSPLVVKFRWFFLVNDEENQIRFVTLPKKPYSAPVSQMESIPATSEAASPPAILVTVESPEMDLNDFVKTVLVDEDARPEEKELRKTKASSVISDEIKISSTEIERIYSSQSQVEDQESLQTCEQNEMLSIGIEEVFDILPLFGVLQPHSSHQISFTFYGHANIIAQAKALCEVEEGPTYEITLKGEASLVNYSFDTKDIHYGLQLFDHVTEREITLTNMGKVGFEFKVLTDHQSSPDNLLPGVPLILPVSGFISSHQEQVLKVYYLPGVPEVFKRSFQIQIAHLDPENITLSGEGIFPQICLDLPRNLTANEKYEMFLNQARKNTDKEYNKCEMLDHFDIITEEVPEDEPAEVSAHLQMEVERLIVQSYVLEHQKTTTPDPMDDPCFSHRSRRKLAKIQLPEYILDFGYIILGEVRTHIIKIINTSHFPVSFHADKRVLHETGFSTELDRVKNLPHCETEIFEVRFDPQGANLPVGSKEVILPIKVVGGPTVHICLQAKVTIPTMTLSRGKVDFATIQCGQCLVETIQLSNHLQVPCEWFVQSQKPVDKLEKHMPKYLRQKLRAELKPKTRIFEIQPISGVLDPGEKSNVQVKFMPKEEKFYSQTLVFQIAQSAQKLTLLARGQGLEPRLEFSPSVLDLGPLLLCAPGDEAEVIVKNPCNFPIEFYSLEFDQQYLIEEKILRKLKGYDSYNTLLLPPRNPGEKLPPELYEYFKEIKKSKEEQMRAKYLENLAQENEEEDITSSDQGTSNSTKRTSLSRGISVTSNLEEWHALLVESKTYLEEEEDEESLEKIIFQTDKLQSIDSHSMEEVGEVENNPVSKAIARHLGIDISAEGRLAKNRKGIAIIIHGTPLSGKSANAVSVAKYYNAACLSIDSIVLEAVANSNNIPGIRARELCIRAAIEQSVKEGEEAAQEAAVGQNVIGQGRLSTDTLGKLASEMTLVAPEIKPGKSVRGSVVITKSKADSHGSGSQKQHHSHQSETPQISSSPLPPGPIHRWLSVSPSVGGETGLMSCVLPDELLVQILAERIQLSDCYRGVVFDGLDTLFAQNAAAALLCLLKAIGSREHIYILNMAQDYAAMKAQEKAKKEQEERKHKGALEKEKERLQNMDEEEYDALTEEEKLTFDRGIQQALRERKKREQERLAKEMQEKKLQQELERQKEEDELKRRVKKGKQGPIKEEPPMKKSQAANKQVPPLTKVDVKMETIERKISVREQTMSEKEELNKKKRNMGDVSMHGLPLVQDQEDSEGDNSKDPDKQLAPKFKTYELTLKDVQNILMYWDRKQGVQLPPAGMEEAPHEPDDQRQVPLGGRRGRKDRERERLEKERTEKERLEREKAERERLEKLRALEERSDWEGEGEEDHEGKKEKDLGVPFLDIQTPDFEGLSWKQALESDKLPKGEQILDILGLGASGPPIPPPALFSIVSYPVKRPPLTMTDDLEHFVFVIPPSEDISLDEKKEMEIESDFLATTNTTKAQEEQTSSSKGGKQKMKEKIDQVFEIQKDKRHMALNRKVLSGEPAGTISQLSDTDLDNFNGQHSQEKFTRLNHFRWIVPANGEVTLQVHFSSDEFGNFDQTFNFEILGTCCQYQLYCRGICTYPYICQDPKVVFPQRKMDMKTNEVIFKKYVMSTETYYFGPLLCGKSRDKYKSSLFPGNMETLTILNTSLMVVEASFYFQNDVKANTYFLEPNTMVLKPNEKQILNVWAYPTSVGVFEDSIVCCINDNPEPAIFQLSCQGIRPELELEPRQLHFDRLLLHRQESRVVLLRNVTLLPVAWRITSLEHLGDDFTVSLMQGTIPPEAEYGLHLYFQPTKPVNIKKAIRLEVLDAENLLGVVQIENIMVFAEAYDIALDITFPKGAEGGLDFGIVRVTEEAKQPLQLKNRGKYEIAFSFSVDSVGISTPNINSMISVQPKKGSLTPTEKPTNVQVFFHAKKEVKIEHQPVLRCQIIEPNISEGGEIIASIPIKFSANAVYSKYNITPSSVINFGALICGTRKSTTFTIENQGVTDFKFALYKLTGESPIHQKKAASHVRHARSRESESFYKTGSSRAAKFSDTIQKEVTTTGQARFAHGMFTVYPGFGSIPSGGQQVINVDCVADAMGKCEEFIAIDISGRDPAVHPAGILYTLLAEACLPAFVTENNALIFEEHQICTSANLHHILQTIESGGLFVEDENKFIFCNVLVGRQAKARFKISNVGKITCDVNIVVRPISNKPFARIVDIFEVEPSKMCIASHSHAFATVSFTPQIMQNYQCIFEATLDGLPSTLAKSRGLVFDIAGEGNLPRVTVVRPVLHNQYGNPLLLFKRLLLGHSEKLPLILKNNGVLPAQLHVDLQDELGVFSLKGRPTTAYIYITEENKPHVKAKKAHTASLVVSPGDTAEFDVVFHSQKVGRMRGIIHLSVINNQYEETSIHMVGEGYEDDITLDNIHGLVAPTSQEDISISEFTEIIEDNDMEDLVAAALVDHIQFGDCHIGHSYNASFTVTNHSQVNLIRFEWPVSATIAFSPQMGHLHPGCAKDIVVTMKSDVPINLKNMRIRCKLSRIMFQLPADQVPDWDDRMHTVKWVDVPRNMPGTFTTKRKVIETDPEPAHSVLEENYQELQLQISANVDFASYHCQARDVRFKETLVYQTRVFEFDVINSGRVQLEFSWVSEDTSKAVSFAKPDHQGSAQKDQLSQGTMHTGSTLDSTMDHWAEGSPQPFSVEPSSGIVPVGKIQKFKVKFSPLDIGDFESNLFCQIPNLPPGEQGPVLVAKGRSTLPICHFDLKDSDYISGHQRNPELRGSSGGALDPNTRVIEFTTVGIGGKNLRTFTILNPTNSTYSFCWISEEIESLQNPAAFTCLTEKGFIHPEKKAEIVFQFTPFHLGITESSWTFLIPEHNITVPFLLVGKTTEPLISLNKSHLNFSSLLIGREARETVQIINKEEQGFDFSFQDNSRYSEGFSNSLLVCPMEGWIPPLSRFPIDIFFTPKQEGDVNFNLICNVEKKVHPVTLNVKAEGYTMNVEIKCKDRTGSITLLTPNQTNIINFYEVELNECVQCEFNFINTGKFTFSFQAQLCGSKTLLQYLEFSPIDSTVDVGQSVHATLSFQPLKKCVLTDLELIIKISHGPTFMCNISGCAVSPAIHFSFTSYNFGTCFIYQAGMPPYKQTLVITNKEETPMSIDCLYTNTTHLEVNSRVDVVKPGNTLEIPITFYPRESINYQELIPFEINGLSQQTVEIKGKGTKMKILVLDPANRIVKLGAVLPGQVVKRTVSIMNNSLAQLTFNQSILFTIPELQEPKVLTLAPFHNITLKPKEVCKLEVIFAPKKRVPPFSEEVFMECMGLLRPLFLLSGCCQALEISLDQEHIPFGPVVYQTQATRRILMMNTGDVGARFKWDIKKFEPHFSISPEEGYITSGMEVSFEVTYHPTEVGKESLCKNILCYIQGGSPLSLTLSGVCVGPPAVKEVVNFTCQVRSKHTQTILLSNRTNQTWNLHPIFEGEHWEGPEFITLEAHQQNKPYEITYRPRTMNLENRKHQGTLFFPLPDGTGWLYALHGTSELPKAVANIYREVPCKTPYTELLPITNWLNKPQRFRVIVEILKPEKPDLSITMKGLDYIDVLSGSKKDYKLNFFSHKEGTYAAKVIFRNEVTNEFLYYNVSFRVIPSGIIKTIEMVTPVRQVASASIKLENPLPYSVTFSTECRMPDIALPSQFVVPANSEGTFSFEFQPLKAGETFGRLTLHNTDLGYYQYELYLKATPALPEKPVHFQTVLGSSQIILVKFINYTRQRTEYYCRTDCTDFHAEKLINAAPGGQGGTEASVEVLFEPSHLGETKGILILSSLAGGEYIIPLFGMALPPKPQGPFSIRAGYSIIIPFKNVFYHMVTFSIIVDNPAFTIRAGESVRPKKINNITVSFEGNPSGSKTPITTKLTVSCPPGEGSETGVKWVYYLKGITL

SEQ ID NO: 49493 - protein, 950 aa, Homo sapiens
MESAGGFKLGMEPLSGGGVCEKKKLLKMTSRRLEESMGAVQMGLVNMFKGFQSKVLPPLSPKVVTEEEVNRMLTPSEFLKEMSLTTEQRLAKTRLMCRPQIIELLDMGETTHQKFSGIDLDQALFQPFPSEIIFQNYTPCEVYEVPLILRNNDKIPRLVKVVEESSPYFKVISPKDIGHKVAPGVPSIFRILFTPEENKDYAHTLTCVTEREKFIVPIKARGARAILDFPDKLNFSTCPVKYSTQKILLVRNIGNKNAVFHIKTCRPFSIEPAIGTLNVGESMQLEVEFEPQSVGDHSGRLIVCYDTGEKVFVSLYGAAIDMNIRLDKNSLTIEKTYISLANQRTITIHNRSNIIAHFLWKVFATQQEEDREKYRACDDLIKEEKDETDEFFEECITDPLLREHLSVLSRTFANQRRLVQGDSKLFFNNVFTVEPLEGDVWPNSSAEITVYFNPLEAKLYQQTIYCDILGREIRLPLRIKGEGMGPKIHFNFELLDIGKVFTGSAHCYEAILYNKGSIDALFNMTPPTSALGACFVFSPKEGIIEPSGVQAIQISFSSTILGNFEEEFLVNVNGSPEPVKLTIRGCVIGPTFHFNVPALHFGDVSFGFPHTLICSLNNTSLIPMTYKLRIPGDGLGHKSISYCEQHVDYKRPSWTKEEISSMKPKEFTISPDCGTIRPQGFAAIRVTLCSNTVQKYELALVVDVEGIGEEVLALLITARCVVPALHLVNTEVDFGHCFLKYPYEKTLQLANQDDLPGFYEVQPQVCEEVPTVLFSSPTPSGVISPSSTIHIPLVLETQVTGEHRSTVYISIFGSQDPPLVCHLKSAGEGPVIYVHPNQVDFGNIYVLKDSSRILNLCNQSFIPAFFQAHMAHKKSLWTIEPNEGMVPPETDVQLALTANLNDTLTFKDCVILDIENSSTYRIPVQASGTGSTIVSDKPFAPELNLGAHFR

SEQ ID NO: 49494 - protein, 940 aa, Homo sapiens
MESAGGFKLGEKKKLLKMTSRRLEESMGAVQMGLVNMFKGFQSKVLPPLSPKVVTEEEVNRMLTPSEFLKEMSLTTEQRLAKTRLMCRPQIIELLDMGETTHQKFSGIDLDQALFQPFPSEIIFQNYTPCEVYEVPLILRNNDKIPRLVKVVEESSPYFKVISPKDIGHKVAPGVPSIFRILFTPEENKDYAHTLTCVTEREKFIVPIKARGARAILDFPDKLNFSTCPVKYSTQKILLVRNIGNKNAVFHIKTCRPFSIEPAIGTLNVGESMQLEVEFEPQSVGDHSGRLIVCYDTGEKVFVSLYGAAIDMNIRLDKNSLTIEKTYISLANQRTITIHNRSNIIAHFLWKVFATQQEEDREKYRACDDLIKEEKDETDEFFEECITDPLLREHLSVLSRTFANQRRLVQGDSKLFFNNVFTVEPLEGDVWPNSSAEITVYFNPLEAKLYQQTIYCDILGREIRLPLRIKGEGMGPKIHFNFELLDIGKVFTGSAHCYEAILYNKGSIDALFNMTPPTSALGACFVFSPKEGIIEPSGVQAIQISFSSTILGNFEEEFLVNVNGSPEPVKLTIRGCVIGPTFHFNVPALHFGDVSFGFPHTLICSLNNTSLIPMTYKLRIPGDGLGHKSISYCEQHVDYKRPSWTKEEISSMKPKEFTISPDCGTIRPQGFAAIRVTLCSNTVQKYELALVVDVEGIGEEVLALLITARCVVPALHLVNTEVDFGHCFLKYPYEKTLQLANQDDLPGFYEVQPQVCEEVPTVLFSSPTPSGVISPSSTIHIPLVLETQVTGEHRSTVYISIFGSQDPPLVCHLKSAGEGPVIYVHPNQVDFGNIYVLKDSSRILNLCNQSFIPAFFQAHMAHKKSLWTIEPNEGMVPPETDVQLALTANLNDTLTFKDCVILDIENSSTYRIPVQASGTGSTIVSDKPFAPELNLGAHFR

SEQ ID NO: 49495 - protein, 5120 aa, Homo sapiens
MTSRRLEESMGAVQMGLVNMFKGFQSKVLPPLSPKVVTEEEVNRMLTPSEFLKEMSLTTEQRLAKTRLMCRPQIIELLDMGETTHQKFSGIDLDQALFQPFPSEIIFQNYTPCEVYEVPLILRNNDKIPRLVKVVEESSPYFKVISPKDIGHKVAPGVPSIFRILFTPEENKDYAHTLTCVTEREKFIVPIKARGARAILDFPDKLNFSTCPVKYSTQKILLVRNIGNKNAVFHIKTCRPFSIEPAIGTLNVGESMQLEVEFEPQSVGDHSGRLIVCYDTGEKVFVSLYGAAIDMNIRLDKNSLTIEKTYISLANQRTITIHNRSNIIAHFLWKVFATQQEEDREKYRACDDLIKEEKDETDEFFEECITDPLLREHLSVLSRTFANQRRLVQGDSKLFFNNVFTVEPLEGDVWPNSSAEITVYFNPLEAKLYQQTIYCDILGREIRLPLRIKGEGMGPKIHFNFELLDIGKVFTGSAHCYEAILYNKGSIDALFNMTPPTSALGACFVFSPKEGIIEPSGVQAIQISFSSTILGNFEEEFLVNVNGSPEPVKLTIRGCVIGPTFHFNVPALHFGDVSFGFPHTLICSLNNTSLIPMTYKLRIPGDGLGHKSISYCEQHVDYKRPSWTKEEISSMKPKEFTISPDCGTIRPQGFAAIRVTLCSNTVQKYELALVVDVEGIGEEVLALLITARCVVPALHLVNTEVDFGHCFLKYPYEKTLQLANQDDLPGFYEVQPQVCEEVPTVLFSSPTPSGVISPSSTIHIPLVLETQVTGEHRSTVYISIFGSQDPPLVCHLKSAGEGPVIYVHPNQVDFGNIYVLKDSSRILNLCNQSFIPAFFQAHMAHKKSLWTIEPNEGMVPPETDVQLALTANLNDTLTFKDCVILDIENSSTYRIPVQASGTGSTIVSDKPFAPELNLGAHFSLDTHYYHFKLINKGRRIQQLFWMNDSFRPQAKLSKKGRVKKGHAHVQPQPSGSQEPRDPQSPVFHLHPASMELYPGQAIDVILEGYSATPRIVKEKLVCHAIIGAQKGKSLVMAVNITCEFVAPLIQLSTKQLIYRLEKKPNSILKPDYQPLAIKNISTLPVNLLLSTSGPFFICETDKSLLPATPEPIKLEIDEEKNLLIKFDPSYRNDLNNWVAEEILAIKYVEHPQIDSLDLRGEVHYPNLSFETKELDFGCILNDTELIRYVTITNCSPLVVKFRWFFLVNDEENQIRFVTLPKKPYSAPVSQMESIPATSEAASPPAILVTVESPEMDLNDFVKTVLVDEDARPEEKELRKTKASSVISDVRCPFHGEERIYSSQSQVEDQESLQTCEQNEMLSIGIEEVFDILPLFGVLQPHSSHQISFTFYGHANIIAQAKALCEVEEGPTYEITLKGEASLVNYSFDTKDIHYGLQLFDHVTEREITLTNMGKVGFEFKVLTDHQSSPDNLLPGVPLILPVSGFISSHQEQVLKVYYLPGVPEVFKRSFQIQIAHLDPENITLSGEGIFPQICLDLPRNLTANEKYEMFLNQARKNTDKEYNKCEMLDHFDIITEEVPEDEPAEVSAHLQMEVERLIVQSYVLEHQKTTTPDPMDDPCFSHRSRRKLAKIQLPEYILDFGYIILGEVRTHIIKIINTSHFPVSFHADKRVLHETGFSTELDRVKNLPHCETEIFEVRFDPQGANLPVGSKEVILPIKVVGGPTVHICLQAKVTIPTMTLSRGKVDFATIQCGQCLVETIQLSNHLQVPCEWFVQSQKPVDKLEKHMPKYLRQKLRAELKPKTRIFEIQPISGVLDPGEKSNVQVKFMPKEEKFYSQTLVFQIAQSAQKLTLLARGQGLEPRLEFSPSVLDLGPLLLCAPGDEAEVIVKNPCNFPIEFYSLEFDQQYLIEEKILRKLKGYDSYNTLLLPPRNPGEKLPPELYEYFKEIKKSKEEQMRAKYLENLAQENEEEDITSSDQGTSNSTKRTSLSRGISVTSNLEEWHALLVESKTYLEEEEDEESLEKIIFQTDKLQSIDSHSMEEVGEVENNPVSKAIARHLGIDISAEGRLAKNRKGIAIIIHGTPLSGKSANAVSVAKYYNAACLSIDSIVLEAVANSNNIPGIRARELCIRAAIEQSVKEGEEAAQEAAVGQNVIGQGRLSTDTLGKLASEMTLVAPEIKPGKSVRGSVVITKSKADSHGSGSQKQHHSHQSETPQISSSPLPPGPIHRWLSVSPSVGGETGLMSCVLPDELLVQILAERIQLSDCYRGVVFDGLDTLFAQNAAAALLCLLKAIGSREHIYILNMAQDYAAMKAQEKAKKEQEERKHKGALEKEKERLQNMDEEEYDALTEEEKLTFDRGIQQALRERKKREQERLAKEMQEKKLQQELERQKEEDELKRRVKKGKQGPIKEEPPMKKSQAANKQVPPLTKVDVKMETIERKISVREQTMSEKEELNKKKRNMGDVSMHGLPLVQDQEDSEGDNSKDPDKQLAPKFKTYELTLKDVQNILMYWDRKQGVQLPPAGMEEAPHEPDDQRQVPLGGRRGRKDRERERLEKERTEKERLEREKAERERLEKLRALEERSDWEGEGEEDHEGKKEKDLGVPFLDIQTPDFEGLSWKQALESDKLPKGEQILDILGLGASGPPIPPPALFSIVSYPVKRPPLTMTDDLEHFVFVIPPSEDISLDEKKEMEIESDFLATTNTTKAQEEQTSSSKGGKQKMKEKIDQVFEIQKDKRHMALNRKVLSGEPAGTISQLSDTDLDNFNGQHSQEKFTRLNHFRWIVPANGEVTLQVHFSSDEFGNFDQTFNFEILGTCCQYQLYCRGICTYPYICQDPKVVFPQRKMDMKTNEVIFKKYVMSTETYYFGPLLCGKSRDKYKSSLFPGNMETLTILNTSLMVVEASFYFQNDVKANTYFLEPNTMVLKPNEKQILNVWAYPTSVGVFEDSIVCCINDNPEPAIFQLSCQGIRPELELEPRQLHFDRLLLHRQESRVVLLRNVTLLPVAWRITSLEHLGDDFTVSLMQGTIPPEAEYGLHLYFQPTKPVNIKKAIRLEVLDAENLLGVVQIENIMVFAEAYDIALDITFPKGAEGGLDFGIVRVTEEAKQPLQLKNRGKYEIAFSFSVDSVGISTPNINSMISVQPKKGSLTPTEKPTNVQVFFHAKKEVKIEHQPVLRCQIIEPNISEGGEIIASIPIKFSANAVYSKYNITPSSVINFGALICGTRKSTTFTIENQGVTDFKFALYKLTGESPIHQKKAASHVRHARSRESESFYKTGSSRAAKFSDTIQKEVTTTGQARFAHGMFTVYPGFGSIPSGGQQVINVDCVADAMGKCEEFIAIDISGRDPAVHPAGILYTLLAEACLPAFVTENNALIFEEHQICTSANLHHILQTIESGGLFVEDENKFIFCNVLVGRQAKARFKISNVGKITCDVNIVVRPISNKPFARIVDIFEVEPSKMCIASHSHAFATVSFTPQIMQNYQCIFEATLDGLPSTLAKSRGLVFDIAGEGNLPRVTVVRPVLHNQYGNPLLLFKRLLLGHSEKLPLILKNNGVLPAQLHVDLQDELGVFSLKGRPTTAYIYITEENKPHVKAKKAHTASLVVSPGDTAEFDVVFHSQKVGRMRGIIHLSVINNQYEETSIHMVGEGYEDDITLDNIHGLVAPTSQEDISISEFTEIIEDNDMEDLVAAALVDHIQFGDCHIGHSYNASFTVTNHSQVNLIRFEWPVSATIAFSPQMGHLHPGCAKDIVVTMKSDVPINLKNMRIRCKLSRIMFQLPADQVPDWDDRMHTVKWVDVPRNMPGTFTTKRKVIETDPEPAHSVLEENYQELQLQISANVDFASYHCQARDVRFKETLVYQTRVFEFDVINSGRVQLEFSWVSEDTSKAVSFAKPDHQGSAQKDQLSQGTMHTGSTLDSTMDHWAEGSPQPFSVEPSSGIVPVGKIQKFKVKFSPLDIGDFESNLFCQIPNLPPGEQGPVLVAKGRSTLPICHFDLKDSDYISGHQRNPELRGSSGGALDPNTRVIEFTTVGIGGKNLRTFTILNPTNSTYSFCWISEEIESLQNPAAFTCLTEKGFIHPEKKAEIVFQFTPFHLGITESSWTFLIPEHNITVPFLLVGKTTEPLISLNKSHLNFSSLLIGREARETVQIINKEEQGFDFSFQDNSRYSEGFSNSLLVCPMEGWIPPLSRFPIDIFFTPKQEGDVNFNLICNVEKKVHPVTLNVKAEGYTMNVEIKCKDRTGSITLLTPNQTNIINFYEVELNECVQCEFNFINTGKFTFSFQAQLCGSKTLLQYLEFSPIDSTVDVGQSVHATLSFQPLKKCVLTDLELIIKISHGPTFMCNISGCAVSPAIHFSFTSYNFGTCFIYQAGMPPYKQTLVITNKEETPMSIDCLYTNTTHLEVNSRVDVVKPGNTLEIPITFYPRESINYQELIPFEINGLSQQTVEIKGKGTKMKILVLDPANRIVKLGAVLPGQVVKRTVSIMNNSLAQLTFNQSILFTIPELQEPKVLTLAPFHNITLKPKEVCKLEVIFAPKKRVPPFSEEVFMECMGLLRPLFLLSGCCQALEISLDQEHIPFGPVVYQTQATRRILMMNTGDVGARFKWDIKKFEPHFSISPEEGYITSGMEVSFEVTYHPTEVGKESLCKNILCYIQGGSPLSLTLSGVCVGPPAVKEVVNFTCQVRSKHTQTILLSNRTNQTWNLHPIFEGEHWEGPEFITLEAHQQNKPYEITYRPRTMNLENRKHQGTLFFPLPDGTGWLYALHGTSELPKAVANIYREVPCKTPYTELLPITNWLNKPQRFRVIVEILKPEKPDLSITMKGLDYIDVLSGSKKDYKLNFFSHKEGTYAAKVIFRNEVTNEFLYYNVSFRVIPSGIIKTIEMVTPVRQVASASIKLENPLPYSVTFSTECRMPDIALPSQFVVPANSEGTFSFEFQPLKAGETFGRLTLHNTDLGYYQYELYLKATPALPEKPVHFQTVLGSSQIILVKFINYTRQRTEYYCRTDCTDFHAEKLINAAPGGQGGTEASVEVLFEPSHLGETKGILILSSLAGGEYIIPLFGMALPPKPQGPFSIRAGYSIIIPFKNVFYHMVTFSIIVDNPAFTIRAGESVRPKKINNITVSFEGNPSGSKTPITTKLTVSCPPGEGSETGVKWVYYLKGITL

SEQ ID NO: 49496 - protein, 1017 aa, Homo sapiens
MTSRRLEESMGAVQMGLVNMFKGFQSKVLPPLSPKVVTEEEVNRMLTPSEFLKEMSLTTEQRLAKTRLMCRPQIIELLDMGETTHQKFSGIDLDQALFQPFPSEIIFQNYTPCEVYEVPLILRNNDKIPRLVKVVEESSPYFKVISPKDIGHKVAPGVPSIFRILFTPEENKDYAHTLTCVTEREKFIVPIKARGARAILDFPDKLNFSTCPVKYSTQKILLVRNIGNKNAVFHIKTCRPFSIEPAIGTLNVGESMQLEVEFEPQSVGDHSGRLIVCYDTGEKVFVSLYGAAIDMNIRLDKNSLTIEKTYISLANQRTITIHNRSNIIAHFLWKVFATQQEEDREKYRACDDLIKEEKDETDEFFEECITDPLLREHLSVLSRTFANQRRLVQGDSKLFFNNVFTVEPLEGDVWPNSSAEITVYFNPLEAKLYQQTIYCDILGREIRLPLRIKGEGMGPKIHFNFELLDIGKVFTGSAHCYEAILYNKGSIDALFNMTPPTSALGACFVFSPKEGIIEPSGVQAIQISFSSTILGNFEEEFLVNVNGSPEPVKLTIRGCVIGPTFHFNVPALHFGDVSFGFPHTLICSLNNTSLIPMTYKLRIPGDGLGHKSISYCEQHVDYKRPSWTKEEISSMKPKEFTISPDCGTIRPQGFAAIRVTLCSNTVQKYELALVVDVEGIGEEVLALLITARCVVPALHLVNTEVDFGHCFLKYPYEKTLQLANQDDLPGFYEVQPQVCEEVPTVLFSSPTPSGVISPSSTIHIPLVLETQVTGEHRSTVYISIFGSQDPPLVCHLKSAGEGPVIYVHPNQVDFGNIYVLKDSSRILNLCNQSFIPAFFQAHMAHKKSLWTIEPNEGMVPPETDVQLALTANLNDTLTFKDCVILDIENSSTYRIPVQASGTGSTIVSDKPFAPELNLGAHFSLDTHYYHFKLINKGRRIQQLFWMNDSFRPQAKLSKKGRVKKGHAHVQPQPSGSQEPRDPQSPVFHLHPASMELYPGQAIDVILEGYSATPRVRG

SEQ ID NO: 49497 - protein, 740 aa, Homo sapiens
MTSRRLEESMGAVQMGLVNMFKGFQSKVLPPLSPKVVTEEEVNRMLTPSEFLKEMSLTTEQRLAKTRLMCRPQIIELLDMGETTHQKFSGIDLDQALFQPFPSEIIFQNYTPCEVYEVPLILRNNDKIPRLVKVVEESSPYFKVISPKDIGHKVAPGVPSIFRILFTPEENKDYAHTLTCVTEREKFIVPIKARGARAILDFPDKLNFSTCPVKYSTQKILLVRNIGNKNAVFHIKTCRPFSIEPAIGTLNVGESMQLEVEFEPQSVGDHSGRLIVCYDTGEKVFVSLYGAAIDMNIRLDKNSLTIEKTYISLANQRTITIHNRSNIIAHFLWKVFATQQEEDREKYRACDDLIKEEKDETDEFFEECITDPLLREHLSVLSRTFANQRRLVQGDSKLFFNNVFTVEPLEGDVWPNSSAEITVYFNPLEAKLYQQTIYCDILGREIRLPLRIKGEGMGPKIHFNFELLDIGKVFTGSAHCYEAILYNKGSIDALFNMTPPTSALGACFVFSPKEGIIEPSGVQAIQISFSSTILGNFEEEFLVNVNGSPEPVKLTIRGCVIGPTFHFNVPALHFGDVSFATQELRDPQVLIPFQRFPHTLICSLNNTSLIPMTYKLRIPGDGLGHKSISYCEQHVDYKRPSWTKEEISSMKPKEFTISPDCGTIRPQGFAAIRVTLCSNTVQKYELALVVDVEGIGEEVLALLITASAPELCNRKVMLSVLQWKIHRAKRSLPRDTVAVT

SEQ ID NO: 49498 - protein, 1214 aa, Homo sapiens
MTSRRLEESMGAVQMGLVNMFKGFQSKVLPPLSPKVVTEEEVNRMLTPSEFLKEMSLTTEQRLAKTRLMCRPQIIELLDMGETTHQKFSGIDLDQALFQPFPSEIIFQNYTPCEVYEVPLILRNNDKIPRLVKVVEESSPYFKVISPKDIGHKVAPGVPSIFRILFTPEENKDYAHTLTCVTEREKFIVPIKARGARAILDFPDKLNFSTCPVKYSTQKILLVRNIGNKNAVFHIKTCRPFSIEPAIGTLNVGESMQLEVEFEPQSVGDHSGRLIVCYDTGEKVFVSLYGAAIDMNIRLDKNSLTIEKTYISLANQRTITIHNRSNIIAHFLWKVFATQQEEDREKYRACDDLIKEEKDETDEFFEECITDPLLREHLSVLSRTFANQRRLVQGDSKLFFNNVFTVEPLEGDVWPNSSAEITVYFNPLEAKLYQQTIYCDILGREIRLPLRIKGEGMGPKIHFNFELLDIGKVFTGSAHCYEAILYNKGSIDALFNMTPPTSALGACFVFSPKEGIIEPSGVQAIQISFSSTILGNFEEEFLVNVNGSPEPVKLTIRGCVIGPTFHFNVPALHFGDVSFGFPHTLICSLNNTSLIPMTYKLRIPGDGLGHKSISYCEQHVDYKRPSWTKEEISSMKPKEFTISPDCGTIRPQGFAAIRVTLCSNTVQKYELALVVDVEGIGEEVLALLITARCVVPALHLVNTEVDFGHCFLKYPYEKTLQLANQDDLPGFYEVQPQVCEEVPTVLFSSPTPSGVISPSSTIHIPLVLETQVTGEHRSTVYISIFGSQDPPLVCHLKSAGEGPVIYVHPNQVDFGNIYVLKDSSRILNLCNQSFIPAFFQAHMAHKKSLWTIEPNEGMVPPETDVQLALTANLNDTLTFKDCVILDIENSSTYRIPVQASGTGSTIVSDKPFAPELNLGAHFSLDTHYYHFKLINKGRRIQQLFWMNDSFRPQAKLSKKGRVKKGHAHVQPQPSGSQEPRDPQSPVFHLHPASMELYPGQAIDVILEGYSATPRKPNSILKPDYQPLAIKNISTLPVNLLLSTSGPFFICETDKSLLPATPEPIKLEIDEEKNLLIKFDPSYRNDLNNWVAEEILAIKYVEHPQIDSLDLRGEVHYPNLSFETKELDFGCILNDTELIRYVTITNCSPLVVKFRWFFLVNDEENQIRFVTLPKKPYSAPVSQMESIPATSEAASPPAILVTVESPEMDLNDFVK

SEQ ID NO: 49499 - protein, 1017 aa, Homo sapiens; identical to SEQ ID NO: 49496

SEQ ID NO: 49500 - protein, 273 aa, Homo sapiens
MATWDEKAVTRRAKVAPAERMSKFLRHFTVVGDDYHAWNINYKKWENEEEEEEEEQPPPTPVSGEEGRAAAPDVAPAPGPAPRAPLDFRGMLRKLFSSHRFQVIIICLVVLDALLVLAELILDLKIIQPDKNNYAAMVFHYMSITILVFFMMEIIFKLFVFRLEFFHHKFEILDAVVVVVSFILDIVLLFQEHQFEALGLLILLRLWRVARIINGIIISVKTRSERQLLRLKQMNVQLAAKIQHLEFSCSEKEQEIERLNKLLRQHGLLGEVN

SEQ ID NO: 49501 - protein, 273 aa, Homo sapiens; identical to SEQ ID NO: 49500

SEQ ID NO: 49502 - protein, 78 aa, Homo sapiens
MATWDEKAVTRRAKVAPAERMSKFLRHFTVVGDDYHAWNINYKKWENEEEEEEEEQPPPTPVSGEEGRAAAPDVAPAP

SEQ ID NO: 49503 - protein, 299 aa, Homo sapiens
MEELLPDGQIWANMDPEERMLAAATAFTHICAGQGEGDVRREAQSIQYDPYSKASVAPGKRPALPVQLQYPHVESNVPSETVSEASQRLRKPVMKRKVLRRKPDGEVLVTDESIISESESGTENDQDLWDLRQRLMNVQFQEDKESSFDVSQKFNLPHEYQGISQDQLICSLQREGMGSPAYEQDLIVASRPKSFILPKLDQLSRNRGKTDRVARYFEYKRDWDSIRLPGEDHRKELRWGVREQMLCRAEPQSKPQHIYVPNNYLVPTEKKRSALRWGVRCDLANGVIPRKLPFPLSPS

SEQ ID NO: 49504 - protein, 299 aa, Homo sapiens; identical to SEQ ID NO: 49503

SEQ ID NO: 49505 - protein, 299 aa, Homo sapiens; identical to SEQ ID NO: 49503

SEQ ID NO: 49506 - protein, 370 aa, Homo sapiens
MLPRLICINDYEQHAKSVLPKSIYDYYRSGANDEETLADNIAAFSRWKLYPRMLRNVAETDLSTSVLGQRVSMPICVGATAMQRMAHVDGELATVRACQSLGTGMMLSSWATSSIEEVAEAGPEALRWLQLYIYKDREVTKKLVRQAEKMGYKAIFVTVDTPYLGNRLDDVRNRFKLPPQLRMKNFETSTLSFSPEENFGDDSGLAAYVAKAIDPSISWEDIKWLRRLTSLPIVAKGILRGDDAREAVKHGLNGILVSNHGARQLDGVPATIDVLPEIVEAVEGKVEVFLDGGVRKGTDVLKALALGAKAVFVGRPIVWGLAFQGEKGVQDVLEILKEEFRLAMALSGCQNVKVIDKTLVRKNPLAVSKI

SEQ ID NO: 49507 - protein, 351 aa, Homo sapiens
MSLVCLTDFQAHAREQLSKSTRDFIEGGADDSITRDDNIAAFKRIRLRPRYLRDVSEVDTRTTIQGEEISAPICIAPTGFHCLVWPDGEMSTARAAQAAGICYITSTFASCSLEDIVIAAPEGLRWFQLYVHPDLQLNKQLIQRVESLGFKALVITLDTPVCGNRRHDIRNQLRRNLTLTDLQSPKKGNAIPYFQMTPISTSLCWNDLSWFQSITRLPIILKGILTKEDAELAVKHNVQGIIVSNHGGRQLDEVLASIDALTEVVAAVKGKIEVYLDGGVRTGNDVLKALALGAKCIFLGRPILWGLACKGEHGVKEVLNILTNEFHTSMALTGCRSVAEINRNLVQFSRL

SEQ ID NO: 49508 - protein, 364 aa, Homo sapiens
MEDKMWSECEGPEMSLVCLTDFQAHAREQLSKSTRDFIEGGADDSITRDDNIAAFKRIRLRPRYLRDVSEVDTRTTIQGEEISAPICIAPTGFHCLVWPDGEMSTARAAQAAGICYITSTFASCSLEDIVIAAPEGLRWFQLYVHPDLQLNKQLIQRVESLGFKALVITLDTPVCGNRRHDIRNQLRRNLTLTDLQSPKKGNAIPYFQMTPISTSLCWNDLSWFQSITRLPIILKGILTKEDAELAVKHNVQGIIVSNHGGRQLDEVLASIDALTEVVAAVKGKIEVYLDGGVRTGNDVLKALALGAKCIFLGRPILWGLACKGEHGVKEVLNILTNEFHTSMALTGCRSVAEINRNLVQFSRL

SEQ ID NO: 49509 - protein, 186 aa, Homo sapiens
MSLVCLTDFQAHAREQLSKSTRDFIEGGADDSITRDDNIAAFKRIRLRPRYLRDVSEVDTRTTIQGEEISAPICIAPTGFHCLVWPDGEMSTARAPEGLRWFQLYVHPDLQLNKQLIQRVESLGFKALVITLDTPVCGNRRHDIRNQLRRNLTLTDLQSPKKGNAIPYFQMTPISTSLCWNDLSWF

SEQ ID NO: 49510 - protein, 763 aa, Homo sapiens
MVACRAIGILSRFSAFRILRSRGYICRNFTGSSALLTRTHINYGVKGDVAVVRINSPNSKVNTLSKELHSEFSEVMNEIWASDQIRSAVLISSKPGCFIAGADINMLAACKTLQEVTQLSQEAQRIVEKLEKSTKPIVAAINGSCLGGGLEVAISCQYRIATKDRKTVLGTPEVLLGALPGAGGTQRLPKMVGVPAALDMMLTGRSIRADRAKKMGLVDQLVEPLGPGLKPPEERTIEYLEEVAITFAKGLADKKISPKRDKGLVEKLTAYAMTIPFVRQQVYKKVEEKVRKQTKGLYPAPLKIIDVVKTGIEQGSDAGYLCESQKFGELVMTKESKALMGLYHGQVLCKKNKFGAPQKDVKHLAILGAGLMGAGIAQVSVDKGLKTILKDATLTALDRGQQQVFKGLNDKVKKKALTSFERDSIFSNLTGQLDYQGFEKADMVIEAVFEDLSLKHRVLKEVEAVIPDHCIFASNTSALPISEIAAVSKRPEKVIGMHYFSPVDKMQLLEIITTEKTSKDTSASAVAVGLKQGKVIIVVKDGPGFYTTRCLAPMMSEVIRILQEGVDPKKLDSLTTSFGFPVGAATLVDEVGVDVAKHVAEDLGKVFGERFGGGNPELLTQMVSKGFLGRKSGKGFYIYQEGVKRKDLNSDMDSILASLKLPPKSEVSSDEDIQFRLVTRFVNEAVMCLQEGILATPAEGDIGAVFGLGFPPCLGGPFRFVDLYGAQKIVDRLKKYEAAYGKQFTPCQLLADHANSPNKKFYQ

SEQ ID NO: 49511 - protein, 260 aa, Homo sapiens
MESKGMWQLFELTLPIQSMLAACKTLQEVTQLSQEAQRIVEKLEKSTKPIVAAINGSCLGGGLEVAISCQYRIATKDRKTVLGTPEVLLGALPGAGGTQRLPKMVGVPAALDMMLTGRSIRADRAKKMGLVDQLVEPLGPGLKPPEERTIEYLEEVAITFAKGLADKKISPKRDKGLVEKLTAYAMTIPFVRQQVYKKVEEKVRKQTKGLYPAPLKIIDVVKTGIEQGSDAGYLCESQVNLFPFNVLLSVKGKLKIQSSV

SEQ ID NO: 49512 - protein, 474 aa, Homo sapiens
MTILTYPFKNLPTASKWALRFSIRPLSCSSQLRAAPAVQTKTKKTLAKPNIRNVVVVDGVRTPFLLSGTSYKDLMPHDLARAALTGLLHRTSVPKEVVDYIIFGTVIQEVKTSNVAREAALGAGFSDKTPAHTVTMACISANQAMTTGVGLIASGQCDVIVAGGVELMSDVPIRHSRKMRKLMLDLNKAKSMGQRLSLISKFRFNFLAPELPAVSEFSTSETMGHSADRLAAAFAVSRLEQDEYALRSHSLAKKAQDEGLLSDVVPFKVPGKDTVTKDNGIRPSSLEQMAKLKPAFIKPYGTVTAANSSFLTDGASAMLIMAEEKALAMGYKPKAYLRDFMYVSQDPKDQLLLGPTYATPKVLEKAGLTMNDIDAFEFHEAFSGQILANFKAMDSDWFAENYMGRKTKVGLPPLEKFNNWGGSLSLGHPFGATGCRLVMAAANRLRKEGGQYGLVAACAAGGQGHAMIVEAYPK

SEQ ID NO: 49513 - protein, 85 aa, Homo sapiens
MTILTYPFKNLPTASKWALRFSIRPLSCSSQLRAAPAVQTKTKKTLAKPNIRNVVVVDGVRTPFLLSGTSYKDLMPHDLARAALT

SEQ ID NO: 49514 - protein, 176 aa, Homo sapiens
MTILTYPFKNLPTASKWALRFSIRPLSCSSQLRAAPAVQTKTKKTLAKPNIRNVVVVDGVRTPFLLSGTSYKDLMPHDLARAALTGLLHRTSVPKEVVDYIIFGTVIQEVKTSNVAREAALGAGFSDKTPAHTVTMACISANQAMTTGVGLIASGQCDVIVAGGVELMSDVPIRHS

SEQ ID NO: 49515 - protein, 150 aa, Homo sapiens
MTILTYPFKNLPTASKWALRFSIRPLSCSSQLRAAPAVQTKTKKTLAKPNIRNVVVVDGVRTPFLLSGTSYKDLMPHDLARAALTGLLHRTSVPKEVVDYIIFGTVIQEVKTSNVAREAALGAGFSDKTPAHTVTMACISANQAMTTGVG

SEQ ID NO: 49516 - protein, 459 aa, Homo sapiens
MTILTYPFKNLPTASKWALRFSIRPLSCSSQLRAAPAVQTKTKKTLAKPNIRNVVVVDGVRTPFLLSGTSGLLHRTSVPKEVVDYIIFGTVIQEVKTSNVAREAALGAGFSDKTPAHTVTMACISANQAMTTGVGLIASGQCDVIVAGGVELMSDVPIRHSRKMRKLMLDLNKAKSMGQRLSLISKFRFNFLAPELPAVSEFSTSETMGHSADRLAAAFAVSRLEQDEYALRSHSLAKKAQDEGLLSDVVPFKVPGKDTVTKDNGIRPSSLEQMAKLKPAFIKPYGTVTAANSSFLTDGASAMLIMAEEKALAMGYKPKAYLRDFMYVSQDPKDQLLLGPTYATPKVLEKAGLTMNDIDAFEFHEAFSGQILANFKAMDSDWFAENYMGRKTKVGLPPLEKFNNWGGSLSLGHPFGATGCRLVMAAANRLRKEGGQYGLVAACAAGGQGHAMIVEAYPK

SEQ ID NO: 49517 - protein, 452 aa, Homo sapiens
MTLVSGWLLYGWIIAVQTKTKKTLAKPNIRNVVVVDGVRTPFLLSGTSYKDLMPHDLARAALTGLLHRTSVPKEVVDYIIFGTVIQEVKTSNVAREAALGAGFSDKTPAHTVTMACISANQAMTTGVGLIASGQCDVIVAGGVELMSDVPIRHSRKMRKLMLDLNKAKSMGQRLSLISKFRFNFLAPELPAVSEFSTSETMGHSADRLAAAFAVSRLEQDEYALRSHSLAKKAQDEGLLSDVVPFKVPGKDTVTKDNGIRPSSLEQMAKLKPAFIKPYGTVTAANSSFLTDGASAMLIMAEEKALAMGYKPKAYLRDFMYVSQDPKDQLLLGPTYATPKVLEKAGLTMNDIDAFEFHEAFSGQILANFKAMDSDWFAENYMGRKTKVGLPPLEKFNNWGGSLSLGHPFGATGCRLVMAAANRLRKEGGQYGLVAACAAGGQGHAMIVEAYPK

SEQ ID NO: 49518 - protein, 260 aa, Homo sapiens [sequence omitted]

SEQ ID NO: 49519 - protein, 308 aa, Homo sapiens
MVVGRGLLGRRSLAALGAACARRGLGPALLGVFCHTDLRKNLTVDEGTMKVEVLPALTDNYMYLVIDDETKEAAIVDPVQPQKVVDAARKHGVKLTTVLTTHHHWDHAGGNEKLVKLESGLKVYGGDDRIGALTHKITHLSTLQVGSLNVKCLATPCHTSGHICYFVSKPGGSEPPAVFTGDTLFVAGCGKFYEGTADEMCKALLEVLGRLPPDTRVYCGHEYTINNLKFARHVEPGNAAIREKLAWAKEKYSIGEPTVPSTLAEEFTYNPFMRVREKTVQQHAGETDPVTTMRAVRREKDQFKMPRD

SEQ ID NO: 49520 - protein, 236 aa, Homo sapiens
MVVGRGLLGRRSLAALGAACARRGLGPALLGVFCHTDLRKNLTVDEGTMKVEVLPALTDNYMYLVIDDETKEAAIVDPVQPQKVVDAARKHGVKLTTVLTTHHHWDHAGGNEKLVKLESGLKVYGGDDRIGALTHKITHLSTLQVTPCLWLAAGSSMKGLRMRCVKLCWRSWAGSPRTQESTVATSTPSTTSSLHATWSPAMPPSGRSWPGPRRSTASGSPQCHPPWQRSLPTTPS

SEQ ID NO: 49521 - protein, 375 aa, Homo sapiens
MAMTGWSCLVTGAGGFLGQRIIRLLVKEKELKEIRVLDKAFGPELREEFSKLQNKTKLTVLEGDILDEPFLKRACQDVSVIIHTACIIDVFGVTHRESIMNVNVKGTQLLLEACVQASVPVFIYTSSIEVAGPNSYKEIIQNGHEEEPLENTWPAPYPHSKKLAEKAVLAANGWNLKNGGTLYTCALRPMYIYGEGSRFLSASINEALNNNGILSSVGKFSTVNPVYVGNVAWAHILALRALQDPKKAPSIRGQFYYISDDTPHQSYDNLNYTLSKEFGLRLDSRWSFPLSLMYWIGFLLEIVSFLLRPIYTYRPPFNRHIVTLSNSVFTFSYKKAQRDLAYKPLYSWEEAKQKTVEWVGSLVDRHKETLKSKTQ

SEQ ID NO: 49522 - protein, 373 aa, Homo sapiens
MTGWSCLVTGAGGFLGQRIIRLLVKEKELKEIRVLDKAFGPELREEFSKLQNKTKLTVLEGDILDEPFLKRACQDVSVIIHTACIIDVFGVTHRESIMNVNVKGTQLLLEACVQASVPVFIYTSSIEVAGPNSYKEIIQNGHEEEPLENTWPAPYPHSKKLAEKAVLAANGWNLKNGGTLYTCALRPMYIYGEGSRFLSASINEALNNNGILSSVGKFSTVNPVYVGNVAWAHILALRALQDPKKAPSIRGQFYYISDDTPHQSYDNLNYTLSKEFGLRLDSRWSFPLSLMYWIGFLLEIVSFLLRPIYTYRPPFNRHIVTLSNSVFTFSYKKAQRDLAYKPLYSWEEAKQKTVEWVGSLVDRHKETLKSKTQ

SEQ ID NO: 49523 - protein, 373 aa, Homo sapiens; identical to SEQ ID NO: 49522

SEQ ID NO: 49524 - protein, 82 aa, Homo sapiens
MTGWSCLVTGAGGFLGQRIIRLLVKEKELKEIRVLDKAFGPELREEFSKLQNKTKLTVLEGDILDEPFLKRACQDVSVIIHT

SEQ ID NO: 49525 - protein, 372 aa, Homo sapiens
MGWSCLVTGAGGLLGQRIVRLLVEEKELKEIRALDKAFRPELREEFSKLQNRTKLTVLEGDILDEPFLKRACQDVSVVIHTACIIDVFGVTHRESIMNVNVKGTQLLLEACVQASVPVFIYTSSIEVAGPNSYKEIIQNGHEEEPLENTWPTPYPYSKKLAEKAVLAANGWNLKNGDTLYTCALRPTYIYGEGGPFLSASINEALNNNGILSSVGKFSTVNPVYVGNVAWAHILALRALRDPKKAPSVRGQFYYISDDTPHQSYDNLNYILSKEFGLRLDSRWSLPLTLMYWIGFLLEVVSFLLSPIYSYQPPFNRHTVTLSNSVFTFSYKKAQRDLAYKPLYSWEEAKQKTVEWVGSLVDRHKETLKSKTQ

SEQ ID NO: 49526 - protein, 195 aa, Homo sapiens
MGWSCLVTGAGGLLGQRIVRLLVEEKELKEIRALDKAFRPELREEFSKLQNRTKLTVLEGDILDEPFLKRACQDVSVVIHTACIIDVFGVTHRESIMNVNVKGTQLLLEACVQASVPVFIYTSSIEVAGPNSYKEIIQNGHEEEPLENTWPTPYPYSKKLAEKAVLAANGWNLKNGDTLYTCALRPTYIYGEGGP

SEQ ID NO: 49527 - protein, 372 aa, Homo sapiens; identical to SEQ ID NO: 49525

SEQ ID NO: 49528 - protein, 196 aa, Homo sapiens
MADSAQAQKLVYLVTGGCGFLGEHVVRMLLQREPRLGELRVFDQHLGPWLEELKTGPVRVTAIQGDVTQAHEVAAAVAGAHVVIHTAGLVDVFGRASPKTIHEVNVQGTRNVIEACVQTGTRFLVYTSSMEVVGPNTKGHPFYRGNEDTPYEAVHRHPYPCSKALAEWLVLEANGRKAMLPGCTCWQPGSWSSGQP

SEQ ID NO: 49529 - protein, 369 aa, Homo sapiens
MADSAQAQKLVYLVTGGCGFLGEHVVRMLLQREPRLGELRVFDQHLGPWLEELKTGPVRVTAIQGDVTQAHEVAAAVAGAHVVIHTAGLVDVFGRASPKTIHEVNVQGTRNVIEACVQTGTRFLVYTSSMEVVGPNTKGHPFYRGNEDTPYEAVHRHPYPCSKALAEWLVLEANGRKVRGGLPLVTCALRPTGIYGEGHQIMRDFYRQGLRLGGWLFRAIPASVEHGRVYVGNVAWMHVLAARELEQRATLMGGQVYFCYDGSPYRSYEDFNMEFLGPCGLRLVGARPLLPYWLLVFLAALNALLQWLLRPLVLYAPLLNPYTLAVANTTFTVSTDKAQRHFGYEPLFSWEDSRTRTILWVQAATGSAQ

SEQ ID NO: 49530 - protein, 196 aa, Homo sapiens; identical to SEQ ID NO: 49528

SEQ ID NO: 49531 - protein, 361 aa, Homo sapiens [sequence omitted]

SEQ ID NO: 49532 - protein, 344 aa, Homo sapiens
MRVIRVGTRKSQLARIQTDSVVATLKASYPGLQFEIIAMSTTGDKILDTALSKIGEKSLFTKELEHALEKNEVDLVVHSLKDLPTVLPPGFTIGAICKRENPHDAVVFHPKFVGKTLETLPEKSVVGTSSLRRAAQLQRKFPHLEFRSIRGNLNTRLRKLDEQQEFSAIILATAGLQRMGWHNRVGQILHPEECMYAVGQGALGVEVRAKDQDILDLVGVLHDPETLLRCIAERAFLRHLEGGCSVPVAVHTAMKDGQLYLTGGVWSLDGSDSIQETMQATIHVPAQHEDGPEDDPQLVGITARNIPRGPQLAAQNLGISLANLLLSKGAKNILDVARQLNDAH

SEQ ID NO: 49533 - protein, 344 aa, Homo sapiens; identical to SEQ ID NO: 49532

SEQ ID NO: 49534 - protein, 187 aa, Homo sapiens
MRVIRVGTRKSQLARIQTDSVVATLKASYPGLQFEIIAMSTTGDKILDTALSKIGEKSLFTKELEHALEKNEVDLVVHSLKDLPTVLPPGFTIGAICKRENPHDAVVFHPKFVGKTLETLPEKSVVGTSSLRRAAQLQRKFPHLEFRSIRGNLNTRLRKLDEQQEFSAIILATAGLQRMGWHNRVGQ

SEQ ID NO: 49535 - protein, 344 aa, Homo sapiens; identical to SEQ ID NO: 49532

SEQ ID NO: 49536 - protein, 187 aa, Homo sapiens; identical to SEQ ID NO: 49534

SEQ ID NO: 49537 - protein, 304 aa, Homo sapiens
MRVIRVGTRKSQLARIQTDSVVATLKASYPGLQFEIIAMSTTGDKILDTALSKIGEKSLFTKELEHALEKNEVDLVVHSLKDLPTVLPPGFTIGAICKRENPHDAVVFHPKFVGKTLETLPEKSVVGTSSLRRAAQLQRKFPHLEFRSIRGNLNTRLRKLDEQQEFSAIILATAGLQRMGWHNRVGQILHPEECMYAVGQEGGCSVPVAVHTAMKDGQLYLTGGVWSLDGSDSIQETMQATIHVPAQHEDGPEDDPQLVGITARNIPRGPQLAAQNLGISLANLLLSKGAKNILDVARQLNDAH

SEQ ID NO: 49538 - protein, 321 aa, Homo sapiens
MSGNGNAAATAEENSPKMRVIRVGTRKSQLARIQTDSVVATLKASYPGLQFEIIAMSTTGDKILDTALSKIGEKSLFTKELEHALEKNEVDLVVHSLKDLPTVLPPGFTIGAICKRENPHDAVVFHPKFVGKTLETLPEKSVVGTSSLRRAAQLQRKFPHLEFRSIRGNLNTRLRKLDEQQEFSAIILATAGLQRMGWHNRVGQILHPEECMYAVGQEGGCSVPVAVHTAMKDGQLYLTGGVWSLDGSDSIQETMQATIHVPAQHEDGPEDDPQLVGITARNIPRGPQLAAQNLGISLANLLLSKGAKNILDVARQLNDAH

SEQ ID NO: 49539 - protein, 292 aa, Homo sapiens
MAFMKKYLLPILGLFMAYYYYSANEEFRPEMLQGKKVIVTGASKGIGREMAYHLAKMGAHVVVTARSKETLQKVVSHCLELGAASAHYIAGTMEDMTFAEQFVAQAGKLMGGLDMLILNHITNTSLNLFHDDIHHVRKSMEVNFLSYVVLTVAALPMLKQSNGSIVVVSSLAGKVAYPMVAAYSASKFALDGFFSSIRKEYSVSRVNVSITLCVLGLIDTETAMKAVSGIVHMQAAPKEECALEIIKGGALRQEEVYYDSSLWTTLLIRNPCRKILEFLYSTSYNMDRFINK

SEQ ID NO: 49540 - protein, 292 aa, Homo sapiens; identical to SEQ ID NO: 49539

SEQ ID NO: 49541 - protein, 292 aa, Homo sapiens; identical to SEQ ID NO: 49539

SEQ ID NO: 49542 - protein, 405 aa, Homo sapiens
MERWPWPSGGAWLLVAARALLQLLRSDLRLGRPLLAALALLAALDWLCQRLLPPPAALAVLAAAGWIALSRLARPQRLPVATRAVLITGCDSGFGKETAKKLDSMGFTVLATVLELNSPGAIELRTCCSPRLRLLQMDLTKPGDISRVLEFTKAHTTSTGLWGLVNNAGHNEVVADAELSPVATFRSCMEVNFFGALELTKGLLPLLRSSRGRIVTVGSPAGDMPYPCLGAYGTSKAAVALLMDTFSCELLPWGVKVSIIQPGCFKTESVRNVGQWEKRKQLLLANLPQELLQAYGKDYIEHLHGQFLHSLRLAMSDLTPVVDAITDALLAARPRRRYYPGQGLGLMYFIHYYLPEGLRRRFLQAFFISHCLPRALQPGQPGTTPPQDAAQDPNLSPGPSPAVAR

SEQ ID NO: 49543 - protein, 149 aa, Homo sapiens
MARTVVLITGCSSGIGLHLAVRLASDPSQSFKVYATLRDLKTQGRLWEAARALACPPGSLETLQLDVRDSKSVAAARERVTEGRVDVLVCNAGLGLLGPLEALGEDAVASVLDVNVVGTVRMLQAFLPDMKRRGSGRVLVTGSVGGLMA

SEQ ID NO: 49544 - protein, 328 aa, Homo sapiens
MARTVVLITGCSSGIGLHLAVRLASDPSQSFKVYATLRDLKTQGRLWEAARALACPPGSLETLQLDVRDSKSVAAARERVTEGRVDVLVCNAGLGLLGPLEALGEDAVASVLDVNVVGTVRMLQAFLPDMKRRGSGRVLVTGSVGGLMGLPFNDVYCASKFALEGLCESLAVLLLPFGVHLSLIECGPVHTAFMEKVLGSPEEVLDRTDIHTFHRFYQYLAHSKQVFREAAQNPEEVAEVFLTALRAPKPTLRYFTTERFLPLLRMRLDDPSGSNYVTAMHREVFGDVPAKAEAGAEAGGGAGPGAEDEAGRGAVGDPELGDPPAAPQ

SEQ ID NO: 49545 - protein, 328 aa, Homo sapiens; identical to SEQ ID NO: 49544

SEQ ID NO: 49546 - protein, 148 aa, Homo sapiens
MACTVVLITGCSSGIGLHLAIHLALDPSQSFKVYATLRDLKTQGRLWEAARALACPQGSLERLQLDVRNSSSLAAARERVTEGRVDVLVCDTGLGLLGPLGEDAVASVLDVNVVGTVRVLQDFLPDMKRPGSGRVLVTGSMGGLMGEW

SEQ ID NO: 49547 - protein, 261 aa, Homo sapiens
MAAACRSVKGLVAVITGGASGLGLATAERLVGQGASAVLLDLPNSGGEAQAKKLGNNCVFAPADVTSEKDVQTALALAKGKFGRVDVAVNCAGIAVASKTYNLKKGQTHTLEDFQRVLDVNLMGTFNVIRLVAGEMGQNEPDQGGQRGVIINTASVAAFEGQVGQAAYSASKGGIVGMTLPIARDLAPIGIRVMTIAPGLFGTPLLTSLPEKVCNFLASQVPFPSRLGDPAEYAHLVQAIIENPFLNGEVIRLDGAIRMQP

SEQ ID NO: 49548 - protein, 169 aa, Homo sapiens
MAAACRSVKGLVAVITGGASGLGLATAERLVGQGASAVLLDLPNSGGEAQAKKLGNNCVFAPADVTSEKDVQTALALAKGKFGRVDVAVNCAGIAVASKTYNLKKGQTHTLEDFQRVLDVNLMGTFNVIRLVAGEMGQNEPDQGGQRGVIINTASVAAFEGQVCLAPHC

SEQ ID NO: 49549 - protein, 252 aa, Homo sapiens
MAAACRSVKGLVAVITGGASGLGLATAERLVGQGASAVLLDLPNSGGEAQAKKLGNNCVFAPADVTSEKDVQTALALAKGKFGRVDVAVNCAGIAVASKTYNLKKGQTHTLEDFQRVLDVNLMGTFNVIRLVAGEMGQNEPDQGGQRGVIINTASVAAFEGQVGQAAYSASKGGIVGMTLPIARDLAPIGLFGTPLLTSLPEKVCNFLASQVPFPSRLGDPAEYAHLVQAIIENPFLNGEVIRLDGAIRMQP

SEQ ID NO: 49550 - protein, 300 aa, Homo sapiens
MKFLLDILLLLPLLIVCSLESFVKLFIPKRRKSVTGEIVLITGAGHGIGRLTAYEFAKLKSKLVLWDINKHGLEETAAKCKGLGAKVHTFVVDCSNREDIYSSAKKVKAEIGDVSILVNNAGVVYTSDLFATQDPQIEKTFEVNVLAHFWTTKAFLPAMTKNNHGHIVTVASAAGHVSVPFLLAYCSSKFAAVGFHKTLTDELAALQITGVKTTCLCPNFVNTGFIKNPSTSLGPTLEPEEVVNRLMHGILTEQKMIFIPSSIAFLTTLERILPERFLAVLKQKISVKFDAVIGYKMKAQ

SEQ ID NO: 49551 - protein, 264 aa, Homo sapiens
MNIILEILLLLITIIYSYLESLVKFFIPQRRKSVAGEIVLITGAGHGIGRQTTYEFAKRQSILVLWDINKVKKEVGDVTIVVNNAGTVYPADLLSTKDEEITKTFEVNILGHFWITKALLPSMMERNHGHIVTVASVCGHEGIPYLIPYCSSKFAAVGFHRGLTSELQALGKTGIKTSCLCPVFVNTGFTKNPSTRLWPVLETDEVVRSLIDGILTNKKMIFVPSYINIFLRLQKFLPERASAILNRMQNIQFEAVVGHKIKMK

SEQ ID NO: 49552 - protein, 300 aa, Homo sapiens
MNIILEILLLLITIIYSYLESLVKFFIPQRRKSVAGEIVLITGAGHGIGRQTTYEFAKRQSILVLWDINKRGVEETAAECRKLGVTAHAYVVDCSNREEIYRSLNQVKKEVGDVTIVVNNAGTVYPADLLSTKDEEITKTFEVNILGHFWITKALLPSMMERNHGHIVTVASVCGHEGIPYLIPYCSSKFAAVGFHRGLTSELQALGKTGIKTSCLCPVFVNTGFTKNPSTRLWPVLETDEVVRSLIDGILTNKKMIFVPSYINIFLRLQKFLPERASAILNRMQNIQFEAVVGHKIKMK

SEQ ID NO: 49553 - protein, 270 aa, Homo sapiens
MATGTRYAGKVVVVTGGGRGIGAGIVRAFVNSGARVVICDKDESGGRALEQELPGAVFILCDVTQEDDVKTLVSETIRRFGRLDCVVNNAGHHPPPQRPEETSAQGFRQLLELNLLGTYTLTKLALPYLRKSQGNVINISSLVGAIGQAQAVPYVATKGAVTAMTKALALDESPYGVRVNCISPGNIWTPLWEELAALMPDPRATIREGMLAQPLGRMGQPAEVGAAAVFLASEANFCTGIELLVTGGAELGYGCKASRSTPVDAPDIPS

SEQ ID NO: 49554 - protein, 387 aa, Homo sapiens
MSTFFSDTAWICLAVPTVLCGTVFCKYKKSSGQLWSWMVCLAGLCAVCLLILSPFWGLILFSVSCFLMYTYLSGQELLPVDQKAVLVTGGDCGLGHALCKYLDELGFTVFAGVLNENGPGAEELRRTCSPRLSVLQMDITKPVQIKDAYSKVAAMLQDRGLWAVINNAGVLGFPTDGELLLMTDYKQCMAVNFFGTVEVTKTFLPLLRKSKGRLVNVSSMGGGAPMERLASYGSSKAAVTMFSSVMRLELSKWGIKVASIQPGGFLTNIAGTSDKWEKLEKDILDHLPAEVQEDYGQDYILAQRNFLLLINSLASKDFSPVLRDIQHAILAKSPFAYYTPGKGAYLWICLAHYLPIGIYDYFAKRHFGQDKPMPRALRMPNYKKKAT

SEQ ID NO: 49555 - protein, 260 aa, Homo sapiens
MGDVLEQFFILTGLLVCLACLAKCVRFSRCVLLNYWKVLPKSFLRSMGQWAVITGAGDGIGKAYSFELAKRGLNVVLISRTLEKLEAIATEIERTTGRSVKIIQADFTKDDIYEHIKEKLAGLEIGILVNNVGMLPNLLPSHFLNAPDEIQSLIHCNITSVVKMTQLILKHMESRQKGLILNISSGIALFPWPLYSMYSASKAFVCAFSKALQEEYKAKEVIIQAGFLSLIPAWAFYSGAFQRLLLTHYVAYLKLNTKVR

SEQ ID NO: 49556 - protein, 310 aa, Homo sapiens
MGDVLEQFFILTGLLVCLACLAKCVRFSRCVLLNYWKVLPKSFLRSMGQWAVITGAGDGIGKAYSFELAKRGLNVVLISRTLEKLEAIATEIERTTGRSVKIIQADFTKDDIYEHIKEKLAGLEIGILVNNVGMLPNLLPSHFLNAPDEIQSLIHCNITSVVKMTQLILKHMESRQKGLILNISSGIALFPWPLYSMYSASKAFVCAFSKALQEEYKAKEVIIQVLTPYAVSTAMTKYLNTNVITKTADEFVKESLNYVTIGGETCGCLAHEILAGFLSLIPAWAFYSGAFQRLLLTHYVAYLKLNTKVR

SEQ ID NO: 49557 - protein, 736 aa, Homo sapiens
MGSPLRFDGRVVLVTGAGAGLGRAYALAFAERGALVVVNDLGGDFKGVGKGSLAADKVVEEIRRRGGKAVANYDSVEEGEKVVKTALDAFGRIDVVVNNAGILRDRSFARISDEDWDIIHRVHLRGSFQVTRAAWEHMKKQKYGRIIMTSSASGIYGNFGQANYSAAKLGLLGLANSLAIEGRKSNIHCNTIAPNAGSRMTQTVMPEDLVEALKPEYVAPLVLWLCHESCEENGGLFEVGAGWIGKLRWERTLGAIVRQKNHPMTPEAVKANWKKICDFENASKPQSIQESTGSIIEVLSKIDSEGGVSANHTSRATSTATSGFAGAIGQKLPPFSYAYTELEAIMYALGVGASIKDPKDLKFIYEGSSDFSCLPTFGVIIGQKSMMGGGLAEIPGLSINFAKVLHGEQYLELYKPLPRAGKLKCEAVVADVLDKGSGVVIIMDVYSYSEKELICHNQFSLFLVGSGGFGGKRTSDKVKVAVAIPNRPPDAVLTDTTSLNQAALYRLSGDWNPLHIDPNFASLAGFDKPILHGLCTFGFSARRVLQQFADNDVSRFKAIKARFAKPVYPGQTLQTEMWKEGNRIHFQTKVQETGDIVISNAYVDLAPTSGTSAKTPSEGGKLQSTFVFEEIGRRLKDIGPEVVKKVNAVFEWHITKGGNIGAKWTIDLKSGSGKVYQGPAKGAADTTIILSDEDFMEVVLGKLDPQKAFFSGRLKARGNIMLSQKLQMILKDYAKL

SEQ ID NO: 49558 - protein, 761 aa, Homo sapiens
MVILEAPHLLRRKEPETPGLSSRIGPSLCPGFCRKRSVSCCFQNLCNNPMEKIISQCRFFVSMNDLGGDFKGVGKGSLAADKVVEEIRRRGGKAVANYDSVEEGEKVVKTALDAFGRIDVVVNNAGILRDRSFARISDEDWDIIHRVHLRGSFQVTRAAWEHMKKQKYGRIIMTSSASGIYGNFGQANYSAAKLGLLGLANSLAIEGRKSNIHCNTIAPNAGSRMTQTVMPEDLVEALKPEYVAPLVLWLCHESCEENGGLFEVGAGWIGKLRWERTLGAIVRQKNHPMTPEAVKANWKKICDFENASKPQSIQESTGSIIEVLSKIDSEGGVSANHTSRATSTATSGFAGAIGQKLPPFSYAYTELEAIMYALGVGASIKDPKDLKFIYEGSSDFSCLPTFGVIIGQKSMMGGGLAEIPGLSINFAKVLHGEQYLELYKPLPRAGKLKCEAVVADVLDKGSGVVIIMDVYSYSEKELICHNQFSLFLVGSGGFGGKRTSDKVKVAVAIPNRPPDAVLTDTTSLNQAALYRLSGDWNPLHIDPNFASLAGFDKPILHGLCTFGFSARRVLQQFADNDVSRFKAIKARFAKPVYPGQTLQTEMWKEGNRIHFQTKVQETGDIVISNAYVDLAPTSGTSAKTPSEGGKLQSTFVFEEIGRRLKDIGPEVVKKVNAVFEWHITKGGNIGAKWTIDLKSGSGKVYQGPAKGAADTTIILSDEDFMEVVLGKLDPQKAFFSGRLKARGNIMLSQKLQMILKDYAKL

SEQ ID NO: 49559 - protein, 712 aa, Homo sapiens
MEKIISQCRFFVSMNDLGGDFKGVGKGSLAADKVVEEIRRRGGKAVANYDSVEEGEKVVKTALDAFGRIDVVVNNAGILRDRSFARISDEDWDIIHRVHLRGSFQVTRAAWEHMKKQKYGRIIMTSSASGIYGNFGQANYSAAKLGLLGLANSLAIEGRKSNIHCNTIAPNAGSRMTQTVMPEDLVEALKPEYVAPLVLWLCHESCEENGGLFEVGAGWIGKLRWERTLGAIVRQKNHPMTPEAVKANWKKICDFENASKPQSIQESTGSIIEVLSKIDSEGGVSANHTSRATSTATSGFAGAIGQKLPPFSYAYTELEAIMYALGVGASIKDPKDLKFIYEGSSDFSCLPTFGVIIGQKSMMGGGLAEIPGLSINFAKVLHGEQYLELYKPLPRAGKLKCEAVVADVLDKGSGVVIIMDVYSYSEKELICHNQFSLFLVGSGGFGGKRTSDKVKVAVAIPNRPPDAVLTDTTSLNQAALYRLSGDWNPLHIDPNFASLAGFDKPILHGLCTFGFSARRVLQQFADNDVSRFKAIKARFAKPVYPGQTLQTEMWKEGNRIHFQTKVQETGDIVISNAYVDLAPTSGTSAKTPSEGGKLQSTFVFEEIGRRLKDIGPEVVKKVNAVFEWHITKGGNIGAKWTIDLKSGSGKVYQGPAKGAADTTIILSDEDFMEVVLGKLDPQKAFFSGRLKARGNIMLSQKLQMILKDYAKL

SEQ ID NO: 49560 - protein, 599 aa, Homo sapiens
MKKQKYGRIIMTSSASGIYGNFGQANYSAAKLGLLGLANSLAIEGRKSNIHCNTIAPNAGSRMTQTVMPEDLVEALKPEYVAPLVLWLCHESCEENGGLFEVGAGWIGKLRWERTLGAIVRQKNHPMTPEAVKANWKKICDFENASKPQSIQESTGSIIEVLSKIDSEGGVSANHTSRATSTATSGFAGAIGQKLPPFSYAYTELEAIMYALGVGASIKDPKDLKFIYEGSSDFSCLPTFGVIIGQKSMMGGGLAEIPGLSINFAKVLHGEQYLELYKPLPRAGKLKCEAVVADVLDKGSGVVIIMDVYSYSEKELICHNQFSLFLVGSGGFGGKRTSDKVKVAVAIPNRPPDAVLTDTTSLNQAALYRLSGDWNPLHIDPNFASLAGFDKPILHGLCTFGFSARRVLQQFADNDVSRFKAIKARFAKPVYPGQTLQTEMWKEGNRIHFQTKVQETGDIVISNAYVDLAPTSGTSAKTPSEGGKLQSTFVFEEIGRRLKDIGPEVVKKVNAVFEWHITKGGNIGAKWTIDLKSGSGKVYQGPAKGAADTTIILSDEDFMEVVLGKLDPQKAFFSGRLKARGNIMLSQKLQMILKDYAKL

SEQ ID NO: 49561 - protein, 718 aa, Homo sapiens
MGSPLRFDGRVVLVTGAGAVNDLGGDFKGVGKGSLAADKVVEEIRRRGGKAVANYDSVEEGEKVVKTALDAFGRIDVVVNNAGILRDRSFARISDEDWDIIHRVHLRGSFQVTRAAWEHMKKQKYGRIIMTSSASGIYGNFGQANYSAAKLGLLGLANSLAIEGRKSNIHCNTIAPNAGSRMTQTVMPEDLVEALKPEYVAPLVLWLCHESCEENGGLFEVGAGWIGKLRWERTLGAIVRQKNHPMTPEAVKANWKKICDFENASKPQSIQESTGSIIEVLSKIDSEGGVSANHTSRATSTATSGFAGAIGQKLPPFSYAYTELEAIMYALGVGASIKDPKDLKFIYEGSSDFSCLPTFGVIIGQKSMMGGGLAEIPGLSINFAKVLHGEQYLELYKPLPRAGKLKCEAVVADVLDKGSGVVIIMDVYSYSEKELICHNQFSLFLVGSGGFGGKRTSDKVKVAVAIPNRPPDAVLTDTTSLNQAALYRLSGDWNPLHIDPNFASLAGFDKPILHGLCTFGFSARRVLQQFADNDVSRFKAIKARFAKPVYPGQTLQTEMWKEGNRIHFQTKVQETGDIVISNAYVDLAPTSGTSAKTPSEGGKLQSTFVFEEIGRRLKDIGPEVVKKVNAVFEWHITKGGNIGAKWTIDLKSGSGKVYQGPAKGAADTTIILSDEDFMEVVLGKLDPQKAFFSGRLKARGNIMLSQKLQMILKDYAKL

SEQ ID NO: 49562 - protein, 341 aa, Homo sapiens
MRKVVLITGASSGIGLALCKRLLAEDDELHLCLACRNMSKAEAVCAALLASHPTAEVTIVQVDVSNLQSVFRASKELKQRFQRLDCIYLNAGIMPNPQLNIKALFFGLFSRKVIHMFSTAEGLLTQGDKITADGLQEVFETNVFGHFILIRELEPLLCHSDNPSQLIWTSSRSARKSNFSLEDFQHSKGKEPYSSSKYATDLLSVALNRNFNQQGLYSNVACPGTALTNLTYGILPPFIWTLLMPAILLLRFFANAFTLTPYNGTEALVWLFHQKPESLNPLIKYLSATTGFGRNYIMTQKMDLDEDTAEKFYQKLLELEKHIRVTIQKTDNQARLSGSCL

SEQ ID NO: 49563 - protein, 111 aa, Homo sapiens
MRKVVLITGASSGIGLALCKRLLAEDDELHLCLACRNMSKAEAVCAALLASHPTAEVTIVQVDVSNLQSVFRASKELKQRFQRLDCIYLNAGIMPNPQLNIKALFFGLFSS

SEQ ID NO: 49564 - protein, 84 aa, Homo sapiens
MRKVVLITGASSGIGLALCKRLLAEDDELHLCLACRNMSKAEAVCAALLASHPTAEVTIVQVDVSNLQSVFRASKELKQRYISC

SEQ ID NO: 49565 - protein, 306 aa, Homo sapiens
MRKVVLITGASSGIGLALCKRLLAEDDELHLCLACRNMSKAEAVCAALLASHPTAEVTIVQVDVSNLQSVFRASKELKQRFQRLDCIYLNAGIMPNPQLNIKALFFGLFSRKVIHMFSTAEGLLTQGDKITADGLQEVFETNVFGHFILIRELEPLLCHSDNPSQLIWTSSRSARKSNFSLEDFQHSKGKEPYSSSKYATDLLSVALNRNFNQQLRFFANAFTLTPYNGTEALVWLFHQKPESLNPLIKYLSATTGFGRNYIMTQKMDLDEDTAEKFYQKLLELEKHIRVTIQKTDNQARLSGSCL

SEQ ID NO: 49566 - protein, 119 aa, Homo sapiens
VVIRELEPLLCHSDNPSQLIWTSSRSARKSNFSLEDFQHSKGKEPYSSSKYATDLLSVALNRNFNQQLRFFANAFTLTPYNGTEALVWLFHQKPESLNPLIKYLSATTGFGRNYIMTQK

SEQ ID NO: 49567 - protein, 261 aa, Homo sapiens
MASQLQNRLRSALALVTGAGSGIGRAVSVRLAGEGATVAACDLDRAAAQETVRLLGGPGSKEGPPRGNHAAFQADVSEARAARCLLEQVQACFSRPPSVVVSCAGITQDEFLLHMSEDDWDKVIAVNLKGTFLVTQAAAQALVSNGCRGSIINISSIVGKVGNVGQTNYAASKAGVIGLTQTAARELGRHGIRCNSVLPGFIATPMTQKVPQKVVDKITEMIPMGHLGDPEDVADVVAFLASEDSGYITGTSVEVTGGLFM

SEQ ID NO: 49568 - protein, 261 aa, Homo sapiens; identical to SEQ ID NO: 49567

SEQ ID NO: 49569 - protein, 261 aa, Homo sapiens; identical to SEQ ID NO: 49567

SEQ ID NO: 49570 - protein, 261 aa, Homo sapiens; identical to SEQ ID NO: 49567

SEQ ID NO: 49571 - protein, 261 aa, Homo sapiens; identical to SEQ ID NO: 49567

SEQ ID NO: 49572 - protein, 261 aa, Homo sapiens; identical to SEQ ID NO: 49567

SEQ ID NO: 49573 - protein, 615 aa, Homo sapiens
MVSGPLALRWCAWAGRGDMGPDMELPSHSKQLLLQLNQQRTKGFLCDVIIMVENSIFRAHKNVLAASSIYFKSLVLHDNLINLDTDMVSSTVFQQILDFIYTGKLLPSDQPAEPNFSTLLTAASYLQLPELAALCRRKLKRAGKPFGSGRAGSTGMGRPPRSQRLSTASVIQARYQGLVDGRKGAHAPQELPQAKGSDDELFLGGSNQDSVQGLGRAVCPAGGEAGLGGCSSSTNGSSGGCEQELGLDLSKKSPPLPPATPGPHLTPDDAAQLSDSQHGSPPAASAPPVANSASYSELGGTPDEPMDLEGAEDNHLSLLEAPGGQPRKSLRHSTRKKEWGKKEPVAGSPFERREAGPKGPCPGEEGEGVGDRVPNGILASGAGPSGPYGEPPYPCKEEEENGKDASEDSAQSGSEGGSGHASAHYMYRQEGYETVSYGDNLYVCIPCAKGFPSSEQLNAHVETHTEEELFIKEEGAYETGSGGAEEEAEDLSAPSAAYTAEPRPFKCSVCEKTYKDPATLRQHEKTHWLTRPFPCNICGKMFTQRGTMTRHMRSHLGLKPFACDECGMRFTRQYRLTEHMRVHSGEKPYECQLCGGKFTQQRNLISHLRMHTSPS

SEQ ID NO: 49574 - protein, 615 aa, Homo sapiens; identical to SEQ ID NO: 49573

SEQ ID NO: 49575 - protein, 615 aa, Homo sapiens; identical to SEQ ID NO: 49573

SEQ ID NO: 49576 - protein, 889 aa, Homo sapiens
MDARGGGGRPGESPGATPAPGPPPPPPPAPPQQQPPPPPPPAPPPGPGPAPPQHPPRAEALPPEAADEGGPRGRLRSRDSSCGRPGTPGAASTAKGSPNGECGRGEPQCSPAGPEGPARGPKVSFSCRGAASGPAPGPGPAEEAGSEEAGPAGEPRGSQASFMQRQFGALLQPGVNKFSLRMFGSQKAVEREQERVKSAGAWIIHPYSDFRFYWDFTMLLFMVGNLIIIPVGITFFKDETTAPWIVFNVVSDTFFLMDLVLNFRTGIVIEDNTEIILDPEKIKKKYLRTWFVVDFVSSIPVDYIFLIVEKGIDSEVYKTARALRIVRFTKILSLLRLLRLSRLIRYIHQWEEIFHMTYDLASAVMRICNLISMMLLLCHWDGCLQFLVPMLQDFPRNCWVSINGMVNHSWSELYSFALFKAMSHMLCIGYGRQAPESMTDIWLTMLSMIVGATCYAMFIGHATALIQSLDSSRRQYQEKYKQVEQYMSFHKLPADFRQKIHDYYEHRYQGKMFDEDSILGELNGPLREEIVNFNCRKLVASMPLFANADPNFVTAMLTKLKFEVFQPGDYIIREGTIGKKMYFIQHGVVSVLTKGNKEMKLSDGSYFGEICLLTRGRRTASVRADTYCRLYSLSVDNFNEVLEEYPMMRRAFETVAIDRLDRIGKKNSILLHKVQHDLNSGVFNNQENAIIQEIVKYDREMVQQAELGQRVGLFPPPPPPPQVTSAIATLQQAAAMSFCPQVARPLVGPLALGSPRLVRRPPPGPAPAAASPGPPPPASPPGAPASPRAPRTSPYGGLPAAPLAGPALPARRLSRASRPLSASQPSLPHGAPGPAASTRPASSSTPRLGPTPAARAAAPSPDRRDSASPGAAGGLDPQDSARSRLSSNL

SEQ ID NO: 49577 - protein, 774 aa, Homo sapiens
MEAEQRPAAGASEGATPGLEAVPPVAPPPATAASGPIPKSGPEPKRRHLGTLLQPTVNKFSLRVFGSHKAVEIEQERVKSAGAWIIHPYSDFRFYWDLIMLLLMVGNLIVLPVGITFFKEENSPPWIVFNVLSDTFFLLDLVLNFRTGIVVEEGAEILLAPRAIRTRYLRTWFLVDLISSIPVDYIFLVVELEPRLDAEVYKTARALRIVRFTKILSLLRLLRLSRLIRYIHQWEEIFHMTYDLASAVVRIFNLIGMMLLLCHWDGCLQFLVPMLQDFPPDCWVSINHMVNHSWGRQYSHALFKAMSHMLCIGYGQQAPVGMPDVWLTMLSMIVGATCYAMFIGHATALIQSLDSSRRQYQEKYKQVEQYMSFHKLPADTRQRIHEYYEHRYQGKMFDEESILGELSEPLREEIINFTCRGLVAHMPLFAHADPSFVTAVLTKLRFEVFQPGDLVVREGSVGRKMYFIQHGLLSVLARGARDTRLTDGSYFGEICLLTRGRRTASVRADTYCRLYSLSVDHFNAVLEEFPMMRRAFETVAMDRLLRIGKKNSILQRKRSEPSPGSSGGIMEQHLVQHDRDMARGVRGRAPSTGAQLSGKPVLWEPLVHAPLQAAAVTSNVAIALTHQRGPLPLSPDSPATLLARSAWRSAGSPASPLVPVRAGPWASTSRLPAPPARTLHASLSRAGRSQVSLLGPPPGGGGRRLGPRGRPLSASQPSLPQRATGDGSPGRKGSGSERLPPSGLLAKPPRTAQPPRPPVPEPATPRGLQLSANM

SEQ ID NO: 49578 - protein, 1203 aa, Homo sapiens
MDKLPPSMRKRLYSLPQQVGAKAWIMDEEEDAEEEGAGGRQDPSRRSIRLRPLPSPSPSAAAGGTESRSSALGAADSEGPARGAGKSSTNGDCRRFRGSLASLGSRGGGSGGTGSGSSHGHLHDSAEERRLIAEGDASPGEDRTPPGLAAEPERPGASAQPAASPPPPQQPPQPASASCEQPSVDTAIKVEGGAAAGDQILPEAEVRLGQAGFMQRQFGAMLQPGVNKFSLRMFGSQKAVEREQERVKSAGFWIIHPYSDFRFYWDLTMLLLMVGNLIIIPVGITFFKDENTTPWIVFNVVSDTFFLIDLVLNFRTGIVVEDNTEIILDPQRIKMKYLKSWFMVDFISSIPVDYIFLIVETRIDSEVYKTARALRIVRFTKILSLLRLLRLSRLIRYIHQWEEIFHMTYDLASAVVRIVNLIGMMLLLCHWDGCLQFLVPMLQDFPDDCWVSINNMVNNSWGKQYSYALFKAMSHMLCIGYGRQAPVGMSDVWLTMLSMIVGATCYAMFIGHATALIQSLDSSRRQYQEKYKQVEQYMSFHKLPPDTRQRIHDYYEHRYQGKMFDEESILGELSEPLREEIINFNCRKLVASMPLFANADPNFVTSMLTKLRFEVFQPGDYIIREGTIGKKMYFIQHGVVSVLTKGNKETKLADGSYFGEICLLTRGRRTASVRADTYCRLYSLSVDNFNEVLEEYPMMRRAFETVALDRLDRIGKKNSILLHKVQHDLNSGVFNYQENEIIQQIVQHDREMAHCAHRVQAAASATPTPTPVIWTPLIQAPLQAAAATTSVAIALTHHPRLPAAIFRPPPGSGLGNLGAGQTPRHLKRLQSLIPSALGSASPASSPSQVDTPSSSSFHIQQLAGFSAPAGLSPLLPSSSSSPPPGACGSPSAPTPSAGVAATTIAGFGHFHKALGGSLSSSDSPLLTPLQPGARSPQAAQPSPAPPGARGGLGLPEHFLPPPPSSRSPSSSPGQLGQPPGELSLGLATGPLSTPETPPRQPEPPSLVAGASGGASPVGFTPRGGLSPPGHSPGPPRTFPSAPPRASGSHGSLLLPPASSPPPPQVPQRRGTPPLTPGRLTQDLKLISASQPALPQDGAQTLRRASPHSSGESMAAFPLFPRAGGGSGGSGSSGGLGPPGRPYGAIPGQHVTLPRKTSSGSLPPPLSLFGARATSSGGPPLTAGPQREPGARPEPVRSKLPSNL

SEQ ID NO: 49579 - protein, 131 aa, Homo sapiens
MNLPSTKVSWAAVTLLLLLLLLPPALLSSGAAAQPLPDCCRQKTCSCRLYELLHGAGNHAAGILTLGKRRSGPPGLQGRLQRLLQASGNHAAGILTMGRRAGAEPAPRPCLGRRCSAPAAASVAPGGQSGI

SEQ ID NO: 49580 - protein, 349 aa, Homo sapiens
MAATAAEAVASGSGEPREEAGALGPAWDESQLRSYSFPTRPIPRLSQSDPRAEELIENEEPVVLTDTNLVYPALKWDLEYLQENIGNGDFSVYSASTHKFLYYDEKKMANFQNFKPRSNREEMKFHEFVEKLQDIQQRGGEERLYLQQTLNDTVGRKIVMDFLGFNWNWINKQQGKRGWGQLTSNLLLIGMEGNVTPAHYDEQQNFFAQIKGYKRCILFPPDQFECLYPYPVHHPCDRQSQVDFDNPDYERFPNFQNVVGYETVVGPGDVLYIPMYWWHHIESLLNGGITITVNFWYKGAPTPKRIEYPLKAHQKVAIMRNIEKMLGEALGNPQEVGPLLNTMIKGRYN

SEQ ID NO: 49581 - protein, 382 aa, Homo sapiens
MVSVGCVVFLFFFFGVRNRRSFRFRWGPSLAAEMAATAAEAVASGSGEPREEAGALGPAWDESQLRSYSFPTRPIPRLSQSDPRAEELIENEEPVVLTDTNLVYPALKWDLEYLQENIGNGDFSVYSASTHKFLYYDEKKMANFQNFKPRSNREEMKFHEFVEKLQDIQQRGGEERLYLQQTLNDTVGRKIVMDFLGFNWNWINKQQGKRGWGQLTSNLLLIGMEGNVTPAHYDEQQNFFAQIKGYKRCILFPPDQFECLYPYPVHHPCDRQSQVDFDNPDYERFPNFQNVVGYETVVGPGDVLYIPMYWWHHIESLLNGGITITVNFWYKGAPTPKRIEYPLKAHQKVAIMRNIEKMLGEALGNPQEVGPLLNTMIKGRYN

SEQ ID NO: 49582 - protein, 192 aa, Homo sapiens
MANFQNFKPRSNREEMKFHEFVEKLQDIQQRGGEERLYLQQTLNDTVGRKIVMDFLGFNWNWINKQQGKRGWGQLTSNLLLIGMEGNVTPAHYDEQQNFFAQIKGYKRCILFPPDQFECLYPYPVHHPCDRQSQVDFDNPDYERFPNFQNVVGYETVVGPGDVLYIPMYWWHHIESLLNGGITITVNFWYKG

SEQ ID NO: 49583 - protein, 600 aa, Homo sapiens
MRPAAGAARRPRCCTSWLTRCPSPAASAPTWTRPLSCASPSATCACTASAPQLELIGHSIFDFIHPCDQEELQDALTPQQTLSRRKVEAPTERCFSLRMKSTLTSRGRTLNLKAATWKVLNCSGHMRAYKPPAQTSPAGSPDSEPPLQCLVLICEAIPHPGSLEPPLGRGAFLSRHSLDMKFTYCDDRIAEVAGYSPDDLIGCSAYEYIHALDSDAVSKSIHTLLSKGQAVTGQYRFLARSGGYLWTQTQATVVSGGRGPQSESIVCVHFLISQVEETGVVLSLEQTEQHSRRPIQRGAPSQKDTPNPGDSLDTPGPRILAFLHPPSLSEAALAADPRRFCSPDLRRLLGPILDGASVAATPSTPLATRHPQSPLSADLPDELPVGTENVHRLFTSGKDTEAVETDLDIAQDADALDLEMLAPYISMDDDFQLNASEQLPRAYHRPLGAVPRPRARSFHGLSPPALEPSLLPRWGSDPRLSCSSPSRGDPSASSPMAGARKRTLAQSSEDEDEGVELLGVRPPKRSPSPEHENFLLFPLSLSFLLTGGPAPGSLQDPSTPLLNLNEPLGLGPSLLSPYSDEDTTQPGGPFQPRAGSAQAD

SEQ ID NO: 49584 - protein, 450 aa, Homo sapiens
MRPAAGAARRPRCCTSWLTRCPSPAASAPTWTRPLSCASPSATCACTASAPQLELIGHSIFDFIHPCDQEELQDALTPQQTLSRRKVEAPTERCFSLRMKSTLTSRGRTLNLKAATWKVLNCSGHMRAYKPPAQTSPAGSPDSEPPLQCLVLICEAIPHPGSLEPPLGRGAFLSRHSLDMKFTYCDDRIAEVAGYSPDDLIGCSAYEYIHALDSDAVSKSIHTLLSKGQAVTGQYRFLARSGGYLWTQTQATVVSGGRGPQSESIVCVHFLISQVEETGVVLSLEQTEQHSRRPIQRGAPSQKDTPNPGDSLDTPGPRILAFLHPPSLSEAALAADPRRFCSPDLRRLLGPILDGASVAATPSTPLATRHPQSPLSADLPDELPVGTENVHRLFTSGKDTEAVETDLDIAQDPSTPLLNLNEPLGFHFVTQSGVQWHKHSSPQPRPPGLK

SEQ ID NO: 49585 - protein, 632 aa, Homo sapiens
MALGLQRARSTTELRKEKSRDAARSRRSQETEVLYQLAHTLPFARGVSAHLDKASIMRLTISYLRMHRLCAAGEWNQVGAGGEPLDACYLKALEGFVMVLTAEGDMAYLSENVSKHLGLSQLELIGHSIFDFIHPCDQEELQDALTPQQTLSRRKVEAPTERCFSLRMKSTLTSRGRTLNLKAATWKVLNCSGHMRAYKPPAQTSPAGSPDSEPPLQCLVLICEAIPHPGSLEPPLGRGAFLSRHSLDMKFTYCDDRIAEVAGYSPDDLIGCSAYEYIHALDSDAVSKSIHTLLSKGQAVTGQYRFLARSGGYLWTQTQATVVSGGRGPQSESIVCVHFLISQVEETGVVLSLEQTEQHSRRPIQRGAPSQKDTPNPGDSLDTPGPRILAFLHPPSLSEAALAADPRRFCSPDLRRLLGPILDGASVAATPSTPLATRHPQSPLSADLPDELPVGTENVHRLFTSGKDTEAVETDLDIAQDADALDLEMLAPYISMDDDFQLNASEQLPRAYHRPLGAVPRPRARSFHGLSPPALEPSLLPRWGSDPRLSCSSPSRGDPSASSPMAGARKRTLAQSSEDEDEGVELLGVRPPKRSPSPEHENFLLFPLSLVCWGINGILWPSLPSWLKPTVL

SEQ ID NO: 49586 - protein, 576 aa, Homo sapiens
MRLTISYLRMHRLCAAGEWNQVGAGGEPLDACYLKALEGFVMVLTAEGDMAYLSENVSKHLGLSQLELIGHSIFDFIHPCDQEELQDALTPQQTLSRRKVEAPTERCFSLRMKSTLTSRGRTLNLKAATWKVLNCSGHMRAYKPPAQTSPAGSPDSEPPLQCLVLICEAIPHPGSLEPPLGRGAFLSRHSLDMKFTYCDDRIAEVAGYSPDDLIGCSAYEYIHALDSDAVSKSIHTLLSKGQAVTGQYRFLARSGGYLWTQTQATVVSGGRGPQSESIVCVHFLISQVEETGVVLSLEQTEQHSRRPIQRGAPSQKDTPNPGDSLDTPGPRILAFLHPPSLSEAALAADPRRFCSPDLRRLLGPILDGASVAATPSTPLATRHPQSPLSADLPDELPVGTENVHRLFTSGKDTEAVETDLDIAQDADALDLEMLAPYISMDDDFQLNASEQLPRAYHRPLGAVPRPRARSFHGLSPPALEPSLLPRWGSDPRLSCSSPSRGDPSASSPMAGARKRTLAQSSEDEDEGVELLGVRPPKRSPSPEHENFLLFPLSLVCWGINGILWPSLPSWLKPTVL

SEQ ID NO: 49587 - protein, 667 aa, Homo sapiens
MDWQDHRSTTELRKEKSRDAARSRRSQETEVLYQLAHTLPFARGVSAHLDKASIMRLTISYLRMHRLCAAGEWNQVGAGGEPLDACYLKALEGFVMVLTAEGDMAYLSENVSKHLGLSQLELIGHSIFDFIHPCDQEELQDALTPQQTLSRRKVEAPTERCFSLRMKSTLTSRGRTLNLKAATWKVLNCSGHMRAYKPPAQTSPAGSPDSEPPLQCLVLICEAIPHPGSLEPPLGRGAFLSRHSLDMKFTYCDDRIAEVAGYSPDDLIGCSAYEYIHALDSDAVSKSIHTLLSKGQAVTGQYRFLARSGGYLWTQTQATVVSGGRGPQSESIVCVHFLISQVEETGVVLSLEQTEQHSRRPIQRGAPSQKDTPNPGDSLDTPGPRILAFLHPPSLSEAALAADPRRFCSPDLRRLLGPILDGASVAATPSTPLATRHPQSPLSADLPDELPVGTENVHRLFTSGKDTEAVETDLDIAQDADALDLEMLAPYISMDDDFQLNASEQLPRAYHRPLGAVPRPRARSFHGLSPPALEPSLLPRWGSDPRLSCSSPSRGDPSASSPMAGARKRTLAQSSEDEDEGVELLGVRPPKRSPSPEHENFLLFPLSLSFLLTGGPAPGSLQDPSTPLLNLNEPLGLGPSLLSPYSDEDTTQPGGPFQPRAGSAQAD

SEQ ID NO: 49588 - protein, 613 aa, Homo sapiens
MRLTISYLRMHRLCAAGEWNQVGAGGEPLDACYLKALEGFVMVLTAEGDMAYLSENVSKHLGLSQLELIGHSIFDFIHPCDQEELQDALTPQQTLSRRKVEAPTERCFSLRMKSTLTSRGRTLNLKAATWKVLNCSGHMRAYKPPAQTSPAGSPDSEPPLQCLVLICEAIPHPGSLEPPLGRGAFLSRHSLDMKFTYCDDRIAEVAGYSPDDLIGCSAYEYIHALDSDAVSKSIHTLLSKGQAVTGQYRFLARSGGYLWTQTQATVVSGGRGPQSESIVCVHFLISQVEETGVVLSLEQTEQHSRRPIQRGAPSQKDTPNPGDSLDTPGPRILAFLHPPSLSEAALAADPRRFCSPDLRRLLGPILDGASVAATPSTPLATRHPQSPLSADLPDELPVGTENVHRLFTSGKDTEAVETDLDIAQDADALDLEMLAPYISMDDDFQLNASEQLPRAYHRPLGAVPRPRARSFHGLSPPALEPSLLPRWGSDPRLSCSSPSRGDPSASSPMAGARKRTLAQSSEDEDEGVELLGVRPPKRSPSPEHENFLLFPLSLSFLLTGGPAPGSLQDPSTPLLNLNEPLGLGPSLLSPYSDEDTTQPGGPFQPRAGSAQAD

SEQ ID NO: 49589 - protein, 669 aa, Homo sapiens
MALGLQRARSTTELRKEKSRDAARSRRSQETEVLYQLAHTLPFARGVSAHLDKASIMRLTISYLRMHRLCAAGEWNQVGAGGEPLDACYLKALEGFVMVLTAEGDMAYLSENVSKHLGLSQLELIGHSIFDFIHPCDQEELQDALTPQQTLSRRKVEAPTERCFSLRMKSTLTSRGRTLNLKAATWKVLNCSGHMRAYKPPAQTSPAGSPDSEPPLQCLVLICEAIPHPGSLEPPLGRGAFLSRHSLDMKFTYCDDRIAEVAGYSPDDLIGCSAYEYIHALDSDAVSKSIHTLLSKGQAVTGQYRFLARSGGYLWTQTQATVVSGGRGPQSESIVCVHFLISQVEETGVVLSLEQTEQHSRRPIQRGAPSQKDTPNPGDSLDTPGPRILAFLHPPSLSEAALAADPRRFCSPDLRRLLGPILDGASVAATPSTPLATRHPQSPLSADLPDELPVGTENVHRLFTSGKDTEAVETDLDIAQDADALDLEMLAPYISMDDDFQLNASEQLPRAYHRPLGAVPRPRARSFHGLSPPALEPSLLPRWGSDPRLSCSSPSRGDPSASSPMAGARKRTLAQSSEDEDEGVELLGVRPPKRSPSPEHENFLLFPLSLSFLLTGGPAPGSLQDPSTPLLNLNEPLGLGPSLLSPYSDEDTTQPGGPFQPRAGSAQAD

SEQ ID NO: 49590 - protein, 363 aa, Homo sapiens
MALGLQRARSTTELRKEKSRDAARSRRSQETEVLYQLAHTLPFARGVSAHLDKASIMRLTISYLRMHRLCAAGEWNQVGAGGEPLDACYLKALEGFVMVLTAEGDMAYLSENVSKHLGLSQLELIGHSIFDFIHPCDQEELQDALTPQQTLSRRKVEAPTERCFSLRMKSTLTSRGRTLNLKAATWKVLNCSGHMRAYKPPAQTSPAGSPDSEPPLQCLVLICEAIPHPGSLEPPLGRGAFLSRHSLDMKFTYCDDRIAEVAGYSPDDLIGCSAYEYIHALDSDAVSKSIHTCMYPISPGAKPAATWPPADTRTPQLPIPQDALPPHLNTSSLLPKPQGTVSFLAPSYPVPRYFSPHLPPWWP

SEQ ID NO: 49591 - protein, 612 aa, Homo sapiens
MLPMPSGRPRSCARKSPGMRPAAGAARRPRCCTSWLTRCPSPAASAPTWTRPLSCASPSATCACTASAPQLELIGHSIFDFIHPCDQEELQDALTPQQTLSRRKVEAPTERCFSLRMKSTLTSRGRTLNLKAATWKVLNCSGHMRAYKPPAQTSPAGSPDSEPPLQCLVLICEAIPHPGSLEPPLGRGAFLSRHSLDMKFTYCDDRIAEVAGYSPDDLIGCSAYEYIHALDSDAVSKSIHTLLSKGQAVTGQYRFLARSGGYLWTQTQATVVSGGRGPQSESIVCVHFLISQVEETGVVLSLEQTEQHSRRPIQRGAPSQKDTPNPGDSLDTPGPRILAFLHPPSLSEAALAADPRRFCSPDLRRLLGPILDGASVAATPSTPLATRHPQSPLSADLPDELPVGTENVHRLFTSGKDTEAVETDLDIAQDADALDLEMLAPYISMDDDFQLNASEQLPRAYHRPLGAVPRPRARSFHGLSPPALEPSLLPRWGSDPRLSCSSPSRGDPSASSPMAGARKRTLAQSSEDEDEGVELLGVRPPKRSPSPEHENFLLFPLSLSFLLTGGPAPGSLQDPSTPLLNLNEPLGFHFVTQSGVQWHKHSSPQPRPPGLK

SEQ ID NO: 49592 - protein, 199 aa, Homo sapiens
MRPAAGAARRPRCCTSWLTRCPSPAASAPTWTRPLSCASPSATCACTASAPQLELIGHSIFDFIHPCDQEELQDALTPQQTLSRRKVEAPTERCFSLRMKSTLTSRGRTLNLKAATWKVLNCSGHMRAYKPPAQTSPAGSPDSEPPLQCLVLICEAIPHPGSLEPPLGRGAFLSRHSLDMKFTYCDDRIAEVAGYSPMT

SEQ ID NO: 49593 - protein, 237 aa, Homo sapiens
MRPAAGAARRPRCCTSWLTRCPSPAASAPTWTRPLSCASPSATCACTASAPQEELQDALTPQQTLSRRKVEAPTERCFSLRMKSTLTSRGRTLNLKAATWKVLNCSGHMRAYKPPAQTSPAGSPDSEPPLQCLVLICEAIPHPGSLERFVPVSSAATSLCLPSLSPSKVAGYSPDDLIGCSAYEYIHALDSDAPQDALPPHLNTSSLLPKPQGTVSFLAPSYPVPRYFSPHLPPWWP

SEQ ID NO: 49594 - protein, 363 aa, Homo sapiens; identical to SEQ ID NO: 49590

SEQ ID NO: 49595 - protein, 991 aa, Homo sapiens
MADKVRRQRPRRRVCWALVAVLLADLLALSDTLAVMSVDLGSESMKVAIVLNKESRRKTPVIVTLKENERFFGDSAASMAIKNPKATLRYFQHLLGKQADNPHVALYQARFPEHELTFDPQRQTVHFQISSQLQFSPEEVLGMVLNYSRSLAEDFAEQPIKDAVITVPVFFNQAERRAVLQAARMAGLKVLQLINDNTATALSYGVFRRKDINTTAQNIMFYDMGSGSTVCTIVTYQMVKTKEAGMQPQLQIRGVGFDRTLGGLEMELRLRERLAGLFNEQRKGQRAKDVRENPRAMAKLLREANRLKTVLSANADHMAQIEGLMDDVDFKAKVTRVEFEELCADLFERVPGPVQQALQSAEMSLDEIEQVILVGGATRVPRVQEVLLKAVGKEELGKNINADEAAAMGAVYQAAALSKAFKVKPFVVRDAVVYPILVEFTREVEEEPGIHSLKHNKRVLFSRMGPYPQRKVITFNRYSHDFNFHINYGDLGFLGPEDLRVFGSQNLTTVKLKGVGDSFKKYPDYESKGIKAHFNLDESGVLSLDRVESVFETLVEDSAEEESTLTKLGNTISSLFGGGTTPDAKENGTDTVQEEEESPAEGSKDEPGEQVELKEEAEAPVEDGSQPPPPEPKGDATPEGEKATEKENGDKSEAQKPSEKAEAGPEGVAPAPEGEKKQKPARKRRMVEEIGVELVVLDLPDLPEDKLAQSVQKLQDLTLRDLEKQEREKAANSLEAFIFETQDKLYQPEYQEVSTEEQREEISGKLSAASTWLEDEGVGATTVMLKEKLAELRKLCQGLFFRVEERKKWPERLSALDNLLNHSSMFLKGARLIPEMDQIFTEVEMTTLEKVINETWAWKNATLAEQAKLPATEKPVLLSKDIEAKMMALDREVQYLLNKAKFTKPRPRPKDKNGTRAEPPLNASASDQGEKVIPPAGQTEDAEPISEPEKVETAGSEPGDTEPLELGGPGAEPEQKEQSTGQKRPLKNDEL

SEQ ID NO: 49596 - protein, 999 aa, Homo sapiens
MADKVRRQRPRRRVCWALVAVLLADLLALSDTLAVMSVDLGSESMKVAIVKPGVPMEIVLNKESRRKTPVIVTLKENERFFGDSAASMAIKNPKATLRYFQHLLGKQADNPHVALYQARFPEHELTFDPQRQTVHFQISSQLQFSPEEVLGMVLNYSRSLAEDFAEQPIKDAVITVPVFFNQAERRAVLQAARMAGLKVLQLINDNTATALSYGVFRRKDINTTAQNIMFYDMGSGSTVCTIVTYQMVKTKEAGMQPQLQIRGVGFDRTLGGLEMELRLRERLAGLFNEQRKGQRAKDVRENPRAMAKLLREANRLKTVLSANADHMAQIEGLMDDVDFKAKVTRVEFEELCADLFERVPGPVQQALQSAEMSLDEIEQVILVGGATRVPRVQEVLLKAVGKEELGKNINADEAAAMGAVYQAAALSKAFKVKPFVVRDAVVYPILVEFTREVEEEPGIHSLKHNKRVLFSRMGPYPQRKVITFNRYSHDFNFHINYGDLGFLGPEDLRVFGSQNLTTVKLKGVGDSFKKYPDYESKGIKAHFNLDESGVLSLDRVESVFETLVEDSAEEESTLTKLGNTISSLFGGGTTPDAKENGTDTVQEEEESPAEGSKDEPGEQVELKEEAEAPVEDGSQPPPPEPKGDATPEGEKATEKENGDKSEAQKPSEKAEAGPEGVAPAPEGEKKQKPARKRRMVEEIGVELVVLDLPDLPEDKLAQSVQKLQDLTLRDLEKQEREKAANSLEAFIFETQDKLYQPEYQEVSTEEQREEISGKLSAASTWLEDEGVGATTVMLKEKLAELRKLCQGLFFRVEERKKWPERLSALDNLLNHSSMFLKGARLIPEMDQIFTEVEMTTLEKVINETWAWKNATLAEQAKLPATEKPVLLSKDIEAKMMALDREVQYLLNKAKFTKPRPRPKDKNGTRAEPPLNASASDQGEKVIPPAGQTEDAEPISEPEKVETGSEPGDTEPLELGGPGAEPEQKEQSTGQKRPLKNDEL

SEQ ID NO: 49597 - protein, 848 aa, Homo sapiens [sequence omitted]

SEQ ID NO: 49598 - protein, 679 aa, Homo sapiens
MADKVRRQRPRRRVCWALVAVLLADLLALSDTLAVMSVDLGSESMKVAIVKPGVPMEIVLNKESRRKTPVIVTLKENERFFGDSAASMAIKNPKATLRYFQHLLGKQADNPHVALYQARFPEHELTFDPQRQTVHFQISSQLQFSPEEVLGMVLNYSRSLAEDFAEQPIKDAVITVPVFFNQAERRAVLQAARMAGLKVLQLINDNTATALSYGVFRRKDINTTAQNIMFYDMGSGSTVCTIVTYQMVKTKEAGMQPQLQIRGVGFDRTLGGLEMELRLRERLAGLFNEQRKGQRAKDVRENPRAMAKLLREANRLKTVLSANADHMAQIEGLMDDVDFKAKVTRVEFEELCADLFERVPGPVQQALQSAEMSLDEIEQVILVGGATRVPRVQEVLLKAVGKEELGKNINADEAAAMGAVYQAAALSKAFKVKPFVVRDAVVYPILVEFTREVEEEPGIHSLKHNKRVLFSRMGPYPQRKVITFNRYSHDFNFHINYGDLGFLGPEDLRVFGSQNLTTVKLKGVGDSFKKYPDYESKGIKAHFNLDESGVLSLDRVESVFETLVEDSAEEESTLTKLGNTISSLFGGGTTPDAKENGTDTVQEEEESPAEGSKDEPGEQVELKEEAEAPVEDGSQPPPPEPKGDATPEGEKATEKENGDKSEAQKPTSVCRASVTRFGF

SEQ ID NO: 49599 - protein, 147 aa, Homo sapiens
MADKVRRQRPRRRVCWALVAVLLADLLALSDTLAVMSVDLGSESMKVAIVKPGVPMEIVLNKESRRKTPVIVTLKENERFFGDSAASMAIKNPKATLRYFQHLLGKQADNPHVALYQARFPEHELTFDPQRQTVHFQISSQLQFSPL

SEQ ID NO: 49600 - protein, 559 aa, Homo sapiens
MAIKNPKATLRYFQHLLGKQADNPHVALYQARFPEHELTFDPQRQTVHFQISSQLQFSPEEVLGMVLNYSRSLAEDFAEQPIKDAVITVPVFFNQAERRAVLQAARMAGLKVLQLINDNTATALSYGVFRRKDINTTAQNIMFYDMGSGSTVCTIVTYQMVKTKEAGMQPQLQIRGVGFDRTLGGLEMELRLRERLAGLFNEQRKGQRAKDVRENPRAMAKLLREANRLKTVLSANADHMAQIEGLMDDVDFKAKVTRVEFEELCADLFERVPGPVQQALQSAEMSLDEIEQVILVGGATRVPRVQEVLLKAVGKEELGKNINADEAAAMGAVYQAAALSKAFKVKPFVVRDAVVYPILVEFTREVEEEPGIHSLKHNKRVLFSRMGPYPQRKVITFNRYSHDFNFHINYGDLGFLGPEDLRVFGSQNLTTVKLKGVGDSFKKYPDYESKGIKAHFNLDESGVLSLDRVESVFETLVEDSAEEESTLTKLGNTISSLFGGGTTPDAKENGTDTVQMLFLCPARLPQSKQAIDRFHTAVTCMEPPWGRRCRARPAWRLCS

SEQ ID NO: 49601 - protein, 980 aa, Homo sapiens
MWQSRGPMLFHLGLCVGAAGMIREWFVPIRREKGSRLICPGGTMADKVRRQRPRRRVCWALVAVLLADLLALSDTLAVMSVDLGSESMKVAIVKPGVPMEIVLNKESRRKTPVIVTLKENERFFGDSAASMAIKNPKATLRYFQHLLGKQADNPHVALYQARFPEHELTFDPQRQTVHFQISSQLQFSPEEVLGMVLNYSRSLAEDFAEQPIKDAVITVPVFFNQAERRAVLQAARMAGLKVLQLINDNTATALSYGVFRRKDINTTAQNIMFYDMGSGSTVCTIVTYQMVKTKEAGMQPQLQIRGVGFDRTLGGLEMELRLRERLAGLFNEQRKGQRAKDVRENPRAMAKLLREANRLKTVLSANADHMAQIEGLMDDVDFKAKVTRVEFEELCADLFERVPGPVQQALQSAEMSLDEIEQVILVGGATRVPRVQEVLLKAVGKEELGKNINADEAAAMGAVYQAAALSKAFKVKPFVVRDAVVYPILVEFTREVEEEPGIHSLKHNKRVLFSRMGPYPQRKVITFNRYSHDFNFHINYGDLGFLGPEDLRVFGSQNLTTVKLKGVGDSFKKYPDYESKGIKAHFNLDESGVLSLDRVESVFETLVEDSAEEESTLTKLGNTISSLFGGGTTPDAKENGTDTVQKPSEKAEAGPEGVAPAPEGEKKQKPARKRRMVEEIGVELVVLDLPDLPEDKLAQSVQKLQDLTLRDLEKQEREKAANSLEAFIFETQDKLYQPEYQEVSTEEQREEISGKLSAASTWLEDEGVGATTVMLKEKLAELRKLCQGLFFRVEERKKWPERLSALDNLLNHSSMFLKGARLIPEMDQIFTEVEMTTLEKVINETWAWKNATLAEQAKLPATEKPVLLSKDIEAKMMALDREVQYLLNKAKFTKPRPRPKDKNGTRAEPPLNASASDQGEKVIPPAGQTEDAEPISEPEKVETGSEPGDTEPLELGGPGAEPEQKEQSTGQKRPLKNDEL

SEQ ID NO: 49602 - protein, 110 aa, Homo sapiens
MAPRGCIVAVFAIFCISRLLCSHGAPVAPMTPYLMLCQPHKRCGDKFYDPLQHCCYDDAVVPLARTQTCGNCTFRVCFEQCCPWTFMVKLINQNCDSARTSDDRLCRSVS

SEQ ID NO: 49603 - protein, 119 aa, Homo sapiens
MVPRIFAPAYVSVCLLLLCPREVIAPAGSEPWLCQPAPRCGDKIYNPLEQCCYNDAIVSLSETRQCGPPCTFWPCFELCCLDSFGLTNDFVVKLKVQGVNSQCHSSPISSKCESRRRFP

SEQ ID NO: 49604 - protein, 130 aa, Homo sapiens
MRFSVSGMRTDYPRSVLAPAYVSVCLLLLCPREVIAPAGSEPWLCQPAPRCGDKIYNPLEQCCYNDAIVSLSETRQCGPPCTFWPCFELCCLDSFGLTNDFVVKLKVQGVNSQCHSSPISSKCESRRRFP

SEQ ID NO: 49605 - protein, 125 aa, Homo sapiens
MRPRCCILALVCWITVFLLQCSKGTTDAPVGSGLWLCQPTPRCGNKIYNPSEQCCYDDAILSLKETRRCGSTCTFWPCFELCCPESFGPQQKFLVKLRVLGMKSQCHLSPISRSCTRNRRHVLYP

SEQ ID NO: 49606 - protein, 124 aa, Homo sapiens
MVPRISAAIFIFELLGSNSEGVTDLRLWLCQPAPRCGEWTYNPLEQCCDDGVILDLNQTRLCGSSCTFWPCFQHCCLESLGSQNQTVVRFKVPGMKPDCKSSPITRICAQEYHPKSPVSRSDLI

SEQ ID NO: 49607 - protein, 355 aa, Homo sapiens
MGPGRCLLTALLLLALAPPPEASQYCGRLEYWNPDNKCCSSCLQRFGPPPCPDYEFRENCGLNDHGDFVTPPFRKCSSGQCNPDGAELCSPCGGGAVTPTPAAGGGRTPWRCRERPVPAKGHCPLTPGNPGAPSSQERSSPASSIAWRTPEPVPQQAWPNFLPLVVLVLLLTLAVIAILLFILLWHLCWPKEKADPYPYPGLVCGVPNTHTPSSSHLSSPGALETGDTWKEASLLPLLSRELSSLASQPLSRLLDELEVLEELIVLLDPEPGPGGGMAHGTTRHLAARYGLPAAWSTFAYSLRPSRSPLRALIEMVVAREPSASLGQLGTHLAQLGRADALRVLSKLGSSGVCWA

SEQ ID NO: 49608 - protein, 167 aa, Homo sapiens
MGPGRCLLTALLLLALAPPPEASQYCGRLEYWNPDNKCCSSCLQRFGPPPCPELSSLASQPLSRLLDELEVLEELIVLLDPEPGPGGGMAHGTTRHLAARYGLPAAWSTFAYSLRPSRSPLRALIEMVVAREPSASLGQLGTHLAQLGRADALRVLSKLGSSGVCWA

SEQ ID NO: 49609 - protein, 240 aa, Homo sapiens [sequence omitted]

SEQ ID NO: 49610 - protein, 557 aa, Homo sapiens
MPERDSEPFSNPLAPDGHDVDDPHSFHQSKLTNEDFRKLLMTPRAAPTSAPPSKSRHHEMPREYNEDEDPAARRRKKKSYYAKLRQQEIERERELAEKYRDRAKERRDGVNKDYEETELISTTANYRAVGPTAEADKSAAEKRRQLIQESKFLGGDMEHTHLVKGLDFALLQKVRAEIASKEKEEEELMEKPQKETKKDEDPENKIEFKTRLGRNVYRMLFKSKAYERNELFLPGRMAYVVDLDDEYADTDIPTTLIRSKADCPTMEAQTTLTTNDIVISKLTQILSYLRQGTRNKKLKKKDKGKLEEKKPPEADMNIFEDIGDYVPSTTKTPRDKERERYRERERDRERDRDRDRERERERDRERERERDREREEEKKRHSYFEKPKVDDEPMDVDKGPGSTKELIKSINEKFAGSAGWEGTESLKKPEDKKQLGDFFGMSNSYAECYPATMDDMAVDSDEEVDYSKMDQGNKKGPLGRWDFDTQEEYSEYMNNKEALPKAAFQYGIKMSEGRKTRRFKETNDKAELDRQWKKISAIIEKRKKMEADGVEVKRPKY

SEQ ID NO: 49611 - protein, 519 aa, Homo sapiens
MDADEGQDMSQVSGKESPPVSDTPDEGDEPMPIPEDLSTTSGGQQSSKSDRVVASNVKVETQSDEENGRACEMNGEECAEDLRMLDASGEKMNGSHRDQGSSALSGVGGIRLPNGKLKCDICGIICIGPNVLMVHKRSHTGERPFQCNQCGASFTQKGNLLRHIKLHSGEKPFKCHLCNYACRRRDALTGHLRTHSVGKPHKCGYCGRSYKQRSSLEEHKERCHNYLESMGLPGTLYPVIKEETNHSEMAEDLCKIGSERSLVLDRLASNVAKRKSSMPQKFLGDKGLSDTPYDSSASYEKENEMMKSHVMDQAINNAINYLGAESLRPLVQTPPGGSEVVPVISPMYQLHKPLAEGTPRSNHSAQDSAVENLLLLSKAKLVPSEREASPSNSCQDSTDTESNNEEQRSGLIYLTNHIAPHARNGLSLKEEHRAYDLLRAASENSQDALRVVSTSGEQMKVYKCEHCRVLFLDHVMYTIHMGCHGFRDPFECNMCGYHSQDRYEFSSHITRGEHRFHMS

SEQ ID NO: 49612 - protein, 432 aa, Homo sapiens
MDADEGQDMSQVSGKESPPVSDTPDEGDEPMPIPEDLSTTSGGQQSSKSDRVVGERPFQCNQCGASFTQKGNLLRHIKLHSGEKPFKCHLCNYACRRRDALTGHLRTHSVGKPHKCGYCGRSYKQRSSLEEHKERCHNYLESMGLPGTLYPVIKEETNHSEMAEDLCKIGSERSLVLDRLASNVAKRKSSMPQKFLGDKGLSDTPYDSSASYEKENEMMKSHVMDQAINNAINYLGAESLRPLVQTPPGGSEVVPVISPMYQLHKPLAEGTPRSNHSAQDSAVENLLLLSKAKLVPSEREASPSNSCQDSTDTESNNEEQRSGLIYLTNHIAPHARNGLSLKEEHRAYDLLRAASENSQDALRVVSTSGEQMKVYKCEHCRVLFLDHVMYTIHMGCHGFRDPFECNMCGYHSQDRYEFSSHITRGEHRFHMS

SEQ ID NO: 49613 - protein, 289 aa, Homo sapiens
MDADEGQDMSQVSGKESPPVSDTPDEGDEPMPIPEDLSTTSGGQQSSKSDRVVGDKGLSDTPYDSSASYEKENEMMKSHVMDQAINNAINYLGAESLRPLVQTPPGGSEVVPVISPMYQLHKPLAEGTPRSNHSAQDSAVENLLLLSKAKLVPSEREASPSNSCQDSTDTESNNEEQRSGLIYLTNHIAPHARNGLSLKEEHRAYDLLRAASENSQDALRVVSTSGEQMKVYKCEHCRVLFLDHVMYTIHMGCHGFRDPFECNMCGYHSQDRYEFSSHITRGEHRFHMS

SEQ ID NO: 49614 - protein, 376 aa, Homo sapiens
MDADEGQDMSQVSGKESPPVSDTPDEGDEPMPIPEDLSTTSGGQQSSKSDRVVASNVKVETQSDEENGRACEMNGEECAEDLRMLDASGEKMNGSHRDQGSSALSGVGGIRLPNGKLKCDICGIICIGPNVLMVHKRSHTGDKGLSDTPYDSSASYEKENEMMKSHVMDQAINNAINYLGAESLRPLVQTPPGGSEVVPVISPMYQLHKPLAEGTPRSNHSAQDSAVENLLLLSKAKLVPSEREASPSNSCQDSTDTESNNEEQRSGLIYLTNHIAPHARNGLSLKEEHRAYDLLRAASENSQDALRVVSTSGEQMKVYKCEHCRVLFLDHVMYTIHMGCHGFRDPFECNMCGYHSQDRYEFSSHITRGEHRFHMS

SEQ ID NO: 49615 - protein, 432 aa, Homo sapiens
MDADEGQDMSQVSGKESPPVSDTPDEGDEPMPIPEDLSTTSGGQQSSKSDRVVASNVKVETQSDEENGRACEMNGEECAEDLRMLDASGEKMNGSHRDQGSSALSGVGGIRLPNGKLKCDICGIICIGPNVLMVHKRSHTGERPFQCNQCGASFTQKGNLLRHIKLHSGEKPFKCHLCNYACRRRDALTGHLRTHSGDKGLSDTPYDSSASYEKENEMMKSHVMDQAINNAINYLGAESLRPLVQTPPGGSEVVPVISPMYQLHKPLAEGTPRSNHSAQDSAVENLLLLSKAKLVPSEREASPSNSCQDSTDTESNNEEQRSGLIYLTNHIAPHARNGLSLKEEHRAYDLLRAASENSQDALRVVSTSGEQMKVYKCEHCRVLFLDHVMYTIHMGCHGFRDPFECNMCGYHSQDRYEFSSHITRGEHRFHMS

SEQ ID NO: 49616 - protein, 477 aa, Homo sapiens
MDADEGQDMSQVSGKESPPVSDTPDEGDEPMPIPEDLSTTSGGQQSSKSDRVVASNVKVETQSDEENGRACEMNGEECAEDLRMLDASGEKMNGSHRDQGSSALSGVGGIRLPNGKLKCDICGIICIGPNVLMVHKRSHTGERPFQCNQCGASFTQKGNLLRHIKLHSGEKPFKCHLCNYACRRRDALTGHLRTHSVIKEETNHSEMAEDLCKIGSERSLVLDRLASNVAKRKSSMPQKFLGDKGLSDTPYDSSASYEKENEMMKSHVMDQAINNAINYLGAESLRPLVQTPPGGSEVVPVISPMYQLHKPLAEGTPRSNHSAQDSAVENLLLLSKAKLVPSEREASPSNSCQDSTDTESNNEEQRSGLIYLTNHIAPHARNGLSLKEEHRAYDLLRAASENSQDALRVVSTSGEQMKVYKCEHCRVLFLDHVMYTIHMGCHGFRDPFECNMCGYHSQDRYEFSSHITRGEHRFHMS

SEQ ID NO: 49617 - protein, 432 aa, Homo sapiens; identical to SEQ ID NO: 49612

SEQ ID NO: 49618 - protein, 477 aa, Homo sapiens; identical to SEQ ID NO: 49616

SEQ ID NO: 49619 - protein, 226 aa, Homo sapiens
MDADEGQDMSQVSGKESPPVSDTPDEGDEPMPIPEDLSTTSGGQQSSKSDRVVASNVKVETQSDEENGRACEMNGEECAEDLRMLDASGEKMNGSHRDQGSSALSGVGGIRLPNGKLKCDICGIICIGPNVLMVHKRSHTGERPFQCNQCGASFTQKGNLLRHIKLHSGEKPFKCHLCNYACRRRDALTGHLRTHSVIKEETNHSEMAEDLCKIGSEISRAGQTSK

SEQ ID NO: 49620 - protein, 585 aa, Homo sapiens
MHTPPALPRRFQGGGRVRTPGSHRQGKDNLERDPSGGCVPDFLPQAQDSNHFIMESLFCESSGDSSLEKEFLGAPVGPSVSTPNSQHSSPSRSLSANSIKVEMYSDEESSRLLGPDERLLEKDDSVIVEDSLSEPLGYCDGSGPEPHSPGGIRLPNGKLKCDVCGMVCIGPNVLMVHKRSHTGERPFHCNQCGASFTQKGNLLRHIKLHSGEKPFKCPFCNYACRRRDALTGHLRTHSVSSPTVGKPYKCNYCGRSYKQQSTLEEHKERCHNYLQSLSTEAQALAGQPGDEIRDLEMVPDSMLHSSSERPTFIDRLANSLTKRKRSTPQKFVGEKQMRFSLSDLPYDVNSGGYEKDVELVAHHSLEPGFGSSLAFVGAEHLRPLRLPPTNCISELTPVISSVYTQMQPLPGRLELPGSREAGEGPEDLADGGPLLYRPRGPLTDPGASPSNGCQDSTDTESNHEDRVAGVVSLPQGPPPQPPPTIVVGRHSPAYAKEDPKPQEGLLRGTPGPSKEVLRVVGESGEPVKAFKCEHCRILFLDHVMFTIHMGCHGFRDPFECNICGYHSQDRYEFSSHIVRGEHKVG

SEQ ID NO: 49621 - protein, 483 aa, Homo sapiens
MYSDEESSRLLGPDERLLEKDDSVIVEDSLSEPLGYCDGSGPEPHSPGGIRLPNGKLKCDVCGMVCIGPNVLMVHKRSHTGERPFHCNQCGASFTQKGNLLRHIKLHSGEKPFKCPFCNYACRRRDALTGHLRTHSVSSPTVGKPYKCNYCGRSYKQQSTLEEHKERCHNYLQSLSTEAQALAGQPGDEIRDLEMVPDSMLHSSSERPTFIDRLANSLTKRKRSTPQKFVGEKQMRFSLSDLPYDVNSGGYEKDVELVAHHSLEPGFGSSLAFVGAEHLRPLRLPPTNCISELTPVISSVYTQMQPLPGRLELPGSREAGEGPEDLADGGPLLYRPRGPLTDPGASPSNGCQDSTDTESNHEDRVAGVVSLPQGPPPQPPPTIVVGRHSPAYAKEDPKPQEGLLRGTPGPSKEVLRVVGESGEPVKAFKCEHCRILFLDHVMFTIHMGCHGFRDPFECNICGYHSQDRYEFSSHIVRGEHKVG

SEQ ID NO: 49622 - protein, 585 aa, Homo sapiens; identical to SEQ ID NO: 49620

SEQ ID NO: 49623 - protein, 10 aa, Homo sapiens
MHTPPALPRR

SEQ ID NO: 49624 - protein, 620 aa, Homo sapiens
MNNFILLEEQLIKKSQQKRRTSPSNFKVRFFVLTKASLAYFEDRHGKKRTLKGSIELSRIKCVEIVKSDISIPCHYKYPFQVVHDNYLLYVFAPDRESRQRWVLALKEETRNNNSLVPKYHPNFWMDGKWRCCSQLEKLATGCAQYDPTKNASKKPLPPTPEDNRRPLWEPEETVVIALYDYQTNDPQELALRRNEEYCLLDSSEIHWWRVQDRNGHEGYVPSSYLVEKSPNNLETYEWYNKSISRDKAEKLLLDTGKEGAFMVRDSRTAGTYTVSVFTKAVVSENNPCIKHYHIKETNDNPKRYYVAEKYVFDSIPLLINYHQHNGGGLVTRLRYPVCFGRQKAPVTAGLRYGKWVIDPSELTFVQEIGSGQFGLVHLGYWLNKDKVAIKTIREGAMSEEDFIEEAEVMMKLSHPKLVQLYGVCLEQAPICLVFEFMEHGCLSDYLRTQRGLFAAETLLGMCLDVCEGMAYLEEACVIHRDLAARNCLVGENQVIKVSDFGMTRFVLDDQYTSSTGTKFPVKWASPEVFSFSRYSSKSDVWSFGVLMWEVFSEGKIPYENRSNSEVVEDISTGFRLYKPRLASTHVYQIMNHCWKERPEDRPAFSRLLRQLAEIAESGL

SEQ ID NO: 49625 - protein, 632 aa, Homo sapiens
METPAAAAPAGSLFPSFLLLACGTLVAALLGAAHRLGLFYQLLHKVDKASVRHGGENVAAVLRAHGVRFIFTLVGGHISPLLVACEKLGIRVVDTRHEVTAVFAADAMARLSGTVGVAAVTAGPGLTNTVTAVKNAQMAQSPILLLGGAASTLLQNRGALQAVDQLSLFRPLCKFCVSVRRVRDIVPTLRAAMAAAQSGTPGPVFVELPVDVLYPYFMVQKEMVPAKPPKGLVGRVVSWYLENYLANLFAGAWEPQPEGPLPLDIPQASPQQVQRCVEILSRAKRPLMVLGSQALLTPTSADKLRAAVETLGVPCFLGGMARGLLGRNHPLHIRENRSAALKKADVIVLAGTVCDFRLSYGRVLSHSSKIIIVNRNREEMLLNSDIFWKPQEAVQGDVGSFVLKLVEGLQGQTWAPDWVEELREADRQKEQTFREKAAMPVAQHLNPVQVLQLVEETLPDNSILVVDGGDFVGTAAHLVQPRGPLRWLDPGAFGTLGVGAGFALGAKLCRPDAEVWCLFGDGAFGYSLIEFDTFVRHKIPVMALVGNDAGWTQISREQVPSLGSNVACGLAYTDYHKAAMGLGARGLLLSRENEDQVVKVLHDAQQQCRDGHPVVVNILIGRTDFRDGSIAV

SEQ ID NO: 49626 - protein, 225 aa, Homo sapiens
METPAAAAPAGSLFPSFLLLACGTLVAALLGAAHRLGLFYQLLHKVDKASVRHGGENVAAVLRAHGVRFIFTLVGGHISPLLVACEKLGIRVVDTRHEVTAVFAADAMARLSGTVGVAAVTAGPGLTNTVTAVKNAQMAQSPILLLGGAASTLLQNRGALQAVDQLSLFRPPPGCGQHPHWEDGLPRWLHCCIGPCGSGRLAAFLPLDCVQLVWSLIIACPGPIP

SEQ ID NO: 49627 - protein, 262 aa, Homo sapiens
METPAAAAPAGSLFPSFLLLACGTLVAALLGAAHRLGLFYQLLHKVDKASVRHGGENVAAVLRAHGVRFIFTLVGGHISPLLVACEKLGIRVVDTRHEVTAVFAADAMARLSGTVGVAAVTAGPGLTNTVTAVKNAQMAQSPILLLGGAASTLLQNRGALQAVDQLSLFRPLCKFCVSVRRVRDIVPTLRAAMAAAQSGTPGPVFVELPVDVLYPYFMVQKEMVPAKPPKGLVGRVVSWYLENYLANLFAGAWEPQPEGPLP

SEQ ID NO: 49628 - protein, 166 aa, Homo sapiens
METPAAAAPAGSLFPSFLLLACGTLVAALLGAAHRLGLFYQLLHKVDKASVRHGGENVAAVLRAHGVRFIFTLVGGHISPLLVACEKLGIRVVDTRHEVTAVFAADAMARLSGTVGVAAVTAGPGLTNTVTAVKNAQMAQSPILLLGGAASTLLQNRGALQAVDQL

SEQ ID NO: 49629 - protein, 206 aa, Homo sapiens
MAATRCLRWGLSRAGVWLLPPPARCPRRALHKQKDGTEFKSIYSLDKLYPESQGSDTAWRVPNGAKQADSDIPLDRLTISYCRSSGPGGQNVNKVNSKAEVRFHLATAEWIAEPVRQKIAITHKNKINRLGELILTSESSRYQFRNLADCLQKIRDMITEASQTPKEPTKEDVKLHRIRIENMNRERLRQKRIHSAVKTSRRVDMD

SEQ ID NO: 49630 - protein, 156 aa, Homo sapiens
MCHSRSCHPTMTILQAPTPAPSTIPGPRRGSGPEIFTFDPLPEPAAAPAGRPSASRGHRKRSRRVLYPRVVRRQLPVEEPNPAKRLLFLLLTIVFCQILMAEEGVPAPLPPEDAPNAASLAPTPVSAVLEPFNLTSEPSDYALDLSTFLQQHPAAF

SEQ ID NO: 49631 - protein, 138 aa, Homo sapiens
MCHSRSCHPTMTILQAPTPAPSTIPGPRRGSGPEIFTFDPLPEPAAAPAGRPSASRGHRKRSRRVLYPRVVSIAEVGIRGVRCPGVTGERPDSRGLDLTCLLFCLPLGPAPAASRGTEPSQKASLSAAHHRLLPDPDG

SEQ ID NO: 49632 - protein, 192 aa, Homo sapiens
MCHSRSCHPTMTILQAPTPAPSTIPGPRRGSGPEIFTFDPLPEPAAAPAGRPSASRGHRKRSRRVLPSSGEYRRSGHSRGALPWSHWGTTRLQGLDLTCLLFCLPLVRRQLPVEEPNPAKRLLFLLLTIVFCQILMAEEGVPAPLPPEDAPNAASLAPTPVSAVLEPFNLTSEPSDYALDLSTFLQQHPAAF

SEQ ID NO: 49633 - protein, 156 aa, Homo sapiens
MCHSRSCHPTMTILQAPTPAPSTIPGPRRGSGPEIFTFDPLPEPAAAPAGRPSASRGHRKRSRRVLYPRVVRRQLPVEEPNPAKRLLFLLLTIVFCQILMAEEGVPAPLPPEDAPNAASLAPTPVSPVLEPFNLTSEPSDYALDLSTFLQQHPAAF

SEQ ID NO: 49634 - protein, 138 aa, Homo sapiens; identical to SEQ ID NO: 49631

SEQ ID NO: 49635 - protein, 138 aa, Homo sapiens; identical to SEQ ID NO: 49631

SEQ ID NO: 49636 - protein, 156 aa, Homo sapiens; identical to SEQ ID NO: 49633

SEQ ID NO: 49637 - protein, 138 aa, Homo sapiens; identical to SEQ ID NO: 49631

SEQ ID NO: 49638 - protein, 156 aa, Homo sapiens; identical to SEQ ID NO: 49633

SEQ ID NO: 49639 - protein, 138 aa, Homo sapiens; identical to SEQ ID NO: 49631

SEQ ID NO: 49640 - protein, 156 aa, Homo sapiens; identical to SEQ ID NO: 49633

SEQ ID NO: 49641 - protein, 138 aa, Homo sapiens; identical to SEQ ID NO: 49631

SEQ ID NO: 49642 - protein, 156 aa, Homo sapiens; identical to SEQ ID NO: 49633

SEQ ID NO: 49643 - protein, 82 aa, Homo sapiens
MAFTLYSLLQAALLCVNAIAVLHEERFLKNIGWGTDQGIGGFGEEPGIKSQLMNLIRSVRTVMRVPLIIVNSIAIVLLLLFG

SEQ ID NO: 49644 - protein, 327 aa, Homo sapiens
MEFKLEAHRIVSISLGKIYNSRVQRGGIKLHKNLLVSLVLRSARQVYLSDPCPGLYLAGPAGTPAPPPQQQPGEPAAGPPAGWGEPPPPAARASWPETEPQPERSSVSDAPRVGDEVPVATVTGVGDVFQGGEADATEAAWSRVEGPRQAAAREAEGTAGGWGVFPEVSRAARRPCGCPLGGEDPPGTPAATPRAACCCAPQPAEDEPPAPPAVCPRKRCAAGVGGGPAGCPAPGSTPLKKPRRNLEQPPSGGEDDDAEEMETGNVANLISIFGSSFSGLLRKSPGGGREEEEGEESGPEAAEPGQICCDKPVLRDMNPWSTAIVAF

SEQ ID NO: 49645 - protein, 139 aa, Homo sapiens
MEFKLEAHRIVSISLGKIYNSRVQRGGIKLHKNLLVSLVLRSARQVYLSDPCPGLYLAGPAGTPAPPPQQQPGEPAAGPPAGWGEPPPPAARASWPETEPQPERSSVSDAPRVGDEVPVATVTGVGDVFQGRSAAISRC

SEQ ID NO: 49646 - protein, 181 aa, Homo sapiens
MEAMNVEKASADGNLPEVISNIKETLKIVSRTPVNITMAGDSGNGMSTFISALRNTGHEGKASPPTELVKATQRCASYFSSHFSNVVLWDLPGTGSATTTLENYLMEMQFNRYDFIMVASAQFSMNHVMLAKTAEDMGKKFYIVWTKLDMDLSTGALPEVQLLQIRENVLENLQKERVCEY

SEQ ID NO: 49647 - protein, 339 aa, Homo sapiens
MAAEDELQLPRLPELFETGRQLLDEVEVATEPAGSRIVQEKVFKGLDLLEKAAEMLSQLDLFSRNEDLEEIASTDLKYLLVPAFQGALTMKQVNPSKRLDHLQRAREHFINYLTQCHCYHVAEFELPKTMNNSAENHTANSSMAYPSLVAMASQRQAKIQRYKQKKELEHRLSAMKSAVESGQADDERVREYYLLHLQRWIDISLEEIESIDQEIKILRERDSSREASTSNSSRQERPPVKPFILTRNMAQAKVFGAGYPSLPTMTVSDWYEQHRKYGALPDQGIAKAAPEEFRKAAQQQEEQEEKEEEDDEQTLHRAREWDDWKDTHPRGYGNRQNMG

SEQ ID NO: 49648 - protein, 339 aa, Homo sapiens; identical to SEQ ID NO: 49647

SEQ ID NO: 49649 - protein, 159 aa, Homo sapiens
MKNHLLFWGVLAVFIKAVHVKAQEDERIVLVDNKCKCARITSRIIRSSEDPNEDIVERNIRIIVPLNNRENISDPTSPLRTRFVYHLSDLCKKCDPTEVELDNQIVTATQSNICDEDSATETCYTYDRNKCYTAVVPLVYGGETKMVETALTPDACYPD

SEQ ID NO: 49650 - protein, 70 aa, Homo sapiens
MKNHLLFWGVLAVFIKAVHVKAQEDERIVLVDNKCKCARITSRIIRSSEDPNEDIVERNIRIIVPLNNRE

SEQ ID NO: 49651 - protein, 159 aa, Homo sapiens; identical to SEQ ID NO: 49649

SEQ ID NO: 49652 - protein, 175 aa, Homo sapiens
MKNHLLFWGVLAVFIKAVHVKGSRDSSASASRVAGITAQEDERIVLVDNKCKCARITSRIIRSSEDPNEDIVERNIRIIVPLNNRENISDPTSPLRTRFVYHLSDLCKKCDPTEVELDNQIVTATQSNICDEDSATETCYTYDRNKCYTAVVPLVYGGETKMVETALTPDACYPD

SEQ ID NO: 49653 - protein, 213 aa, Homo sapiens
MRPGTGQGGLEAPGEPGPNLRQRWPLLLLGLAVVTHGLLRPTAASQSRALGPGAPGGSSRSSLRSRWGRFLLQRGSWTGPRCWPRGFQSKHNSVTHVFGSGTQLTVLSQPKATPSVTLFPPSSEELQANKATLVCLMNDFYPGILTVTWKADGTPITQGVEMTTPSKQSNNKYAASSYLSLTPEQWRSRRSYSCQVMHEGSTVEKTVAPAECS

SEQ ID NO: 49654 - protein, 84 aa, Homo sapiens
MRPGTGQGGLEAPGEPGPNLRQRWPLLLLGLAVVTHGLLRPTAASQSRALGPGAPGGSSRSSLRSRWGRSAQGHPLGHSVPAVL

SEQ ID NO: 49655 - protein, 993 aa, Homo sapiens
MASAAVESFVTKQLDLLELERDAEVEERRSWQENISLKELQSRGVCLLKLQVSSQRTGLYGRLLVTFEPRRYGSAAALPSNSFTSGDIVGLYDAANEGSQLATGILTRVTQKSVTVAFDESHDFQLSLDRENSYRLLKLANDVTYRRLKKALIALKKYHSGPASSLIEVLFGRSAPSPASEIHPLTFFNTCLDTSQKEAVLFALSQKELAIIHGPPGTGKTTTVVEIILQAVKQGLKVLCCAPSNIAVDNLVERLALCKQRILRLGHPARLLESIQQHSLDAVLARSDSAQIVADIRKDIDQVFVKNKKTQDKREKSNFRNEIKLLRKELKEREEAAMLESLTSANVVLATNTGASADGPLKLLPESYFDVVVIDECAQALEASCWIPLLKARKCILAGDHKQLPPTTVSHKAALAGLSLSLMERLAEEYGARVVRTLTVQYRMHQAIMRWASDTMYLGQLTAHSSVARHLLRDLPGVAATEETGVPLLLVDTAGCGLFELEEEDEQSKGNPGEVRLVSLHIQALVDAGVPARDIAVVSPYNLQVDLLRQSLVHRHPELEIKSVDGFQGREKEAVILSFVRSNRKGEVGFLAEDRRINVAVTRARRHVAVICDSRTVNNHAFLKTLVEYFTQHGEVRTAFEYLDDIVPENYSHENSQGSSHAATKPQGPATSTRTGSQRQEGGQEAAAPARQGRKKPAGKSLASEAPSQPSLNGGSPEGVESQDGVDHFRAMIVEFMASKKMQLEFPPSLNSHDRLRVHQIAEEHGLRHDSSGEGKRRFITVSKRAPRPRAALGPPAGTGGPAPLQPVPPTPAQTEQPPREQRGPDQPDLRTLHLERLQRVRSAQGQPASKEQQASGQQKLPEKKKKKAKGHPATDLPTEEDFEALVSAAVKADNTCGFAKCTAGVTTLGQFCQLCSRRYCLSHHLPEIHGCGERARAHARQRISREGVLYAGSGTKNGSLDPAKRAQLQRRLDKKLSELSNQRTSRRKERGT

SEQ ID NO: 49656 - protein, 428 aa, Homo sapiens
MQELHLLWWALLLGLAQACPEPCDCGEKYGFQIADCAYRDLESVPPGFPANVTTLSLSANRLPGLPEGAFREVPLLQSLWLAHNEIRTVAAGALASLSHLKSLDLSHNLISDFAWSDLHNLSALQLLKMDSNELTFIPRDAFRSLRALRSLQLNHNRLHTLAEGTFTPLTALSHLQINENPFDCTCGIVWLKTWALTTAVSIPEQDNIACTSPHVLKGTPLSRLPPLPCSAPSVQLSYQPSQDGAELRPGFVLALHCDVDGQPAPQLHWHIQIPSGIVEITSPNVGTDGRALPGTPVASSQPRFQAFANGSLLIPDFGKLEEGTYSCLATNELGSAESSVDVALATPGEGGEDTLGRRFHGKAVEGKGCYTVDNEVQPSGPEDNVVIIYLSRAGNPEAAVAEGVPGQLPPGLLLLGQSLLLFFFLTSF

SEQ ID NO: 49657 - protein, 428 aa, Homo sapiens; identical to SEQ ID NO: 49656

SEQ ID NO: 49658 - protein, 147 aa, Homo sapiens
MQELHLLWWALLLGLAQACPEPCDCGEKYGFQIADCAYRDLESVPPGFPANVTTLSLSANRLPGLPEGAFREVPLLQSLWLAHNEIRTVAAGALASLSHLKSLDLSHNLISDFAWSDLHNLSALQLLKMDSNELTFIPRDAFRSLRA

SEQ ID NO: 49659 - protein, 183 aa, Homo sapiens
MQELHLLWWALLLGLAQACPEPCDCGEKYGFQIADCAYRDLESVPPGFPANVTTLSLSANRLPGLPEGAFREVPLLQSLWLAHNEIRTVAAGALASLSHLKSLDLSHNLISDFAWSDLHNLSALQLLKMDSNELTFIPRDAFRSLRALRSLQLNHNRLHTLAEGTFTPLTALSHLQINENPFD

SEQ ID NO: 49660 - protein, 745 aa, Homo sapiens
MFPLRALWLVWALLGVAGSCPEPCACVDKYAHQFADCAYKELREVPEGLPANVTTLSLSANKITVLRRGAFADVTQVTSLWLAHNEVRTVEPGALAVLSQLKNLDLSHNFISSFPWSDLRNLSALQLLKMNHNRLGSLPRDALGALPDLRSLRINNNRLRTLAPGTFDALSALSHLQLYHNPFHCGCGLVWLQAWAASTRVSLPEPDSIACASPPALQGVPVYRLPALPCAPPSVHLSAEPPLEAPGTPLRAGLAFVLHCIADGHPTPRLQWQLQIPGGTVVLEPPVLSGEDDGVGAEEGEGEGDGDLLTQTQAQTPTPAPAWPAPPATPRFLALANGSLLVPLLSAKEAGVYTCRAHNELGANSTSIRVAVAATGPPKHAPGAGGEPDGQAPTSERKSTAKGRGNSVLPSKPEGKIKGQGLAKVSILGETETEPEEDTSEGEEAEDQILADPAEEQRCGNGDPSRYVSNHAFNQSAELKPHVFELGVIALDVAEREARVQLTPLAARWGPGPGGAGGAPRPGRRPLRLLYLCPAGGGAAVQWSRVEEGVNAYWFRGLRPGTNYSVCLALAGEACHVQVVFSTKKELPSLLVIVAVSVFLLVLATVPLLGAACCHLLAKHPGKPYRLILRPQAPDPMEKRIAADFDPRASYLESEKSYPAGGEAGGEEPEDVQGEGLDEDAEQGDPSGDLQREESLAACSLVESQSKANQEEFEAGSEYSDRLPLGAEAVNIAQEINGNYRQTAG

SEQ ID NO: 49661 - protein, 334 aa, Homo sapiens
MFPLRALWLVWALLGVAGSCPEPCACVDKYAHQFADCAYKELREVPEGLPANVTTLSLSANKITVLRRGAFADVTQVTSLWLAHNEVRTVEPGALAVLSQLKNLDLSHNFISSFPWSDLRNLSALQLLKMNHNRLGSLPRDALGALPDLRSLRINNNRLAGEACHVQVVFSTKKELPSLLVIVAVSVFLLVLATVPLLGAACCHLLAKHPGKPYRLILRPQAPDPMEKRIAADFDPRASYLESEKSYPAGGEAGGEEPEDVQGEGLDEDAEQGDPSGDLQREESLAACSLVESQSKANQEEFEAGSEYSDRLPLGAEAVNIAQEINGNYRQTAG

SEQ ID NO: 49662 - protein, 745 aa, Homo sapiens; identical to SEQ ID NO: 49660

SEQ ID NO: 49663 - protein, 745 aa, Homo sapiens; identical to SEQ ID NO: 49660

SEQ ID NO: 49664 - protein, 745 aa, Homo sapiens; identical to SEQ ID NO: 49660

SEQ ID NO: 49665 - protein, 745 aa, Homo sapiens; identical to SEQ ID NO: 49660

SEQ ID NO: 49666 - protein, 1336 aa, Homo sapiens
MTLDRPGEGATMLKTFTVLLFCIRMSLGMTSIVMDPQPELWIESNYPQAPWENITLWCRSPSRISSKFLLLKDKTQMTWIRPSHKTFQVSFLIGALTESNAGLYRCCYWKETGWSKPSKVLELEAPGQLPKPIFWIQAETPALPGCNVNILCHGWLQDLVFMLFKEGYAEPVDYQVPTGTMAIFSIDNLTPEDEGVYICRTHIQMLPTLWSEPSNPLKLVVAGLYPKPTLTAHPGPIMAPGESLNLRCQGPIYGMTFALMRVEDLEKSFYHKKTIKNEANFFFQSLKIQDTGHYLCFYYDASYRGSLLSDVLKIWVTDTFPKTWLLARPSAVVQMGQNVSLRCRGPVDGVGLALYKKGEDKPLQFLDATSIDDNTSFFLNNVTYSDTGIYSCHYLLTWKTSIRMPSHNTVELMVVDKPPKPSLSAWPSTVFKLGKAITLQCRVSHPVLEFSLEWEERETFQKFSVNGDFIISNVDGKGTGTYSCSYRVETHPNIWSHRSEPLKLMGPAGYLTWNYVLNEAIRLSLIMQLVALLLVVLWIRWKCRRLRIREAWLLGTAQGVTMLFIVTALLCCGLCNGVLIEETEIVMPTPKPELWAETNFPLAPWKNLTLWCRSPSGSTKEFVLLKDGTGWIATRPASEQVRAAFPLGALTQSHTGSYHCHSWEEMAVSEPSEALELVGTDILPKPVISASPTIRGQELQLRCKGWLAGMGFALYKEGEQEPVQQLGAVGREAFFTIQRMEDKDEGNYSCRTHTEKRPFKWSEPSEPLELVIKEMYPKPFFKTWASPVVTPGARVTFNCSTPHQHMSFILYKDGSEIASSDRSWASPGASAAHFLIISVGIGDGGNYSCRYYDFSIWSEPSDPVELVVTEFYPKPTLLAQPGPVVFPGKSVILRCQGTFQGMRFALLQEGAHVPLQFRSVSGNSADFLLHTVGAEDSGNYSCIYYETTMSNRGSYLSMPLMIWVTDTFPKPWLFAEPSSVVPMGQNVTLWCRGPVHGVGYILHKEGEATSMQLWGSTSNDGAFPITNISGTSMGRYSCCYHPDWTSSIKIQPSNTLELLVTGLLPKPSLLAQPGPMVAPGENMTLQCQGELPDSTFVLLKEGAQEPLEQQRPSGYRADFWMPAVRGEDSGIYSCVYYLDSTPFAASNHSDSLEIWVTDKPPKPSLSAWPSTMFKLGKDITLQCRGPLPGVEFVLEHDGEEAPQQFSEDGDFVINNVEGKGIGNYSCSYRLQAYPDIWSEPSDPLELVGAAGPVAQECTVGNIVRSSLIVVVVVALGVVLAIEWKKWPRLRTRGSETDGRDQTIALEECNQEGEPGTPANSPSSTSQRISVELPVPI

SEQ ID NO: 49667 - protein, 242 aa, Homo sapiens
MTLDRPGEGATMLKTFTVLLFCIRMSLGMTSIVMDPQPELWIESNYPQAPWENITLWCRSPSRISSKFLLLKDKTQMTWIRPSHKTFQVSFLIGALTESNAGLYRCCYWKETGWSKPSKVLELEAPGQLPKPIFWIQAETPALPGCNVNILCHGWLQDLVFMLFKEGYAEPVDYQVPTGTMAIFSIDNLTPEDEGVYICRTHIQMLPTLWSEPSNPLKLVVAGGCGYGCWHLAIVVPGIMAG

SEQ ID NO: 49668 - protein, 242 aa, Homo sapiens; identical to SEQ ID NO: 49667

SEQ ID NO: 49669 - protein, 1341 aa, Homo sapiens
MTLDRPGEGATMLKTFTVLLFCIRMSLGMTSIVMDPQPELWIESNYPQAPWENITLWCRSPSRISSKFLLLKDKTQMTWIRPSHKTFQVSFLIGALTESNAGLYRCCYWKETGWSKPSKVLELEAPGQLPKPIFWIQAETPALPGCNVNILCHGWLQDLVFMLFKEGYAEPVDYQVPTGTMAIFSIDNLTPEDEGVYICRTHIQMLPTLWSEPSNPLKLVVAGLYPKPTLTAHPGPIMAPGESLNLRCQGPIYGMTFALMRVEDLEKSFYHKKTIKNEANFFFQSLKIQDTGHYLCFYYDASYRGSLLSDVLKIWVTDTFPKTWLLARPSAVVQMGQNVSLRCRGPVDGVGLALYKKGEDKPLQFLDATSIDDNTSFFLNNVTYSDTGIYSCHYLLTWKTSIRMPSHNTVELMVVDKPPKPSLSAWPSTVFKLGKAITLQCRVSHPVLEFSLEWEERETFQKFSVNGDFIISNVDGKGTGTYSCSYRVETHPNIWSHRSEPLKLMGPAGYLTWNYVLNEAIRLSLIMQLVALLLVVLWIRWKCRRLRIREAWLLGTAQGVTMLFIVTALLCCAISFAGLCNGVLIEETEIVMPTPKPELWAETNFPLAPWKNLTLWCRSPSGSTKEFVLLKDGTGWIATRPASEQVRAAFPLGALTQSHTGSYHCHSWEEMAVSEPSEALELVGTDILPKPVISASPTIRGQELQLRCKGWLAGMGFALYKEGEQEPVQQLGAVGREAFFTIQRMEDKDEGNYSCRTHTEKRPFKWSEPSEPLELVIKEMYPKPFFKTWASPVVTPGARVTFNCSTPHQHMSFILYKDGSEIASSDRSWASPGASAAHFLIISVGIGDGGNYSCRYYDFSIWSEPSDPVELVVTEFYPKPTLLAQPGPVVFPGKSVILRCQGTFQGMRFALLQEGAHVPLQFRSVSGNSADFLLHTVGAEDSGNYSCIYYETTMSNRGSYLSMPLMIWVTDTFPKPWLFAEPSSVVPMGQNVTLWCRGPVHGVGYILHKEGEATSMQLWGSTSNDGAFPITNISGTSMGRYSCCYHPDWTSSIKIQPSNTLELLVTGLLPKPSLLAQPGPMVAPGENMTLQCQGELPDSTFVLLKEGAQEPLEQQRPSGYRADFWMPAVRGEDSGIYSCVYYLDSTPFAASNHSDSLEIWVTDKPPKPSLSAWPSTMFKLGKDITLQCRGPLPGVEFVLEHDGEEAPQQFSEDGDFVINNVEGKGIGNYSCSYRLQAYPDIWSEPSDPLELVGAAGPVAQECTVGNIVRSSLIVVVVVALGVVLAIEWKKWPRLRTRGSETDGRDQTIALEECNQEGEPGTPANSPSSTSQRISVELPVPI

SEQ ID NO: 49670 - protein, 1327 aa, Homo sapiens
MTLDRPGEGATMLKTFTVLLFCILMDPQPELWIESNYPQAPWENITLWCRSPSRISSKFLLLKDKTQMTWIRPSHKTFQVSFLIGALTESNAGLYRCCYWKETGWSKPSKVLELEAPGQLPKPIFWIQAETPALPGCNVNILCHGWLQDLVFMLFKEGYAEPVDYQVPTGTMAIFSIDNLTPEDEGVYICRTHIQMLPTLWSEPSNPLKLVVAGLYPKPTLTAHPGPIMAPGESLNLRCQGPIYGMTFALMRVEDLEKSFYHKKTIKNEANFFFQSLKIQDTGHYLCFYYDASYRGSLLSDVLKIWVTDTFPKTWLLARPSAVVQMGQNVSLRCRGPVDGVGLALYKKGEDKPLQFLDATSIDDNTSFFLNNVTYSDTGIYSCHYLLTWKTSIRMPSHNTVELMVVDKPPKPSLSAWPSTVFKLGKAITLQCRVSHPVLEFSLEWEERETFQKFSVNGDFIISNVDGKGTGTYSCSYRVETHPNIWSHRSEPLKLMGPAGYLTWNYVLNEAIRLSLIMQLVALLLVVLWIRWKCRRLRIREAWLLGTAQGVTMLFIVTALLCCGLCNGVLIEETEIVMPTPKPELWAETNFPLAPWKNLTLWCRSPSGSTKEFVLLKDGTGWIATRPASEQVRAAFPLGALTQSHTGSYHCHSWEEMAVSEPSEALELVGTDILPKPVISASPTIRGQELQLRCKGWLAGMGFALYKEGEQEPVQQLGAVGREAFFTIQRMEDKDEGNYSCRTHTEKRPFKWSEPSEPLELVIKEMYPKPFFKTWASPVVTPGARVTFNCSTPHQHMSFILYKDGSEIASSDRSWASPGASAAHFLIISVGIGDGGNYSCRYYDFSIWSEPSDPVELVVTEFYPKPTLLAQPGPVVFPGKSVILRCQGTFQGMRFALLQEGAHVPLQFRSVSGNSADFLLHTVGAEDSGNYSCIYYETTMSNRGSYLSMPLMIWVTDTFPKPWLFAEPSSVVPMGQNVTLWCRGPVHGVGYILHKEGEATSMQLWGSTSNDGAFPITNISGTSMGRYSCCYHPDWTSSIKIQPSNTLELLVTGLLPKPSLLAQPGPMVAPGENMTLQCQGELPDSTFVLLKEGAQEPLEQQRPSGYRADFWMPAVRGEDSGIYSCVYYLDSTPFAASNHSDSLEIWVTDKPPKPSLSAWPSTMFKLGKDITLQCRGPLPGVEFVLEHDGEEAPQQFSEDGDFVINNVEGKGIGNYSCSYRLQAYPDIWSEPSDPLELVGAAGPVAQECTVGNIVRSSLIVVVVVALGVVLAIEWKKWPRLRTRGSETDGRDQTIALEECNQEGEPGTPANSPSSTSQRISVELPVPI

SEQ ID NO: 49671 - protein, 1327 aa, Homo sapiens; identical to SEQ ID NO: 49670

SEQ ID NO: 49672 - protein, 1214 aa, Homo sapiens
MKCFFPVLSCLAVLGVVSAQRQVTVQEGPLYRTEGSHITIWCNVSGYQGPSEQNFQWSIYLPSSPEREVQIVSTMDSSFPYAIYTQRVRGGKIFIERVQGNSTLLHITDLQARDAGEYECHTPSTDKQYFGSYSAKMNLVVIPDSLQTTAMPQTLHRVEQDPLELTCEVASETIQHSHLSVAWLRQKVGEKPVEVISLSRDFMLHSSSEYAQRQSLGEVRLDKLGRTTFRLTIFHLQPSDQGEFYCEAAEWIQDPDGSWYAMTRKRSEGAVVNVQPTDKEFTVRLETEKRLHTVGEPVEFRCILEAQNVPDRYFAVSWAFNSSLIATMGPNAVPVLNSEFAHREARGQLKVAKESDSVFVLKIYHLRQEDSGKYNCRVTEREKTVTGEFIDKESKRPKNIPIIVLPLTDNWVVKVPQHHQLLSQGHLESSISVEVASNASVILEGEDLRFSCSVRTAGRPQGRFSVIWQLVDRQNRRSNIMWLDRDGTVQPGSSYWERSSFGGVQMEQVQPNSFSLGIFNSRKEDEGQYECHVTEWVRAVDGEWQIVGERRASTPISITALEMGFAVTAISRTPGVTYSDSFDLQCIIKPHYPAWVPVSVTWRFQPVGTVEFHDLVTFTRDGGVQWGDRSSSFRTRTAIEKAESSNNVRLSISRASDTEAGKYQCVAELWRKNYNNTWTRLAERTSNLLEIRVLQPVTKLQVSKSKRTLTLVENKPIQLNCSVKSQTSQNSHFAVLWYVHKPSDADGKLILKTTHNSAFEYGTYAEEEGLRARLQFERHVSGGLFSLTVQRAEVSDSGSYYCHVEEWLLSPNYAWYKLAEEVSGRTEVTVKQPDSRLRLSQAQGNLSVLETRQVQLECVVLNRTSITSQLMVEWFVWKPNHPERETVARLSRDATFHYGEQAAKNNLKGRLHLESPSPGVYRLFIQNVAVQDSGTYSCHVEEWLPSPSGMWYKRAEDTAGQTALTVMRPDASLQVDTVVPNATVSEKAAFQLDCSIVSRSSQDSRFAVAWYSLRTKAGGKRSSPGLEEQEEEREEEEEEDDDDDDDPTERTALLSVGPDAVFGPEGSPWEGRLRFQRLSPVLYRLTVLQASPQDTGNYSCHVEEWLPSPQKEWYRLTEEESAPIGIRVLDTSPTLQSIICSNDALFYFVFFYPFPIFGILIITILLVRFKSRNSSKNSDGKNGVPLLWIKEPHLNYSPTCLEPPVLSIHPGAID

SEQ ID NO: 49673 - protein, 1214 aa, Homo sapiens; identical to SEQ ID NO: 49672

SEQ ID NO: 49674 - protein, 1194 aa, Homo sapiens
MKCFFPVLSCLAVLGVVSAQRQVTVQEGPLYRTEGSHITIWCNVSGYQGPSEQNFQWSIYLPSSPEREVQIVSTMDSSFPYAIYTQRVRGGKIFIERVQGNSTLLHITDLQARDAGEYECHTPSTDKQYFGSYSAKMNLVVIPDSLQTTAMPQTLHRVEQDPLELTCEVASETIQHSHLSVAWLRQKVGEKPVEVISLSRDFMLHSSSEYAQRQSLGEVRLDKLGRTTFRLTIFHLQPSDQGEFYCEAAEWIQDPDGSWYAMTRKRSEGAVVNVQPTDKEFTVRLETEKRLHTVGEPVEFRCILEAQNVPDRYFAVSWAFNSSLIATMGPNAVPVLNSEFAHREARGQLKVAKESDSVFVLKIYHLRQEDSGKYNCRVTEREKTVTGEFIDKESKRPKNIPIIVLPLKSSISVEVASNASVILEGEDLRFSCSVRTAGRPQGRFSVIWQLVDRQNRRSNIMWLDRDGTVQPGSSYWERSSFGGVQMEQVQPNSFSLGIFNSRKEDEGQYECHVTEWVRAVDGEWQIVGERRASTPISITALEMGFAVTAISRTPGVTYSDSFDLQCIIKPHYPAWVPVSVTWRFQPVGTVEFHDLVTFTRDGGVQWGDRSSSFRTRTAIEKAESSNNVRLSISRASDTEAGKYQCVAELWRKNYNNTWTRLAERTSNLLEIRVLQPVTKLQVSKSKRTLTLVENKPIQLNCSVKSQTSQNSHFAVLWYVHKPSDADGKLILKTTHNSAFEYGTYAEEEGLRARLQFERHVSGGLFSLTVQRAEVSDSGSYYCHVEEWLLSPNYAWYKLAEEVSGRTEVTVKQPDSRLRLSQAQGNLSVLETRQVQLECVVLNRTSITSQLMVEWFVWKPNHPERETVARLSRDATFHYGEQAAKNNLKGRLHLESPSPGVYRLFIQNVAVQDSGTYSCHVEEWLPSPSGMWYKRAEDTAGQTALTVMRPDASLQVDTVVPNATVSEKAAFQLDCSIVSRSSQDSRFAVAWYSLRTKAGGKRSSPGLEEQEEEREEEEEEDDDDDDDPTERTALLSVGPDAVFGPEGSPWEGRLRFQRLSPVLYRLTVLQASPQDTGNYSCHVEEWLPSPQKEWYRLTEEESAPIGIRVLDTSPTLQSIICSNDALFYFVFFYPFPIFGILIITILLVRFKSRNSSKNSDGKNGVPLLWIKEPHLNYSPTCLEPPVLSIHPGAID

SEQ ID NO: 49675 - protein, 241 aa, Homo sapiens
MGTASRSNIARHLQTNLILFCVGAVGACTLSVTQPWYLEVDYTHEAVTIKCTFSATGCPSEQPTCLWFRYGAHQPENLCLDGCKSEADKFTVREALKENQVSLTVNRVTSNDSAIYICGIAFPSVPEARAKQTGGGTTLVVREIKLLSKELRSFLTALVSLLSVYVTGVCVAFILLSKSKSNPLRNKEIKEDSQKKKSARRIFQEIAQELYHKRHVETNQQSEKDNNTYENRRVLSNYERP

SEQ ID NO: 49676 - protein, 613 aa, Homo sapiens
MGALRPTLLPPSLPLLLLLMLGMGCWAREVLVPEGPLYRVAGTAVSISCNVTGYEGPAQQNFEWFLYRPEAPDTALGIVSTKDTQFSYAVFKSRVVAGEVQVQRLQGDAVVLKIARLQAQDAGIYECHTPSTDTRYLGSYSGKVELRVLPDVLQVSAAPPGPRGRQAPTSPPRMTVHEGQELALGCLARTSTQKHTHLAVSFGRSVPEAPVGRSTLQEVVGIRSDLAVEAGAPYAERLAAGELRLGKEGTDRYRMVVGGAQAGDAGTYHCTAAEWIQDPDGSWAQIAEKRAVLAHVDVQTLSSQLAVTVGPGERRIGPGEPLELLCNVSGALPPAGRHAAYSVGWEMAPAGAPGPGRLVAQLDTEGVGSLGPGYEGRHIAMEKVASRTYRLRLEAARPGDAGTYRCLAKAYVRGSGTRLREAASARSRPLPVHVREEGVVLEAVAWLAGGTVYRGETASLLCNISVRGGPPGLRLAASWWVERPEDGELSSVPAQLVGGVGQDGVAELGVRPGGGPVSVELVGPRSHRLRLHSLGPEDEGVYHCAPSAWVQHADYSWYQAGSARSGPVTVYPYMHALDTLFVPLLVGTGVALVTGATVLGTITCCFMKRLRKR

SEQ ID NO: 49677 - protein, 526 aa, Homo sapiens
MGALRPTLLPPSLPLLLLLMLGMGCWAREVLVPEGPLYRVAGTAVSISCNVTGYEGPAQQNFEWFLYRPEAPDTALGIVSTKDTQFSYAVFKSRVVAGEVQVQRLQGDAVVLKIARLQAQDAGIYECHTPSTDTRYLGSYSGKVELRVLPDVLQVSAAPPGPRGRQAPTSPPRMTVHEGQELALGCLARTSTQKHTHLAVSFGRSVPEAPVGRSTLQEVVGIRSDLAVEAGAPYAERLAAGELRLGKEGTDRYRMVVGGAQAGDAGTYHCTAAEWIQDPDGSWAQIAEKRAVLAHVDVQTLSSQLAVTVGPGERRIGPGEPLELLCNVSGALPPAGRHAAYSVGWEMAPAGAPGPGRLVAQLDTEGVGSLGPGYEGRHIAMEKVASRTYRLRLEAARPGDAGTYRCLAKAYVRGSGTRLREAASARSRPLPVHVREEGVVLEAVAWLAGGTVYRGETASLLCNISVRGGPPGLRSARSGPVTVYPYMHALDTLFVPLLVGTGVALVTGATVLGTITCCFMKRLRKR

SEQ ID NO: 49678 - protein, 613 aa, Homo sapiens; identical to SEQ ID NO: 49676

SEQ ID NO: 49679 - protein, 301 aa, Homo sapiens
MGALRPTLLPPSLPLLLLLMLGMGCWAREVLVPEGPLYRVAGTAVSISCNVTGYEGPAQQNFEWFLYRPEAPDTALGIVSTKDTQFSYAVFKSRVVAGEVQVQRLQGDAVVLKIARLQAQDAGIYECHTPSTDTRYLGSYSGKVELRVLPDVLQVSAAPPGPRGRQAPTSPPRMTVHEGQELALGCLARTSTQKHTHLAVSFGRSVPEAPVGRSTLQEVVGIRSDLAVEAGAPYAERLAAGELRLGKEGTDRYRMVVGGAQAGDAGTYHCTAAEWIQDPDGSWAQIAEKRAVLAHVDVQTL

SEQ ID NO: 49680 - protein, 717 aa, Homo sapiens
MVWCLGLAVLSLVISQGADGRGKPEVVSVVGRAGESVVLGCDLLPPAGRPPLHVIEWLRFGFLLPIFIQFGLYSPRIDPDYVGRVRLQKGASLQIEGLRVEDQGWYECRVFFLDQHIPEDDFANGSWVHLTVNSPPQFQETPPAVLEVQELEPVTLRCVARGSPLPHVTWKLRGKDLGQGQGQVQVQNGTLRIRRVERGSSGVYTCQASSTEGSATHATQLLVLGPPVIVVPPKNSTVNASQDVSLACHAEAYPANLTYSWFQDNINVFHISRLQPRVRILVDGSLRLLATQPDDAGCYTCVPSNGLLHPPSASAYLTVLYPAQVTAMPPETPLPIGMPGVIRCPVRANPPLLFVSWTKDGKALQLDKFPGWSQGTEGSLIIALGNEDALGEYSCTPYNSLGTAGPSPVTRVLLKAPPAFIERPKEEYFQEVGRELLIPCSAQGDPPPAAPPSPLPGPGPLLQYLSLPFFREMNVDGDWPPLEEPSPAAPPDYMDTRRCPTSSFLRSPETPPVSPRESLPGAVVGAGATAEPPYTALADWTLRERLLPGLLPAAPRGSLTSQSSGRGSASFLRPPSTAPSAGGSYLSPAPGDTSSWASGPERWPRREHVVTVSKRRNTSVDENYEWDSEFPGDMELLETLHLGLASSRLRPEAEPELGVKTPEEGCLLNTAHVTGPEARCAALREEFLAFRRRRDATRARLPAYRQPVPHPEQATLL

SEQ ID NO: 49681 - protein, 1163 aa, Homo sapiens
MVWCLGLAVLSLVISQGADGRGKPEVVSVVGRAGESVVLGCDLLPPAGRPPLHVIEWLRFGFLLPIFIQFGLYSPRIDPDYVGRVRLQKGASLQIEGLRVEDQGWYECRVFFLDQHIPEDDFANGSWVHLTVNSPPQFQETPPAVLEVQELEPVTLRCVARGSPLPHVTWKLRGKDLGQGQGQVQVQNGTLRIRRVERGSSGVYTCQASSTEGSATHATQLLVLGPPVIVVPPKNSTVNASQDVSLACHAEAYPANLTYSWFQDNINVFHISRLQPRVRILVDGSLRLLATQPDDAGCYTCVPSNGLLHPPSASAYLTVLCMPGVIRCPVRANPPLLFVSWTKDGKALQLDKFPGWSQGTEGSLIIALGNEDALGEYSCTPYNSLGTAGPSPVTRVLLKAPPAFIERPKEEYFQEVGRELLIPCSAQGDPPPVVSWTKVGRGLQGQAQVDSNSSLILRPLTKEAHGHWECSASNAVARVATSTNVYVLGTSPHVVTNVSVVALPKGANVSWEPGFDGGYLQRFSVWYTPLAKRPDRMHHDWVSLAVPVGAAHLLVPGLQPHTQYQFSVLAQNKLGSGPFSEIVLSAPEGLPTTPAAPGLPPTEIPPPLSPPRGLVAVRTPRGVLLHWDPPELVPKRLDGYVLEGRQGSQGWEVLDPAVAGTETELLVPGLIKDVLYEFRLVAFAGSFVSDPSNTANVSTSGLEVYPSRTQLPGLLPQPVLAGVVGGVCFLGVAVLVSILAGCLLNRRRAARRRRKRLRQDPPLIFSPTGKSAAPSALGSGSPDSVAKLKLQGSPVPSLRQSLLWGDPAGTPSPHPDPPSSRGPLPLEPICRGPDGRFVMGPTVAAPQERSGREQAEPRTPAQRLARSFDCSSSSPSGAPQPLCIEDISPVAPPPAAPPSPLPGPGPLLQYLSLPFFREMNVDGDWPPLEEPSPAAPPDYMDTRRCPTSSFLRSPETPPVSPRESLPGAVVGAGATAEPPYTALADWTLRERLLPGLLPAAPRGSLTSQSSGRGSASFLRPPSTAPSAGGSYLSPAPGDTSSWASGPERWPRREHVVTVSKRRNTSVDENYEWDSEFPGDMELLETLHLGLASSRLRPEAEPELGVKTPEEGCLLNTAHVTGPEARCAALREEFLAFRRRRDATRARLPAYRQPVPHPEQATLL

SEQ ID NO: 49682 - protein, 1179 aa, Homo sapiens
MVWCLGLAVLSLVISQGADGRGKPEVVSVVGRAGESVVLGCDLLPPAGRPPLHVIEWLRFGFLLPIFIQFGLYSPRIDPDYVGRVRLQKGASLQIEGLRVEDQGWYECRVFFLDQHIPEDDFANGSWVHLTVNSPPQFQETPPAVLEVQELEPVTLRCVARGSPLPHVTWKLRGKDLGQGQGQVQVQNGTLRIRRVERGSSGVYTCQASSTEGSATHATQLLVLGPPVIVVPPKNSTVNASQDVSLACHAEAYPANLTYSWFQDNINVFHISRLQPRVRILVDGSLRLLATQPDDAGCYTCVPSNGLLHPPSASAYLTVLYPAQVTAMPPETPLPIGMPGVIRCPVRANPPLLFVSWTKDGKALQLDKFPGWSQGTEGSLIIALGNEDALGEYSCTPYNSLGTAGPSPVTRVLLKAPPAFIERPKEEYFQEVGRELLIPCSAQGDPPPVVSWTKVGRGLQGQAQVDSNSSLILRPLTKEAHGHWECSASNAVARVATSTNVYVLGTSPHVVTNVSVVALPKGANVSWEPGFDGGYLQRFSVWYTPLAKRPDRMHHDWVSLAVPVGAAHLLVPGLQPHTQYQFSVLAQNKLGSGPFSEIVLSAPEGLPTTPAAPGLPPTEIPPPLSPPRGLVAVRTPRGVLLHWDPPELVPKRLDGYVLEGRQGSQGWEVLDPAVAGTETELLVPGLIKDVLYEFRLVAFAGSFVSDPSNTANVSTSGLEVYPSRTQLPGLLPQPVLAGVVGGVCFLGVAVLVSILAGCLLNRRRAARRRRKRLRQDPPLIFSPTGKSAAPSALGSGSPDSVAKLKLQGSPVPSLRQSLLWGDPAGTPSPHPDPPSSRGPLPLEPICRGPDGRFVMGPTVAAPQERSGREQAEPRTPAQRLARSFDCSSSSPSGAPQPLCIEDISPVAPPPAAPPSPLPGPGPLLQYLSLPFFREMNVDGDWPPLEEPSPAAPPDYMDTRRCPTSSFLRSPETPPVSPRESLPGAVVGAGATAEPPYTALADWTLRERLLPGLLPAAPRGSLTSQSSGRGSASFLRPPSTAPSAGGSYLSPAPGDTSSWASGPERWPRREHVVTVSKRRNTSVDENYEWDSEFPGDMELLETLHLGLASSRLRPEAEPELGVKTPEEGCLLNTAHVTGPEARCAALREEFLAFRRRRDATRARLPAYRQPVPHPEQATLL

SEQ ID NO: 49683 - protein, 1349 aa, Homo sapiens
MIWYVATFIASVIGTRGLAAEGAHGLREEPEFVTARAGESVVLRCDVIHPVTGQPPPYVVEWFKFGVPIPIFIKFGYYPPHVDPEYAGRASLHDKASLRLEQVRSEDQGWYECKVLMLDQQYDTFHNGSWVHLTINAPPTFTETPPQYIEAKEGGSITMTCTAFGNPKPIVTWLKEGTLLGASGKYQVSDGSLTVTSVSREDRGAYTCRAYSIQGEAVHTTHLLVQGPPFIVSPPENITVNISQDALLTCRAEAYPGNLTYTWYWQDENVYFQNDLKLRVRILIDGTLIIFRVKPEDSGKYTCVPSNSLGRSPSASAYLTVQYPARVLNMPPVIYVPVGIHGYIRCPVDAEPPATVVKWNKDGRPLQVEKNLGWTLMEDGSIRIEEATEEALGTYTCVPYNTLGTMGQSAPARLVLKDPPYFTVLPGWEYRQEAGRELLIPCAAAGDPFPVITWRKVGKPSRSKHSALPSGSLQFRALSKEDHGEWECVATNVVTSITASTHLTVIGTSPHAPGSVRVQVSMTTANVSWEPGYDGGYEQTFSVWMKRAQFGPHDWLSLPVPPGPSWLLVDTLEPETAYQFSVLAQNKLGTSAFSEVVTVNTLAFPITTPEPLVLVTPPRCLIANRTQQGVLLSWLPPANHSFPIDRYIMEFRVAERWELLDDGIPGTEGEFFAKDLSQDTWYEFRVLAVMQDLISEPSNIAGVSSTDIFPQPDLTEDGLARPVLAGIVATICFLAAAILFSTLAACFVNKQRKRKLKRKKDPPLSITHCRKSLESPLSSGKVSPESIRTLRAPSESSDDQGQPAAKRMLSPTREKELSLYKKTKRAISSKKYSVAKAEAEAEATTPIELISRGPDGRFVMDPAEMEPSLKSRRIEGFPFAEETDMYPEFRQSDEENEDPLVPTSVAALKSQLTPLSSSQESYLPPPAYSPRFQPRGLEGPGGLEGRLQATGQARPPAPRPFHHGQYYGYLSSSSPGEVEPPPFYVPEVGSPLSSVMSSPPLPTEGPFGHPTIPEENGENASNSTLPLTQTPTGGRSPEPWGRPEFPFGGLETPAMMFPHQLPPCDVPESLQPKAGLPRGLPPTSLQVPAAYPGILSLEAPKGWAGKSPGRGPVPAPPAAKWQDRPMQPLVSQGQLRHTSQGMGIPVLPYPEPAEPGAHGGPSTFGLDTRWYEPQPRPRPSPRQARRAEPSLHQVVLQPSRLSPLTQSPLSSRTGSPELAARARPRPGLLQQAEMSEITLQPPAAVSFSRKSTPSTGSPSQSSRSGSPSYRPAMGFTTLATGYPSPPPGPAPAGPGDSLDVFGQTPSPRRTGEELLRPETPPPTLPTSGKLQRDRPAPATSPPERALSKL

SEQ ID NO: 49684 - protein, 502 aa, Homo sapiens
MAWPKLPAPWLLLCTWLPAGCLSLLVTVQHTERYVTLFASIILKCDYTTSAQLQDVVVTWRFKSFCKDPIFDYYSASYQAALSLGQDPSNDCNDNQREVRIVAQRRGQNEPVLGVDYRQRKITIQNRADLVINEVMWWDHGVYYCTIEAPGDTSGDPDKEVKLIVLHWLTVIFIILGALLLLLLIGVCWCQCCPQYCCCYIRCPCCPAHCCCPEEDLSLPSSLPQMPMTQTTNQPPIANGVLEYLEKELRNLNLAQPLPPDLKGRFGHPCSMLSSLGSEVVERRIIHLPPLIRDLSSSRRTSDSLHQQWLTPIPSRPWDLREGRSHHHYPDFHQELQDRGPKSWALERRELDPSWSGRHRSSRLNGSPIHWSDRDSLSDVPSSSEARWRPSHPPFRSRCQERPRRPSPRESTQRHGRRRRHRSYSPPLPSGLSSWSSEEDKERQPQSWRAHRRGSHSPHWPEEKPPSYRSLDITPGKNSRKKGSVERRSEKDSSHSGRSVVI

SEQ ID NO: 49685 - protein, 546 aa, Homo sapiens
MAWPKLPAPWLLLCTWLPAGCLSLLVTVQHTERYVTLFASIILKCDYTTSAQLQDVVVTWRFKSFCKDPIFDYYSASYQAALSLGQDPSNDCNDNQREVRIVAQRRGQNEPVLGVDYRQRKITIQNRADLVINEVMWWDHGVYYCTIEAPGDTSGDPDKEVKLIVLHWLTVIFIILGALLLLLLIGVCWCQCCPQYCCCYIRCPCCPAHCCCPEEALARHRYMKQAQALGPQMMGKPLYWGADRSSQVSSYPMHPLLQRDLSLPSSLPQMPMTQTTNQPPIANGVLEYLEKELRNLNLAQPLPPDLKGRFGHPCSMLSSLGSEVVERRIIHLPPLIRDLSSSRRTSDSLHQQWLTPIPSRPWDLREGRSHHHYPDFHQELQDRGPKSWALERRELDPSWSGRHRSSRLNGSPIHWSDRDSLSDVPSSSEARWRPSHPPFRSRCQERPRRPSPRESTQRHGRRRRHRSYSPPLPSGLSSWSSEEDKERQPQSWRAHRRGSHSPHWPEEKPPSYRSLDITPGKNSRKKGSVERRSEKDSSHSGRSVVI

SEQ ID NO: 49686 - protein, 212 aa, Homo sapiens
MAWPKLPAPWLLLCTWLPAGCLSLLVTVQHTERYVTLFASIILKCDYTTSAQLQDVVVTWRFKSFCKDPIFDYYSASYQAALSLGQDPSNDCCCCPEEALARHRYMKQAQALGPQMMGKPLYWGADRSSQVSSYPMHPLLQRDLSLPSSLPQMPMTQTTNQPPIANGVLEYLEKELRNLNLAQPLPPDLKGRFGHPCSMLSSLGSENQIEEF

SEQ ID NO: 49687 - protein, 457 aa, Homo sapiens
MAWPKLPAPWLLLCTWLPAGCLSLLVTVQHTERYVTLFASIILKCDYTTSAQLQDVVVTWRFKSFCKDPIFDYYSASYQAALSLGQDPSNDCNDNQREVRIVAQRRGQNEPVLGVDYRQRKITIQNPLARHRYMKQAQALGPQMMGKPLYWGADRSSQVSSYPMHPLLQRDLSLPSSLPQMPMTQTTNQPPIANGVLEYLEKELRNLNLAQPLPPDLKGRFGHPCSMLSSLGSEVVERRIIHLPPLIRDLSSSRRTSDSLHQQWLTPIPSRPWDLREGRSHHHYPDFHQELQDRGPKSWALERRELDPSWSGRHRSSRLNGSPIHWSDRDSLSDVPSSSEARWRPSHPPFRSRCQERPRRPSPRESTQRHGRRRRHRSYSPPLPSGLSSWSSEEDKERQPQSWRAHRRGSHSPHWPEEKPPSYRSLDITPGKNSRKKGSVERRSEKDSSHSGRSVVI

SEQ ID NO: 49688 - protein, 514 aa, Homo sapiens
MAGNIFCPFALFFLPMSRVGHLQHFLLLLALGCLSLLVTVQHTERYVTLFASIILKCDYTTSAQLQDVVVTWRFKSFCKDPIFDYYSASYQAALSLGQDPSNDCNDNQREVRIVAQRRGQNEPVLGVDYRQRKITIQNRADLVINEVMWWDHGVYYCTIEAPGDTSGDPDKEVKLIVLHWLTVIFIILGALLLLLLIGVCWCQCCPQYCCCYIRCPCCPAHCCCPEEDLSLPSSLPQMPMTQTTNQPPIANGVLEYLEKELRNLNLAQPLPPDLKGRFGHPCSMLSSLGSEVVERRIIHLPPLIRDLSSSRRTSDSLHQQWLTPIPSRPWDLREGRSHHHYPDFHQELQDRGPKSWALERRELDPSWSGRHRSSRLNGSPIHWSDRDSLSDVPSSSEARWRPSHPPFRSRCQERPRRPSPRESTQRHGRRRRHRSYSPPLPSGLSSWSSEEDKERQPQSWRAHRRGSHSPHWPEEKPPSYRSLDITPGKNSRKKGSVERRSEKDSSHSGRSVVI

SEQ ID NO: 49689 - protein, 599 aa, Homo sapiens
MEGPLTPPPLQGGGAAAVPEPGARQHPGHETAAQRYSARLLQAGYEPESPRLDLATHPTTPRSELSSVVLLAGVGVQMDRLRRASMADYLISGGTGYVPEDGLTAQQLFASADGLTYNDFLILPGFIDFIADEVDLTSALTRKITLKTPLISSPMDTVTEADMAIAMALMGGIGFIHHNCTPEFQANEVRKVKKFEQGFITDPVVLSPSHTVGDVLEAKMRHGFSGIPITETGTMGSKLVGIVTSRDIDFLAEKDHTTLLSEVMTPRIELVVAPAGVTLKEANEILQRSKKGKLPIVNDCDELVAIIARTDLKKNRDYPLASKDSQKQLLCGAAVGTREDDKYRLDLLTQAGVDVIVLDSSQGNSVYQIAMVHYIKQKYPHLQVIGGNVVTAAQAKNLIDAGVDGLRVGMGCGSICITQEVMACGRPQGTAVYKVAEYARRFGVPIIADGGIQTVGHVVKALALGASTVMMGSLLAATTEAPGEYFFSDGVRLKKYRGMGSLDAMEKSSSSQKRYFSEGDKVKIAQGVSGSIQDKGSIQKFVPYLIAGIQHGCQDIGARSLSVLRSMMYSGELKFEKRTMSAQIEGGVHGLHSYEKRLY

SEQ ID NO: 49690 - protein, 489 aa, Homo sapiens
MADYLISGGTGYVPEDGLTAQQLFASADGLTYNDFLILPGFIDFIADEVDLTSALTRKITLKTPLISSPMDTVTEADMAIAMAKFEQGFITDPVVLSPSHTVGDVLEAKMRHGFSGIPITETGTMGSKLVGIVTSRDIDFLAEKDHTTLLSEVMTPRIELVVAPAGVTLKEANEILQRSKKGKLPIVNDCDELVAIIARTDLKKNRDYPLASKDSQKQLLCGAAVGTREDDKYRLDLLTQAGVDVIVLDSSQGNSVYQIAMVHYIKQKYPHLQVIGGNVVTAAQAKNLIDAGVDGLRVGMGCGSICITQEVMACGRPQGTAVYKVAEYARRFGVPIIADGGIQTVGHVVKALALGASTVMMGSLLAATTEAPGEYFFSDGVRLKKYRGMGSLDAMEKSSSSQKRYFSEGDKVKIAQGVSGSIQDKGSIQKFVPYLIAGIQHGCQDIGARSLSVLRSMMYSGELKFEKRTMSAQIEGGVHGLHSYEKRLY

SEQ ID NO: 49691 - protein, 563 aa, Homo sapiens
MEGPLTPPPLQGGGAAAVPEPGARQHPGHETAAQRYSARLLQAGYEPESMADYLISGGTGYVPEDGLTAQQLFASADGLTYNDFLILPGFIDFIADEVDLTSALTRKITLKTPLISSPMDTVTEADMAIAMALMGGIGFIHHNCTPEFQANEVRKVKKFEQGFITDPVVLSPSHTVGDVLEAKMRHGFSGIPITETGTMGSKLVGIVTSRDIDFLAEKDHTTLLSEVMTPRIELVVAPAGVTLKEANEILQRSKKGKLPIVNDCDELVAIIARTDLKKNRDYPLASKDSQKQLLCGAAVGTREDDKYRLDLLTQAGVDVIVLDSSQGNSVYQIAMVHYIKQKYPHLQVIGGNVVTAAQAKNLIDAGVDGLRVGMGCGSICITQEVMACGRPQGTAVYKVAEYARRFGVPIIADGGIQTVGHVVKALALGASTVMMGSLLAATTEAPGEYFFSDGVRLKKYRGMGSLDAMEKSSSSQKRYFSEGDKVKIAQGVSGSIQDKGSIQKFVPYLIAGIQHGCQDIGARSLSVLRSMMYSGELKFEKRTMSAQIEGGVHGLHSYEKRLY

SEQ ID NO: 49692 - protein, 589 aa, Homo sapiens
MEGPLTPPPLQGGGAAAVPEPGARQHPGHETAAQRYSARLLQAGYEPESCFLLELSSVVLLAGVGVQMDRLRRASMADYLISGGTGYVPEDGLTAQQLFASADGLTYNDFLILPGFIDFIADEVDLTSALTRKITLKTPLISSPMDTVTEADMAIAMALMGGIGFIHHNCTPEFQANEVRKVKKFEQGFITDPVVLSPSHTVGDVLEAKMRHGFSGIPITETGTMGSKLVGIVTSRDIDFLAEKDHTTLLSEVMTPRIELVVAPAGVTLKEANEILQRSKKGKLPIVNDCDELVAIIARTDLKKNRDYPLASKDSQKQLLCGAAVGTREDDKYRLDLLTQAGVDVIVLDSSQGNSVYQIAMVHYIKQKYPHLQVIGGNVVTAAQAKNLIDAGVDGLRVGMGCGSICITQEVMACGRPQGTAVYKVAEYARRFGVPIIADGGIQTVGHVVKALALGASTVMMGSLLAATTEAPGEYFFSDGVRLKKYRGMGSLDAMEKSSSSQKRYFSEGDKVKIAQGVSGSIQDKGSIQKFVPYLIAGIQHGCQDIGARSLSVLRSMMYSGELKFEKRTMSAQIEGGVHGLHSYEKRLY

SEQ ID NO: 49693 - protein, 530 aa, Homo sapiens
MEGPLTPPPLQGGGAAAVPEPGARQHPGHETAAQRYSARLLQAGYEPESDFLILPGFIDFIADEVDLTSALTRKITLKTPLISSPMDTVTEADMAIAMALMGGIGFIHHNCTPEFQANEVRKVKKFEQGFITDPVVLSPSHTVGDVLEAKMRHGFSGIPITETGTMGSKLVGIVTSRDIDFLAEKDHTTLLSEVMTPRIELVVAPAGVTLKEANEILQRSKKGKLPIVNDCDELVAIIARTDLKKNRDYPLASKDSQKQLLCGAAVGTREDDKYRLDLLTQAGVDVIVLDSSQGNSVYQIAMVHYIKQKYPHLQVIGGNVVTAAQAKNLIDAGVDGLRVGMGCGSICITQEVMACGRPQGTAVYKVAEYARRFGVPIIADGGIQTVGHVVKALALGASTVMMGSLLAATTEAPGEYFFSDGVRLKKYRGMGSLDAMEKSSSSQKRYFSEGDKVKIAQGVSGSIQDKGSIQKFVPYLIAGIQHGCQDIGARSLSVLRSMMYSGELKFEKRTMSAQIEGGVHGLHSYEKRLY

SEQ ID NO: 49694 - protein, 566 aa, Homo sapiens
MEGPLTPPPLQGGGAAAVPEPGARQHPGHETAAQRYSARLLQAGYEPESPRLDLATHPTTPRSELSSVVLLAGVGVQMDRLRRASDFLILPGFIDFIADEVDLTSALTRKITLKTPLISSPMDTVTEADMAIAMALMGGIGFIHHNCTPEFQANEVRKVKKFEQGFITDPVVLSPSHTVGDVLEAKMRHGFSGIPITETGTMGSKLVGIVTSRDIDFLAEKDHTTLLSEVMTPRIELVVAPAGVTLKEANEILQRSKKGKLPIVNDCDELVAIIARTDLKKNRDYPLASKDSQKQLLCGAAVGTREDDKYRLDLLTQAGVDVIVLDSSQGNSVYQIAMVHYIKQKYPHLQVIGGNVVTAAQAKNLIDAGVDGLRVGMGCGSICITQEVMACGRPQGTAVYKVAEYARRFGVPIIADGGIQTVGHVVKALALGASTVMMGSLLAATTEAPGEYFFSDGVRLKKYRGMGSLDAMEKSSSSQKRYFSEGDKVKIAQGVSGSIQDKGSIQKFVPYLIAGIQHGCQDIGARSLSVLRSMMYSGELKFEKRTMSAQIEGGVHGLHSYEKRLY

SEQ ID NO: 49695 - protein, 509 aa, Homo sapiens
MADYLISGGTGYVPEDGLTAQQLFASADGLTYNDFLILPGFIDFIADEVDLTSALTRKITLKTPLISSPMDTVTEADMAIAMALMGGIGFIHHNCTPEFQANEKFEQGFITDPVVLSPSHTVGDVLEAKMRHGFSGIPITETGTMGSKLVGIVTSRDIDFLAEKDHTTLLSEVMTPRIELVVAPAGVTLKEANEILQRSKKGKLPIVNDCDELVAIIARTDLKKNRDYPLASKDSQKQLLCGAAVGTREDDKYRLDLLTQAGVDVIVLDSSQGNSVYQIAMVHYIKQKYPHLQVIGGNVVTAAQAKNLIDAGVDGLRVGMGCGSICITQEVMACGRPQGTAVYKVAEYARRFGVPIIADGGIQTVGHVVKALALGASTVMMGSLLAATTEAPGEYFFSDGVRLKKYRGMGSLDAMEKSSSSQKRYFSEGDKVKIAQGVSGSIQDKGSIQKFVPYLIAGIQHGCQDIGARSLSVLRSMMYSGELKFEKRTMSAQIEGGVHGLHSYEKRLY

SEQ ID NO: 49696 - protein, 489 aa, Homo sapiens; identical to SEQ ID NO: 49690

SEQ ID NO: 49697 - protein, 514 aa, Homo sapiens
MADYLISGGTSYVPDDGLTAQQLFNCGDGLTYNDFLILPGYIDFTADQVDLTSALTKKITLKTPLVSSPMDTVTEAGMAIAMALTGGIGFIHHNCTPEFQANEVRKVKKYEQGFITDPVVLSPKDRVRDVFEAKARHGFCGIPITDTGRMGSRLVGIISSRDIDFLKEEEHDCFLEEIMTKREDLVVAPAGITLKEANEILQRSKKGKLPIVNEDDELVAIIARTDLKKNRDYPLASKDAKKQLLCGAAIGTHEDDKYRLDLLAQAGVDVVVLDSSQGNSIFQINMIKYIKDKYPNLQVIGGNVVTAAQAKNLIDAGVDALRVGMGSGSICITQEVLACGRPQATAVYKVSEYARRFGVPVIADGGIQNVGHIAKALALGASTVMMGSLLAATTEAPGEYFFSDGIRLKKYRGMGSLDAMDKHLSSQNRYFSEADKIKVAQGVSGAVQDKGSIHKFVPYLIAGIQHSCQDIGAKSLTQVRAMMYSGELKFEKRTSSAQVEGGVHSLHSYEKRLF

SEQ ID NO: 49698 - protein, 357 aa, Homo sapiens
MADYLISGGTSYVPDDGLTAQQLFNCGDGLTYNDFLILPGYIDFTADQVDLTSALTKKITLKTPLVSSPMDTVTEAGMAIAMALTGGIGFIHHNCTPEFQANEVRKVKKYEQGFITDPVVLSPKDRVRDVFEAKARHGFCGIPITDTGRMGSRLVGIISSRDIDFLKEEEHDCFLEEIMTKREDLVVAPAGITLKEANEILQRSKKGKLPIVNEDDELVAIIARTDLKKNRDYPLASKDAKKQLLCGAAIGTHEDDKYRLDLLAQAGVDVVVLDSSQGNSIFQINMIKYIKDKYPNLQVIGGNVVTAAQAKNLIDAGVDALRVGMGSGSICITQEVLACGRPQATAVCTQKQHPHFQ

SEQ ID NO: 49699 - protein, 166 aa, Homo sapiens
MLRGVLGKTFRLVGYTIQYGCIAHCAFEYVGGVVMCSGPSMEPTIQNSDIVFAENLSRHFYGIQRGDIVIAKSPSDPKSNICKRVIGLEGDKILTTSPSDFFKSHSYVPMGHVWLEGDNLQNSTDSRCYGPIPYGLIRGRIFFKIWPLSDFGFLRASPNGHRFSDD

SEQ ID NO: 49700 - protein, 107 aa, Homo sapiens
MLRGVLGKTFRLVGYTIQYGCIAHCAFEYVGGVVMCSGPSMEPTIQNSDIVFAENLSRHFYGIQRGDIVIAKSPSDPKSNICKRVIGLEGDKILTTSPSDFFKSHSY

SEQ ID NO: 49701 - protein, 96 aa, Homo sapiens
MLRGVLGKTFRLVGYTIQYGCIAHCAFEYVGGVVMCSGPSMEPTIQNSDIVFAENLSRHFYGIQRGDIVIAKSPSDPKSNICKRVIGLEGDKILTT

SEQ ID NO: 49702 - protein, 166 aa, Homo sapiens; identical to SEQ ID NO: 49699

SEQ ID NO: 49703 - protein, 175 aa, Homo sapiens
MAQSQGWVKRYIKAFCKGFFVAVPVAVTFLDRVACVARVEGASMQPSLNPGGSQSSDVVLLNHWKVRNFEVHRGDIVSLVSPKNPEQKIIKRVIALEGDIVRTIGHKNRYVKVPRGHIWVEGDHHGHSFDSNSFGPVSLGLLHAHATHILWPPERWQKLESVLPPERLPVQREEE

SEQ ID NO: 49704 - protein, 175 aa, Homo sapiens; identical to SEQ ID NO: 49703

SEQ ID NO: 49705 - protein, 175 aa, Homo sapiens; identical to SEQ ID NO: 49703

SEQ ID NO: 49706 - protein, 110 aa, Homo sapiens
MAQSQGWVKRYIKAFCKGFFVAVPVAVTFLDRVACVARVEGASMQPSLNPGGSQSSDVVLLNHWKVRNFEVHRGDIVSLVSPKNPEQKIIKRVIALEGDIVRDGRKLKRI

SEQ ID NO: 49707 - protein, 79 aa, Homo sapiens
MAQSQGWVKRYIKAFCKGFFVAVPVAVTFLDRVACVARVEGASMQPSLNPGGSQSSDVVLLNHWKVRNFEVHRGDIVSL

SEQ ID NO: 49708 - protein, 175 aa, Homo sapiens; identical to SEQ ID NO: 49703

SEQ ID NO: 49709 - protein, 184 aa, Homo sapiens
MVRKLKFHEQKLLKQVDFLNWEVTDHNLHELRVLRRYRLQRREDYTRYNQLSRAVRELARRLRDLPERDQFRVRASAALLDKLYALGLVPTRGSLELCDFVTASSFCRRRLPTVLLKLRMAQHLQAAVAFVEQGHVRVGPDVVTDPAFLVTRSMEDFVTWVDSSKIKRHVLEYNEERDDFDLEA

SEQ ID NO: 49710 - protein, 184 aa, Homo sapiens; identical to SEQ ID NO: 49709

SEQ ID NO: 49711 - protein, 31 aa, Homo sapiens [sequence omitted]

SEQ ID NO: 49712 - protein, 291 aa, Homo sapiens
MLRREARLRREYLYRKAREEAQRSAQERKERLRRALEENRLIPTELRREALALQGSLEFDDAGGEGVTSHVDDEYRWAGVEDPKVMITTSRDPSSRLKMFAKELKLVFPGAQRMNRGRHEVGALVRACKANGVTDLLVVHEHRGTPVGLIVSHLPFGPTAYFTLCNVVMRHDIPDLGTMSEAKPHLITHGFSSRLGKRVSDILRYLFPVPKDDSHRVITFANQDDYISFRHHVYKKTDHRNVELTEVGPRFELKLYMIRLGTLEQEATADVEWRWHPYTNTARKRVFLSTE

SEQ ID NO: 49713 - protein, 975 aa, Homo sapiens
MDLNSASTVVLQVLTQATSQDTAVLKPAEEQLKQWETQPGFYSVLLNIFTNHTLDINVRWLAVLYFKHGIDRYWRRVAPHALSEEEKTTLRAGLITNFNEPINQIATQIAVLIAKVARLDCPRQWPELIPTLIESVKVQDDLRQHRALLTFYHVTKTLASKRLAADRKLFYDLASGIYNFACSLWNHHTDTFLQEVSSGNEAAILSSLERTLLSLKVLRKLTVNGFVEPHKNMEVMGFLHGIFERLKQFLECSRSIGTDNVCRDRLEKTIILFTKVLLDFLDQHPFSFTPLIQRSLEFSVSYVFTEVGEGVTFERFIVQCMNLIKMIVKNYAYKPSKNFEDSSPETLEAHKIKMAFFTYPTLTEICRRLVSHYFLLTEEELTMWEEDPEGFTVEETGGDSWKYSLRPCTEVLFIDIFHEYNQTLTPVLLEMMQTLQGPTNVEDMNALLIKDAVYNAVGLAAYELFDSVDFDQWFKNQLLPELQVIHNRYKPLRRRVIWLIGQWISVKFKSDLRPMLYEAICNLLQDQDLVVRIETATTLKLTVDDFEFRTDQFLPYLETMFTLLFQLLQQVTECDTKMHVLHVLSCVIERVNMQIRPYVGCLVQYLPLLWKQSEEHNMLRCAILTTLIHLVQGLGADSKNLYPFLLPVIQLSTDVSQPPHVYLLEDGLELWLVTLENSPCITPELLRIFQNMSPLLELSSENLRTCFKIINGYIFLSSTEFLQTYAVGLCQSFCELLKEITTEGQVQVLKVVENALKVNPILGPQMFQPILPYVFKGIIEGERYPVVMSTYLGVMGRVLLQNTSFFSSLLNEMAHKFNQEMDQLLGNMIEMWVDRMDNITQPERRKLSALALLSLLPSDNSVIQDKFCGIINISVEGLHDVMTEDPETGTYKDCMLMSHLEEPKVTEDEEPPTEQDKRKKMLALKDPVHTVSLQQFIYEKLKAQQEMLGEQGFQSLMETVDTEIVTQLQEFLQGF

SEQ ID NO: 49714 - protein, 1015 aa, Homo sapiens
MVQPIIHLGYVVYSLLYLGYKPVQHVTALNTVSSCHKMVSMDLNSASTVVLQVLTQATSQDTAVLKPAEEQLKQWETQPGFYSVLLNIFTNHTLDINVRWLAVLYFKHGIDRYWRRVAPHALSEEEKTTLRAGLITNFNEPINQIATQIAVLIAKVARLDCPRQWPELIPTLIESVKVQDDLRQHRALLTFYHVTKTLASKRLAADRKLFYDLASGIYNFACSLWNHHTDTFLQEVSSGNEAAILSSLERTLLSLKVLRKLTVNGFVEPHKNMEVMGFLHGIFERLKQFLECSRSIGTDNVCRDRLEKTIILFTKVLLDFLDQHPFSFTPLIQRSLEFSVSYVFTEVGEGVTFERFIVQCMNLIKMIVKNYAYKPSKNFEDSSPETLEAHKIKMAFFTYPTLTEICRRLVSHYFLLTEEELTMWEEDPEGFTVEETGGDSWKYSLRPCTEVLFIDIFHEYNQTLTPVLLEMMQTLQGPTNVEDMNALLIKDAVYNAVGLAAYELFDSVDFDQWFKNQLLPELQVIHNRYKPLRRRVIWLIGQWISVKFKSDLRPMLYEAICNLLQDQDLVVRIETATTLKLTVDDFEFRTDQFLPYLETMFTLLFQLLQQVTECDTKMHVLHVLSCVIERVNMQIRPYVGCLVQYLPLLWKQSEEHNMLRCAILTTLIHLVQGLGADSKNLYPFLLPVIQLSTDVSQPPHVYLLEDGLELWLVTLENSPCITPELLRIFQNMSPLLELSSENLRTCFKIINGYIFLSSTEFLQTYAVGLCQSFCELLKEITTEGQVQVLKVVENALKVNPILGPQMFQPILPYVFKGIIEGERYPVVMSTYLGVMGRVLLQNTSFFSSLLNEMAHKFNQEMDQLLGNMIEMWVDRMDNITQPERRKLSALALLSLLPSDNSVIQDKFCGIINISVEGLHDVMTEDPETGTYKDCMLMSHLEEPKVTEDEEPPTEQDKRKKMLALKDPVHTVSLQQFIYEKLKAQQEMLGEQGFQSLMETVDTEIVTQLQEFLQGF

SEQ ID NO: 49715 - protein, 64 aa, Homo sapiens
MDLNSASTVVLQVLTQATSQDTAVLKPAEEQLKQWETQPGFYSVLLNIFTNHTLDINVRWLAVL

SEQ ID NO: 49716 - protein, 162 aa, Homo sapiens
MDLNSASTVVLQVLTQATSQDTAVLKPAEEQLKQWETQPGFYSVLLNIFTNHTLDINVRWLAVLYFKHGIDRYWRRVAPHALSEEEKTTLRAGLITNFNEPINQIATQIAVLIAKVARLDCPRQWPELIPTLIESVKVQDDLRQHRALLTFYHVTKTLASKR

SEQ ID NO: 49717 - protein, 149 aa, Homo sapiens
MDLNSASTVVLQVLTQATSQDTAVLKPAEEQLKQWETQPGFYSVLLNIFTNHTLDINVRWLAVLYFKHGIDRYWRRVAPHALSEEEKTTLRAGLITNFNEPINQIATQIAVLIAKVARLDCPRQWPELIPTLIESVKVQDDLRQHRALL

SEQ ID NO: 49718 - protein, 474 aa, Homo sapiens
MMQTLQGPTNVEDMNALLIKDAVYNAVGLAAYELFDSVDFDQWFKNQLLPELQVIHNRYKPLRRRVIWLIGQWISVKFKSDLRPMLYEAICNLLQDQDLVVRIETATTLKLTVDDFEFRTDQFLPYLETMFTLLFQLLQQVTECDTKMHVLHVLSCVIERVNMQIRPYVGCLVQYLPLLWKQSEEHNMLRCAILTTLIHLVQGLGADSKNLYPFLLPVIQLSTDVSQPPHVYLLEDGLELWLVTLENSPCITPELLRIFQNMSPLLELSSENLRTCFKIINGYIFLSSTEFLQTYAVGLCQSFCELLKEITTEGQVQVLKVVENALKVNPILGPQMFQPILPYVFKGIIEGERYPVVMSTYLGVMGRVLLQNTSFFSSLLNEMAHKFNQEMDQLLGNMIEMWVDRMDNITQPERRKLSALALLSLLPSDNSVIQDKFCGIINISVEGLHDVMTEDPETGTYKDCMLMSHLEEPK

SEQ ID NO: 49719 - protein, 1038 aa, Homo sapiens
MDPNTIIEALRGTMDPALREAAERQLNEAHKSLNFVSTLLQITMSEQLDLPVRQAGVIYLKNMITQYWPDRETAPGDISPYTIPEEDRHCIRENIVEAIIHSPELIRVQLTTCIHHIIKHDYPSRWTAIVDKIGFYLQSDNSACWLGILLCLYQLVKNYEYKKPEERSPLVAAMQHFLPVLKDRFIQLLSDQSDQSVLIQKQIFKIFYALVQYTLPLELINQQNLTEWIEILKTVVNRDVPNETLQVEEDDRPELPWWKCKKWALHILARLFERYGSPGNVSKEYNEFAEVFLKAFAVGVQQVLLKVLYQYKEKQYMAPRVLQQTLNYINQGVSHALTWKNLKPHIQGIIQDVIFPLMCYTDADEELWQEDPYEYIRMKFDVFEDFISPTTAAQTLLFTACSKRKEVLQKTMGFCYQILTEPNADPRKKDGALHMIGSLAEILLKKKIYKDQMEYMLQNHVFPLFSSELGYMRARACWVLHYFCEVKFKSDQNLQTALELTRRCLIDDREMPVKVEAAIALQVLISNQEKAKEYITPFIRPVMQALLHIIRETENDDLTNVIQKMICEYSEEVTPIAVEMTQHLAMTFNQVIQTGPDEEGSDDKAVTAMGILNTIDTLLSVVEDHKEITQQLEGICLQVIGTVLQQHVLEFYEEIFSLAHSLTCQQVSPQMWQLLPLVFEVFQQDGFDYFTDMMPLLHNYVTVDTDTLLSDTKYLEMIYSMCKKVLTGVAGEDAECHAAKLLEVIILQCKGRGIDQCIPLFVEAALERLTREVKTSELRTMCLQVAIAALYYNPHLLLNTLENLRFPNNVEPVTNHFITQWLNDVDCFLGLHDRKMCVLGLCALIDMEQIPQVLNQVSGQILPAFILLFNGLKRAYACHAEHENDSDDDDEAEDDDETEELGSDEDDIDEDGQEYLEILAKQAGEDGDDEDWEEDDAEETALEGYSTIIDDEDNPVDEYQIFKAIFQTIQNRNPVWYQALTHGLNEEQRKQLQDIATLADQRRAAHESKMIEKHGGYKFSAPVVPSSFNFGGPAPGMN

SEQ ID NO: 49720 - protein, 1037 aa, Homo sapiens
MDLNRIIQALKGTIDPKLRIAAENELNQSYKIINFAPSLLRIIVSDHVEFPVRQAAAIYLKNMVTQYWPDREPPPGEAIFPFNIHENDRQQIRDNIVEGIIRSPDLVRVQLTMCLRAIIKHDFPGHWPGVVDKIDYYLQSQSSASWLGSLLCLYQLVKTYEYKKAEEREPLIIAMQIFLPRIQQQIVQLLPDSSYYSVLLQKQILKIFYALVQYALPLQLVNNQTMTTWMEIFRTIIDRTVPPETLHIDEDDRPELVWWKCKKWALHIVARLFERYGSPGNVTKEYFEFSEFFLKTYAVGIQQVLLKILDQYRQKEYVAPRVLQQAFNYLNQGVVHSITWKQMKPHIQNISEDVIFSVMCYKDEDEELWQEDPYEYIRMKFDIFEDYASPTTAAQTLLYTAAKKRKEVLPKMMAFCYQILTDPNFDPRKKDGALHVIGSLAEILLKKSLFKDQMELFLQNHVFPLLLSNLGYLRARSCWVLHAFSSLKFHNELNLRNAVELAKKSLIEDKEMPVKVEAALALQSLISNQIQAKEYMKPHVRPIMQELLHIVRETENDDVTNVIQKMICEYSQEVASIAVDMTQHLAEIFGKVLQSDEYEEVEDKTVMAMGILHTIDTILTVVEDHKEITQQLENICLRIIDLVLQKHVIEFYEEILSLAYSLTCHSISPQMWQLLGILYEVFQQDCFEYFTDMMPLLHNYVTIDTDTLLSNAKHLEILFTMCRKVLCGDAGEDAECHAAKLLEVIILQCKGRGIDQCIPLFVQLVLERLTRGVKTSELRTMCLQVAIAALYYNPDLLLHTLERIQLPHNPGPITVQFINQWMNDTDCFLGHHDRKMCIIGLSILLELQNRPPAVDAVVGQIVPSILFLFLGLKQVCATRQLVNREDRSKAEKADMEENEEISSDEEETNVTAQAMQSNNGRGEDEEEEDDDWDEEVLEETALEGFSTPLDLDNSVDEYQFFTQALITVQSRDAAWYQLLMAPLSEDQRTALQEVYTLAEHRRTVAEAKKKIEQQGGFTFENKGVLSAFNFGTVPSNN

SEQ ID NO: 49721 - protein, 832 aa, Homo sapiens
MESLTLKGYALPLQLVNNQTMTTWMEIFRTIIDRTVPPETLHIDEDDRPELVWWKCKKWALHIVARLFERYGSPGNVTKEYFEFSEFFLKTYAVGIQQVLLKILDQYRQKEYVAPRVLQQAFNYLNQGVVHSITWKQMKPHIQNISEDVIFSVMCYKDEDEELWQEDPYEYIRMKFDIFEDYASPTTAAQTLLYTAAKKRKEVLPKMMAFCYQILTDPNFDPRKKDGALHVIGSLAEILLKKSLFKDQMELFLQNHVFPLLLSNLGYLRARSCWVLHAFSSLKFHNELNLRNAVELAKKSLIEDKEMPVKVEAALALQSLISNQIQAKEYMKPHVRPIMQELLHIVRETENDDVTNVIQKMICEYSQEVASIAVDMTQHLAEIFGKVLQSDEYEEVEDKTVMAMGILHTIDTILTVVEDHKEITQQLENICLRIIDLVLQKHVIEFYEEILSLAYSLTCHSISPQMWQLLGILYEVFQQDCFEYFTDMMPLLHNYVTIDTDTLLSNAKHLEILFTMCRKVLCGDAGEDAECHAAKLLEVIILQCKGRGIDQCIPLFVQLVLERLTRGVKTSELRTMCLQVAIAALYYNPDLLLHTLERIQLPHNPGPITVQFINQWMNDTDCFLGHHDRKMCIIGLSILLELQNRPPAVDAVVGQIVPSILFLFLGLKQVCATRQLVNREDRSKAEKADMEENEEISSDEEETNVTAQAMQSNNGRGEDEEEEDDDWDEEVLEETALEGFSTPLDLDNSVDEYQFFTQALITVQSRDAAWYQLLMAPLSEDQRTALQEVYTLAEHRRTVAEAKKKIEQQGGFTFENKGVLSAFNFGTVPSNN

SEQ ID NO: 49722 - protein, 513 aa, Homo sapiens
LSSGHELAKEYMKPHVRPIMQELLHIVRETENDDVTNVIQKMICEYSQEVASIAVDMTQHLAEIFGKVLQSDEYEEVEDKTVMAMGILHTIDTILTVVEDHKEITQQLENICLRIIDLVLQKHVIEFYEEILSLAYSLTCHSISPQMWQLLGILYEVFQQDCFEYFTDMMPLLHNYVTIDTDTLLSNAKHLEILFTMCRKVLCGDAGEDAECHAAKLLEVIILQCKGRGIDQCIPLFVQLVLERLTRGVKTSELRTMCLQVAIAALYYNPDLLLHTLERIQLPHNPGPITVQFINQWMNDTDCFLGHHDRKMCIIGLSILLELQNRPPAVDAVVGQIVPSILFLFLGLKQVCATRQLVNREDRSKAEKADMEENEEISSDEEETNVTAQAMQSNNGRGEDEEEEDDDWDEEVLEETALEGFSTPLDLDNSVDEYQFFTQALITVQSRDAAWYQLLMAPLSEDQRTALQEVYTLAEHRRTVAEAKKKIEQQGGFTFENKGVLSAFNFGTVPSNN

SEQ ID NO: 49723 - protein, 1181 aa, Homo sapiens
MPENPATDKLQVLQVLDRLKMKLQEKGDTSQNEKLSMFYETLKSPLFNQILTLQQSIKQLKGQLNHIPSDCSANFDFSRKGLLVFTDGSITNGNVHRPSNNSTVSGLFPWTPKLGNEDFNSVIQQMAQGRQIEYIDIERPSTGGLGFSVVALRSQNLGKVDIFVKDVQPGSVADRDQRLKENDQILAINHTPLDQNISHQQAIALLQQTTGSLRLIVAREPVHTKSSTSSSLNDTTLPETVCWGHVEEVELINDGSGLGFGIVGGKTSGVVVRTIVPGGLADRDGRLQTGDHILKIGGTNVQGMTSEQVAQVLRNCGNSVRMLVARDPAGDISVTPPAPAALPVALPTVASKGPGSDSSLFETYNVELVRKDGQSLGIRIVGYVGTSHTGEASGIYVKSIIPGSAAYHNGHIQVNDKIVAVDGVNIQGFANHDVVEVLRNAGQVVHLTLVRRKTSSSTSPLEPPSDRGTVVEPLKPPALFLTGAVETETNVDGEDEEIKERIDTLKNDNIQALEKLEKVPDSPENELKSRWENLLGPDYEVMVATLDTQIADDAELQKYSKLLPIHTLRLGVEVDSFDGHHYISSIVSGGPVDTLGLLQPEDELLEVNGMQLYGKSRREAVSFLKEVPPPFTLVCCRRLFDDEASVDEPRRTETSLPETEVDHNMDVNTEEDDDGELALWSPEVKIVELVKDCKGLGFSILDYQDPLDPTRSVIVIRSLVADGVAERSGGLLPGDRLVSVNEYCLDNTSLAEAVEILKAVPPGLVHLGICKPLVEDNEEESCYILHSSSNEDKTEFSGTIHDINSSLILEAPKGFRDEPYFKEELVDEPFLDLGKSFHSQQKEIEQSKEAWEMHEFLTPRLQEMDEEREILVDEEYELYQDPSPSMELYPLSHIQEATPVPSVNELHFGTQWLHDNEPSESQEARTGRTVYSQEAQPYGYCPENVMKENFVMESLPSVPSTEGNSQQGRFDDLENLNSLAKTSLDLGMIPNDVQGPSLLIDLPVVAQRREQEDLPLYQHQATRVISKASAYTGMLSSRYATDTCELPEREEGEGEETPNFSHWGPPRIVEIFREPNVSLGISIVGGQTVIKRLKNGEELKGIFIKQVLEDSPAGKTNALKTGDKILEVSGVDLQNASHSEAVEAIKNAGNPVVFIVQSLSSTPAWVTEQDSVSKKKKNHEG

SEQ ID NO: 49724 - protein, 199 aa, Homo sapiens
MVQGGFPEKIRQRYADLPGELHIIELEKDKNGLGLSLAGNKDRSRMSIFVVGINPEGPAAADGRMRIGDELLEINNQILYGRSHQNASAIIKTAPSKVKLVFIRNEDAVNQMAVTPFPVPSSSPSSIEDQSGTEPISSEEDGSVEVGIKQLPESESFKLAVSQMKQQKYPTKVSFSSQEIPLAPASSYHSTDADFTGYG

SEQ ID NO: 49725 - protein, 1581 aa, Homo sapiens
MPENPATDKLQVLQVLDRLKMKLQEKGDTSQNEKLSMFYETLKSPLFNQILTLQQSIKQLKGQLNHIPSDCSANFDFSRKGLLVFTDGSITNGNVHRPSNNSTVSGLFPWTPKLGNEDFNSVIQQMAQGRQIEYIDIERPSTGGLGFSVVALRSQNLGKVDIFVKDVQPGSVADRDQRLKENDQILAINHTPLDQNISHQQAIALLQQTTGSLRLIVAREPVHTKSSTSSSLNDTTLPETVCWGHVEEVELINDGSGLGFGIVGGKTSGVVVRTIVPGGLADRDGRLQTGDHILKIGGTNVQGMTSEQVAQVLRNCGNSVRMLVARDPAGDISVTPPAPAALPVALPTVASKGPGSDSSLFETYNVELVRKDGQSLGIRIVGYVGTSHTGEASGIYVKSIIPGSAAYHNGHIQVNDKIVAVDGVNIQGFANHDVVEVLRNAGQVVHLTLVRRKTSSSTSPLEPPSDRGTVVEPLKPPALFLTGAVETETNVDGEDEEIKERIDTLKNDNIQALEKLEKVPDSPENELKSRWENLLGPDYEVMVATLDTQIADDAELQKYSKLLPIHTLRLGVEVDSFDGHHYISSIVSGGPVDTLGLLQPEDELLEVNGMQLYGKSRREAVSFLKEVPPPFTLVCCRRLFDDEASVDEPRRTETSLPETEVDHNMDVNTEEDDDGELALWSPEVKIVELVKDCKGLGFSILDYQDPLDPTRSVIVIRSLVADGVAERSGGLLPGDRLVSVNEYCLDNTSLAEAVEILKAVPPGLVHLGICKPLVEDNEEESCYILHSSSNEDKTEFSGTIHDINSSLILEAPKGFRDEPYFKEELVDEPFLDLGKSFHSQQKEIEQSKEAWEMHEFLTPRLQEMDEEREILVDEEYELYQDPSPSMELYPLSHIQEATPVPSVNELHFGTQWLHDNEPSESQEARTGRTVYSQEAQPYGYCPENVMKENFVMESLPSVPSTEGNSQQGRFDDLENLNSLAKTSLDLGMIPNDVQGPSLLIDLPVVAQRREQEDLPLYQHQATRVISKASAYTGMLSSRYATDTCELPEREEGEGEETPNFSHWGPPRIVEIFREPNVSLGISIVGGQTVIKRLKNGEELKGIFIKQVLEDSPAGKTNALKTGDKILEVSGVDLQNASHSEAVEAIKNAGNPVVFIVQSLSSTPRVIPNVHNKANKITGNQNQDTQEKKEKRQGTAPPPMKLPPPYKALTDDSDENEEEDAFTDQKIRQRYADLPGELHIIELEKDKNGLGLSLAGNKDRSRMSIFVVGINPEGPAAADGRMRIGDELLEINNQILYGRSHQNASAIIKTAPSKVKLVFIRNEDAVNQMAVTPFPVPSSSPSSIEDQSGTEPISSEEDGSVEVGIKQLPESESFKLAVSQMKQQKYPTKVSFSSQEIPLAPASSYHSTDADFTGYGGFQAPLSVDPATCPIVPGQEMIIEISKGRSGLGLSIVGGKDTPLFWRLGSPRAWSQHLVRAFMLHHPVTEVEGQNAIVIHEVYEEGAAARDGRLWAGDQILEVNGVDLRNSSHEEAITALRQTPQKVRLVVYRDEAHYRDEENLEIFPVDLQKKAGRGLGLSIVGK

SEQ ID NO: 49726 - protein, 1801 aa, Homo sapiens
MPENPATDKLQVLQVLDRLKMKLQEKGDTSQNEKLSMFYETLKSPLFNQILTLQQSIKQLKGQLNHIPSDCSANFDFSRKGLLVFTDGSITNGNVHRPSNNSTVSGLFPWTPKLGNEDFNSVIQQMAQGRQIEYIDIERPSTGGLGFSVVALRSQNLGKVDIFVKDVQPGSVADRDQRLKENDQILAINHTPLDQNISHQQAIALLQQTTGSLRLIVAREPVHTKSSTSSSLNDTTLPETVCWGHVEEVELINDGSGLGFGIVGGKTSGVVVRTIVPGGLADRDGRLQTGDHILKIGGTNVQGMTSEQVAQVLRNCGNSVRMLVARDPAGDISVTPPAPAALPVALPTVASKGPGSDSSLFETYNVELVRKDGQSLGIRIVGYVGTSHTGEASGIYVKSIIPGSAAYHNGHIQVNDKIVAVDGVNIQGFANHDVVEVLRNAGQVVHLTLVRRKTSSSTSPLEPPSDRGTVVEPLKPPALFLTGAVETETNVDGEDEEIKERIDTLKNDNIQALEKLEKVPDSPENELKSRWENLLGPDYEVMVATLDTQIADDAELQKYSKLLPIHTLRLGVEVDSFDGHHYISSIVSGGPVDTLGLLQPEDELLEVNGMQLYGKSRREAVSFLKEVPPPFTLVCCRRLFDDEASVDEPRRTETSLPETEVDHNMDVNTEEDDDGELALWSPEVKIVELVKDCKGLGFSILDYQDPLDPTRSVIVIRSLVADGVAERSGGLLPGDRLVSVNEYCLDNTSLAEAVEILKAVPPGLVHLGICKPLVEDNEEESCYILHSSSNEDKTEFSGTIHDINSSLILEAPKGFRDEPYFKEELVDEPFLDLGKSFHSQQKEIEQSKEAWEMHEFLTPRLQEMDEEREILVDEEYELYQDPSPSMELYPLSHIQEATPVPSVNELHFGTQWLHDNEPSESQEARTGRTVYSQEAQPYGYCPENVMKENFVMESLPSVPSTEGNSQQGRFDDLENLNSLAKTSLDLGMIPNDVQGPSLLIDLPVVAQRREQEDLPLYQHQATRVISKASAYTGMLSSRYATDTCELPEREEGEGEETPNFSHWGPPRIVEIFREPNVSLGISIVGGQTVIKRLKNGEELKGIFIKQVLEDSPAGKTNALKTGDKILEVSGVDLQNASHSEAVEAIKNAGNPVVFIVQSLSSTPRVIPNVHNKANKITGNQNQDTQEKKEKRQGTAPPPMKLPPPYKALTDDSDENEEEDAFTDQKIRQRYADLPGELHIIELEKDKNGLGLSLAGNKDRSRMSIFVVGINPEGPAAADGRMRIGDELLEINNQILYGRSHQNASAIIKTAPSKVKLVFIRNEDAVNQMAVTPFPVPSSSPSSIEDQSGTEPISSEEDGSVEVGIKQLPESESFKLAVSQMKQQKYPTKVSFSSQEIPLAPASSYHSTDADFTGYGGFQAPLSVDPATCPIVPGQEMIIEISKGRSGLGLSIVGGKDTPLNAIVIHEVYEEGAAARDGRLWAGDQILEVNGVDLRNSSHEEAITALRQTPQKVRLVVYRDEAHYRDEENLEIFPVDLQKKAGRGLGLSIVGKRNGSGVFISDIVKGGAADLDGRLIQGDQILSVNGEDMRNASQETVATILKCAQGLVQLEIGRLRAGSWTSARTTSQNSQGSQQSAHSSCHPSFAPVITGLQNLVGTKRVSDPSQKNSGTDMEPRTVEINRELSDALGISIAGGRGSPLGDIPVFIAMIQASGVAARTQKLKVGDRIVSINGQPLDGLSHADVVNLLKNAYGRIILQVVADTNISAIAAQLENMSTGYHLGSPTAEHHPEDTEEQLQMTAD

SEQ ID NO: 49727 - protein, 1523 aa, Homo sapiens
MPENPATDKLQVLQVLDRLKMKLQEKGDTSQNEKLSMFYETLKSPLFNQILTLQQSIKQLKGQLNHIPSDCSANFDFSRKGLLVFTDGSITNGNVHRPSNNSTVSGLFPWTPKLGNEDFNSVIQQMAQGRQIEYIDIERPSTGGLGFSVVALRSQNLGKVDIFVKDVQPGSVADRDQRLKENDQILAINHTPLDQNISHQQAIALLQQTTGSLRLIVAREPVHTKSSTSSSLNDTTLPETVCWGHVEEVELINDGSGLGFGIVGGKTSGVVVRTIVPGGLADRDGRLQTGDHILKIGGTNVQGMTSEQVAQVLRNCGNSVRMLVARDPAGDISVTPPAPAALPVALPTVASKGPGSDSSLFETYNVELVRKDGQSLGIRIVGYVGTSHTGEASGIYVKSIIPGSAAYHNGHIQVNDKIVAVDGVNIQGFANHDVVEVLRNAGQVVHLTLVRRKTSSSTSPLEPPSDRGTVVEPLKPPALFLTGAVETETNVDGEDEEIKERIDTLKNDNIQALEKLEKVPDSPENELKSRWENLLGPDYEVMVATLDTQIADDAELQKYSKLLPIHTLRLGVEVDSFDGHHYISSIVSGGPVDTLGLLQPEDELLEVNGMQLYGKSRREAVSFLKEVPPPFTLVCCRRLFDDEASVDEPRRTETSLPETEVDHNMDVNTEEDDDGELALWSPEVKIVELVKDCKGLGFSILDYQDPLDPTRSVIVIRSLVADGVAERSGGLLPGDRLVSVNEYCLDNTSLAEAVEILKAVPPGLVHLGICKPLVEDNEEESCYILHSSSNEDKTEFSGTIHDINSSLILEAPKGFRDEPYFKEELVDEPFLDLGKSFHSQQKEIEQSKEAWEMHEFLTPRLQEMDEEREILVDEEYELYQDPSPSMELYPLSHIQEATPVPSVNELHFGTQWLHDNEPSESQEARTGRTVYSQEAQPYGYCPENVMKENFVMESLPSVPSTEGNSQQGRFDDLENLNSLAKTSLDLGMIPNDVQGPSLLIDLPVVAQRREQEDLPLYQHQATRVISKASAYTGMLSSRYATDTCELPEREEGEGEETPNFSHWGPPRIVEIFREPNVSLGISIVGGQTVIKRLKNGEELKGIFIKQVLEDSPAGKTNALKTGDKILEVSGVDLQNASHSEAVEAIKNAGNPVVFIVQSLSSTPRVIPNVHNKANKITGNQNQDTQEKKEKRQGTAPPPMKLPPPYKALTDDSDENEEEDAFTDQKIRQRYADLPGELHIIELEKDKNGLGLSLAGNKDRSRMSIFVVGINPEGPAAADGRMRIGDELLEINNQILYGRSHQNASAIIKTAPSKVKLVFIRNEDAVNQMAVTPFPVPSSSPSSIEDQSGTEPISSEEDGSVEVGIKQLPESESFKLAVSQMKQQKYPTKVSFSSQEIPLAPASSYHSTDADFTGYGGFQAPLSVDPATCPIVPGQEMIIEISKGRSGLGLSIVGGKDTPLVNGVDLRNSSHEEAITALRQTPQKVRLVVYRDEAHYRDEENLEIFPVDLQKKAGRGLGLSIVGK

SEQ ID NO: 49728 - protein, 452 aa, Homo sapiens
MVQGGFPEKIRQRYADLPGELHIIELEKDKNGLGLSLAGNKDRSRMSIFVVGINPEGPAAADGRMRIGDELLEINNQILYGRSHQNASAIIKTAPSKVKLVFIRNEDAVNQMAVTPFPVPSSSPSSIEDQSGTEPISSEEDGSVEVGIKQLPESESFKLAVSQMKQQKYPTKVSFSSQEIPLAPASSYHSTDADFTGYGGFQAPLSVDPATCPIVPGQEMIIEISKGRSGLGLSIVGGKDTPLFWRLGSPRAWSQHLVRAFMLHHPVTEVEGQNAIVIHEVYEEGAAARDGRLWAGDQILEVNGVDLRNSSHEEAITALRQTPQKVRLVVYRDEAHYRDEENLEIFPVDLQKKAGRGLGLSIVGKRNGSGVFISDIVKGGAADLDGRLIQGDQILSVNGEDMRNASQETVATILKCAQGLVQLEIGRLRAGSWTSARTTSQNSQVVDGFSSD

SEQ ID NO: 49729 - protein, 197 aa, Homo sapiens [sequence omitted]

SEQ ID NO: 49730 - protein, 411 aa, Homo sapiens
MSPARLRPRLHFCLVLLLLLVVPAAWGCGPGRVVGSRRRPPRKLVPLAYKQFSPNVPEKTLGASGRYEGKIARSSERFKELTPNYNPDIIFKDEENTGADRLMTQRCKDRLNSLAISVMNQWPGVKLRVTEGWDEDGHHSEESLHYEGRAVDITTSDRDRNKYGLLARLAVEAGFDWVYYESKAHVHCSVKSEHSAAAKTGGCFPAGAQVRLESGARVALSAVRPGDRVLAMGEDGSPTFSDVLIFLDREPHRLRAFQVIETQDPPRRLALTPAHLLFTADNHTEPAARFRATFASHVQPGQYVLVAGVPGLQPARVAAVSTHVALGAYAPLTKHGTLVVEDVVASCFAAVADHHLAQLAFWPLRLFHSLAWGSWTPGEGVHWYPQLLYRLGRLLLEEGSFHPLGMSGAGS

SEQ ID NO: 49731 - protein, 403 aa, Homo sapiens [sequence omitted]

SEQ ID NO: 49732 - protein, 78 aa, Homo sapiens
MAHAMENSWTISKEYHIDEEVGFALPNPQENLPDFYNDWMFIAKHLPDLIESGQLRERVEKLNMLSIDHLTDHKSQRL

SEQ ID NO: 49733 - protein, 180 aa, Homo sapiens
MAHAMENSWTISKEYHIDEEVGFALPNPQENLPDFYNDWMFIAKHLPDLIESGQLRERVEKLNMLSIDHLTDHKSQRLARLVLGCITMAYVWGKGHGDVRKVLPRNIAVPYCQLSKKLELPPILVYADCVLANWKKKDPNKPLTYENMDVLFSFRDGDCSKGFFLVSLLVEIAAASAIKV

SEQ ID NO: 49734 - protein, 403 aa, Homo sapiens [sequence omitted]

SEQ ID NO: 49735 - protein, 47 aa, Homo sapiens
MAHAMENSWTISKEYHIDEEVGFALPNPQENLPDFYNDWMFIAKHLP

SEQ ID NO: 49736 - protein, 407 aa, Homo sapiens
MEPHRPNVKTAVPLSLESYHISEEYGFLLPDSLKELPDHYRPWMEIANKLPQLIDAHQLQAHVDKMPLLSCQFLKGHREQRLAHLVLSFLTMGYVWQEGEAQPAEVLPRNLALPFVEVSRNLGLPPILVHSDLVLTNWTKKDPDGFLEIGNLETIISFPGGESLHGFILVTALVEKEAVPGIKALVQATNAILQPNQEALLQALQRLRLSIQDITKTLGQMHDYVDPDIFYAGIRIFLSGWKDNPAMPAGLMYEGVSQEPLKYSGGSAAQSTVLHAFDEFLGIRHSKESGDFLYRMRDYMPPSHKAFIEDIHSAPSLRDYILSSGQDHLLTAYNQCVQALAELRSYHITMVTKYLITAAAKAKHGKPNHLPGPPQALKDRGTGGTAVMSFLKSVRDKTLESILHPRG

SEQ ID NO: 49737 - protein, 420 aa, Homo sapiens
MLHFHYYDTSNKIMEPHRPNVKTAVPLSLESYHISEEYGFLLPDSLKELPDHYRPWMEIANKLPQLIDAHQLQAHVDKMPLLSCQFLKGHREQRLAHLVLSFLTMGYVWQEGEAQPAEVLPRNLALPFVEVSRNLGLPPILVHSDLVLTNWTKKDPDGFLEIGNLETIISFPGGESLHGFILVTALVEKEAVPGIKALVQATNAILQPNQEALLQALQRLRLSIQDITKTLGQMHDYVDPDIFYAGIRIFLSGWKDNPAMPAGLMYEGVSQEPLKYSGGSAAQSTVLHAFDEFLGIRHSKESGDFLYRMRDYMPPSHKAFIEDIHSAPSLRDYILSSGQDHLLTAYNQCVQALAELRSYHITMVTKYLITAAAKAKHGKPNHLPGPPQALKDRGTGGTAVMSFLKSVRDKTLESILHPRG

SEQ ID NO: 49738 - protein, 263 aa, Homo sapiens
MKGGFTGGDEYQKHFLPRDYLATYYSFDGSPSPEAEMLKFNLECLHKTFGPGGLQGDTLIDIGSGPTIYQVLAACDSFQDITLSDFTDRNREELEKWLKKEPGAYDWTPAVKFACELEGNSGRWEEKEEKLRAAVKRVLKCDVHLGNPLAPAVLPLADCVLTLLAMECACCSLDAYRAALCNLASLLKPGGHLVTTVTLRLPSYMVGKREFSCVALEKEEVEQAVLDAGFDIEQLLHSPQSYSVTNAANNGVCFIVARKKPGP

SEQ ID NO: 49739 - protein, 262 aa, Homo sapiens
MKGGFTGGDEYQKHFLPRDYLATYYSFDGSPSPEAEMLKFNLECLHKTFGPGLQGDTLIDIGSGPTIYQVLAACDSFQDITLSDFTDRNREELEKWLKKEPGAYDWTPAVKFACELEGNSGRWEEKEEKLRAAVKRVLKCDVHLGNPLAPAVLPLADCVLTLLAMECACCSLDAYRAALCNLASLLKPGGHLVTTVTLRLPSYMVGKREFSCVALEKEEVEQAVLDAGFDIEQLLHSPQSYSVTNAANNGVCFIVARKKPGP

SEQ ID NO: 49740 - protein, 199 aa, Homo sapiens
MKSGLWYFFLFCLRIKVLTGEINGSANYEMFIFHNGGVQILCKYPDIVQQFKMQLLKGGQILCDLTKTKGSGNTVSIKSLKFCHSQLSNNSVSFFLYNLDHSHANYYFCNLSIFDPPPFKVTLTGGYLHIYESQLCCQLKFWLPIGCAAFVVVCILGCILICWLTKKKYSSSVHDPNGEYMFMRAVNTAKKSRLTDVTL

SEQ ID NO: 49741 - protein, 168 aa, Homo sapiens
MKSGLWYFFLFCLRIKVLTGEINGSANYEMFIFHNGGVQILCKYPDIVQQFKMQLLKGGQILCDLTKTKGSGNTVSIKSLKFCHSQLSNNSVSFFLYNLDHSHANYYFCNLSIFDPPPFKVTLTGGYLHIYESQLCCQLKFWLPIGCAAFVVVCILGCILICWLTKKM

SEQ ID NO: 49742 - protein, 309 aa, Homo sapiens
MRLGSPGLLFLLFSSLRADTQEKEVRAMVGSDVELSCACPEGSRFDLNDVYVYWQTSESKTVVTYHIPQNSSLENVDSRYRNRALMSPAGMLRGDFSLRLFNVTPQDEQKFHCLVLSQSLGFQEVLSVEVTLHVAANFSVPVVSAPHSPSQDELTFTCTSINGYPRPNVYWINKTDNSLLDQALQNDTVFLNMRGLYDVVSVLRIARTPSVNIGCCIENVLLQQNLTVGSQTGNDIGERDKITENPVSTGEKNAATWSILAVLCLLVVVAVAIGWVCRDRCLQHSYAGAWAVSPETELTESWNLLLLLS

SEQ ID NO: 49743 - protein, 185 aa, Homo sapiens
MRLGSPGLLFLLFSSLRAANFSVPVVSAPHSPSQDELTFTCTSINGYPRPNVYWINKTDNSLLDQALQNDTVFLNMRGLYDVVSVLRIARTPSVNIGCCIENVLLQQNLTVGSQTGNDIGERDKITENPVSTGEKNAATWSILAVLCLLVVVAVAIGWVCRDRCLQHSYAGAWAVSPETELTGHV

SEQ ID NO: 49744 - protein, 302 aa, Homo sapiens
MRLGSPGLLFLLFSSLRADTQEKEVRAMVGSDVELSCACPEGSRFDLNDVYVYWQTSESKTVVTYHIPQNSSLENVDSRYRNRALMSPAGMLRGDFSLRLFNVTPQDEQKFHCLVLSQSLGFQEVLSVEVTLHVAANFSVPVVSAPHSPSQDELTFTCTSINGYPRPNVYWINKTDNSLLDQALQNDTVFLNMRGLYDVVSVLRIARTPSVNIGCCIENVLLQQNLTVGSQTGNDIGERDKITENPVSTGEKNAATWSILAVLCLLVVVAVAIGWVCRDRCLQHSYAGAWAVSPETELTGHV

SEQ ID NO: 49745 - protein, 366 aa, Homo sapiens
MVLHLLLFLLLTPQGGHSCQGLELARELVLAKVRALFLDALGPPAVTREGGDPGVRRLPRRHALGGFTHRGSEPEEEEDVSQAILFPATDASCEDKSAARGLAQEAEEGLFRYMFRPSQHTRSRQVTSAQLWFHTGLDRQGTAASNSSEPLLGLLALSPGGPVAVPMSLGHAPPHWAVLHLATSALSLLTHPVLVLLLRCPLCTCSARPEATPFLVAHTRTRPPSGGERARRSTPLMSWPWSPSALRLLQRPPEEPAAHANCHRVALNISFQELGWERWIVYPPSFIFHYCHGGCGLHIPPNLSLPVPGAPPTPAQPYSLLPGAQPCCAALPGTMRPLHVRTTSDGGYSFKYETVPNLLTQHCACI

SEQ ID NO: 49746 - protein, 426 aa, Homo sapiens
MPLLWLRGFLLASCWIIVRSSPTPGSEGHSAAPDCPSCALAALPKDVPNSQPEMVEAVKKHILNMLHLKKRPDVTQPVPKAALLNAIRKLHVGKVGENGYVEIEDDIGRRAEMNELMEQTSEIITFAESGTARKTLHFEISKEGSDLSVVERAEVWLFLKVPKANRTRTKVTIRLFQQQKHPQGSLDTGEEAEEVGLKGERSELLLSEKVVDARKSTWHVFPVSSSIQRLLDQGKSSLDVRIACEQCQESGASLVLLGKKKKKEEEGEGKKKGGGEGGAGADEEKEQSHRPFLMLQARQSEDHPHRRRRRGLECDGKVNICCKKQFFVSFKDIGWNDWIIAPSGYHANYCEGECPSHIAGTSGSSLSFHSTVINHYRMRGHSPFANLKSCCVPTKLRPMSMLYYDDGQNIIKKDIQNMIVEECGCS

SEQ ID NO: 49747 - protein, 426 aa, Homo sapiens; identical to SEQ ID NO: 49746

SEQ ID NO: 49748 - protein, 407 aa, Homo sapiens
MDGLPGRALGAACLLLLAAGWLGPEAWGSPTPPPTPAAPPPPPPPGSPGGSQDTCTSCGGFRRPEELGRVDGDFLEAVKRHILSRLQMRGRPNITHAVPKAAMVTALRKLHAGKVREDGRVEIPHLDGHASPGADGQERVSEIISFAETDGLASSRVRLYFFISNEGNQNLFVVQASLWLYLKLLPYVLEKGSRRKVRVKVYFQEQGHGDRWNMVEKRVDLKRSGWHTFPLTEAIQALFERGERRLNLDVQCDSCQELAVVPVFVDPGEESHRPFVVVQARLGDSRHRIRKRGLECDGRTNLCCRQQFFIDFRLIGWNDWIIAPTGYYGNYCEGSCPAYLAGVPGSASSFHTAVVNQYRMRGLNPGTVNSCCIPTKLSTMSMLYFDDEYNIVKRDVPNMIVEECGCA

SEQ ID NO: 49749 - protein, 352 aa, Homo sapiens
MTSSLLLAFLLLAPTTVATPRAGGQCPACGGPTLELESQRELLLDLAKRSILDKLHLTQRPTLNRPVSRAALRTALQHLHGVPQGALLEDNREQECEIISFAETGLSTINQTRLDFHFSSDRTAGDREVQQASLMFFVQLPSNTTWTLKVRVLVLGPHNTNLTLATQYLLEVDASGWHQLPLGPEAQAACSQGHLTLELVLEGQVAQSSVILGGAAHRPFVAARVRVGGKHQIHRRGIDCQGGSRMCCRQEFFVDFREIGWHDWIIQPEGYAMNFCIGQCPLHIAGMPGIAASFHTAVLNLLKANTAAGTTGGGSCCVPTARRPLSLLYYDRDSNIVKTDIPDMVVEACGCS

SEQ ID NO: 49750 - protein, 350 aa, Homo sapiens
MRLPDVQLWLVLLWALVRAQGTGSVCPSCGGSKLAPQAERALVLELAKQQILDGLHLTSRPRITHPPPQAALTRALRRLQPGSVAPGNGEEVISFATVTDSTSAYSSLLTFHLSTPRSHHLYHARLWLHVLPTLPGTLCLRIFRWGPRRRRQGSRTLLAEHHITNLGWHTLTLPSSGLRGEKSGVLKLQLDCRPLEGNSTVTGQPRRLLDTAGHQQPFLELKIRANEPGAGRARRRTPTCEPATPLCCRRDHYVDFQELGWRDWILQPEGYQLNYCSGQCPPHLAGSPGIAASFHSAVFSLLKANNPWPASTSCCVPTARRPLSLLYLDHNGNVVKTDVPDMVVEACGCS

SEQ ID NO: 49751 - protein, 1353 aa, Homo sapiens
MSSPMPDCTSKCRSLKHALDVLSVVTKGSENQIKAFLSSHCYNAATIKDVFGRNALHLVSSCGKKGVLDWLIQKGVDLLVKDKESGWTALHRSIFYGHIDCVWSLLKHGVSLYIQDKEGLSALDLVMKDRPTHVVFKNTDPTDVYTWGDNTNFTLGHGSQNSKHHPELVDLFSRSGIYIKQVVLCKFHSVFLSQKGQVYTCGHGPGGRLGHGDEQTCLVPRLVEGLNGHNCSQVAAAKDHTVVLTEDGCVYTFGLNIFHQLGIIPPPSSCNVPRQIQAKYLKGRTIIGVAAGRFHTVLWTREAVYTMGLNGGQLGCLLDPNGEKCVTAPRQVSALHHKDIALSLVAASDGATVCVTTRGDIYLLADYQCKKMASKQLNLKKVLVSGGHMEYKVDPEHLKENGGQKICILAMDGAGRVFCWRSVNSSLKQCRWAYPRQVFISDIALNRNEILFVTQDGEGFRGRWFEEKRKSSEKKEILSNLHNSSSDVSYVSDINSVYERIRLEKLTFAHRAVSVSTDPSGCNFAILQSDPKTSLYEIPAVSSSSFFEEFGKLLREADEMDSIHDVTFQVGNRLFPAHKYILAVHSDFFQKLFLSDGNTSEFTDIYQKDEDSAGCHLFVVEKVHPDMFEYLLQFIYTDTCDFLTHGFKPRIHLNKNPEEYQGTLNSHLNKVNFHEDDNQKSAFEVYKSNQAQTVSERQKSKPKSCKKGKNIREDDPVRMLQTVAKKFDFSNLSSRLDGVRFENEKINVIAKNTGNKLKLSQKKCSFLCDVTMKSVDGKEFPCHKCVLCARLEYFHSMLSSSWIEASSCAALEMPIHSDILKVILDYLYTDEAVVIKESQNVDFICSVLVVADQLLITRLKEICEVALTEKLTLKNAAMLLEFAAMYSAKQLKLSCLQFIGLNMAALLEARSLDVLSDGVLKDLSEFYRKMIPAMDRRVITPYQDGPDISYLEVEDGDIFLKEEINMEQNHSETMFKKAKTKAKKKPRKRSDSSGGYNLSDIIQSPSSTGLLKSGKTNSVESLPELLTSDSEGSYAGVGSPRDLQSPDFTTGFHSDKIEAKVKPYVNGTSPVYSREDLKPWEKSPILKISAPQPIPSNRIDTTSSASWVAGSFSPVSPPVVDLRTIMEIEESRQKCGATPKSHLGKTVSHGVKLSQKQRKMIALTTKENNSGMNSMETVLFTPSKAPKPVNAWASSLHSVSSKSFRDFLLEEKKSVTSHSSGDHVKKVSFKGIENSQAPKIVRCSTHGTPGPEGNHISDLPLLDSPNPWLSSSVTAPSMVAPVTFASIVEEELQQEAALIRSREKPLALIQIEEHAIQDLLVFYEAFGNPEEFVIVERTPQGPLAVPMWNKHGC

SEQ ID NO: 49752 - protein, 134 aa, Homo sapiens
MKAFSPVRSVRKNSLSDHSLGISRSKTPVDDPMSLLYNMNDCYSKLKELVPSIPQNKKVSKMEILQHVIDYILDLQIALDSHPTIVSLHHQRPGQNQASRTPLTTLNTDISILSLQASEFPSELMSNDSKALCG

SEQ ID NO: 49753 - protein, 134 aa, Homo sapiens; identical to SEQ ID NO: 49752

SEQ ID NO: 49754 - protein, 134 aa, Homo sapiens; identical to SEQ ID NO: 49752

SEQ ID NO: 49755 - protein, 119 aa, Homo sapiens
MKALSPVRGCYEAVCCLSERSLAIARGRGKGPAAEEPLSLLDDMNHCYSRLRELVPGVPRGTQLSQVEILQRVIDYILDLQVVLAEPAPGPPDGPHLPIQTAELTPELVISNDKRSFCH

SEQ ID NO: 49756 - protein, 161 aa, Homo sapiens
MKAVSPVRPSGRKAPSGCGGGELALRCLAEHGHSLGGSAAAAAAAAAARCKAAEAAADEPALCLQCDMNDCYSRLRRLVPTIPPNKKVSKVEILQHVIDYILDLQLALETHPALLRQPPPPAPPHHPAGTCPAAPPRTPLTALNTDPAGAVNKQGDSILCR

SEQ ID NO: 49757 - protein, 280 aa, Homo sapiens
MLGQQQQQLYSSAALLTGERSRLLTCYVQDYLECVESLPHDMQRNVSVLRELDNKYQETLKEIDDVYEKYKKEDDLNQKKRLQQLLQRALINSQELGDEKIQIVTQMLELVENRARQMELHSQCFQDPAESERASDKAKMDSSQPERSSRRPRRQRTSESRDLCHMANGIEDCDDQPPKEKKSKSAKKKKRSKAKQEREASPVEFAIDPNEPTYCLCNQVSYGEMIGCDNEQCPIEWFHFSCVSLTYKPKGKWYCPKCRGDNEKTMDKSTEKTKKDRRSR

SEQ ID NO: 49758 - protein, 240 aa, Homo sapiens
MDQDGDQQLGPSRILAPQTLKEIDDVYEKYKKEDDLNQKKRLQQLLQRALINSQELGDEKIQIVTQMLELVENRARQMELHSQCFQDPAESERASDKAKMDSSQPERSSRRPRRQRTSESRDLCHMANGIEDCDDQPPKEKKSKSAKKKKRSKAKQEREASPVEFAIDPNEPTYCLCNQVSYGEMIGCDNEQCPIEWFHFSCVSLTYKPKGKWYCPKCRGDNEKTMDKSTEKTKKDRRSR

SEQ ID NO: 49759 - protein, 418 aa, Homo sapiens
MLYLEDYLEMIEQLPMDLRDRFTEMREMDLQVQNAMDQLEQRVSEFFMNAKKNKPEWREEQMASIKKDYYKALEDADEKVQLANQIYDLVDRHLRKLDQELAKFKMELEADNAGITEILERRSLELDTPSQPVNNHHAHSHTPVEKRKYNPTSHHTTTDHIPEKKFKSEALLSTLTSDASKENTLGCRNNNSTASSNNAYNVNSSQPLGSYNIGSLSSGTGAGAITMAAAQAVQATAQMKEGRRTSSLKASYEAFKNNDFQLGKEFSMARETVGYSSSSALMTTLTQNASSSAADSRSGRKSKNNNKSSSQQSSSSSSSSSLSSCSSSSTVVQEISQQTTVVPESDSNSQVDWTYDPNEPRYCICNQVSYGEMVGCDNQDCPIEWFHYGCVGLTEAPKGKWYCPQCTAAMKRRGSRHK

SEQ ID NO: 49760 - protein, 92 aa, Homo sapiens
MLYLEDYLEMIEQLPMDLRDRFTEMREMDLQVQNAMDQLEQRVSEFFMNAKKNKPEWREEQMASIKKDYYKALEDADEKVQLANQIYDLQHF

SEQ ID NO: 49761 - protein, 240 aa, Homo sapiens
MATAMYLEHYLDSIENLPCELQRNFQLMRELDQRTEDKKAEIDILAAEYISTVKTLSPDQRVERLQKIQNAYSKCKEYSDDKVQLAMQTYEMVDKHIRRLDADLARFEADLKDKMEGSDFESSGGRGLKKGRGQKEKRGSRGRGRRTSEEDTPKKKKHKGGSEFTDTILSVHPSDVLDMPVDPNEPTYCLCHQVSYGEMIGCDNPDCPIEWFHFACVDLTTKPKGKWFCPRCVQEKRKKK

SEQ ID NO: 49762 - protein, 226 aa, Homo sapiens
MATAMYLEHYLDSIENLPCELQRNFQLMRELDQRTEDKKAEIDILAAEYISTVKTLSPDQRVERLQKIQNAYSKCKEYSDDKVQLAMQTYEMVDKHIRRLDADLARFEADLKDKMEGSDFESSGGRGLKKGRGQKEKRGSRGRGRRTSEEDTPKKKKHKGGSEFTDTILSVHPSDVLDMPVDPNEPTYCLCHQVSYGEMIGCDNPDCPIEWFHFACVDLTTKPKGK

SEQ ID NO: 49763 - protein, 754 aa, Homo sapiens
MFSGGCHSPGFGRPSPAFPAPGSPPPAPRPCRQETGEQIAIKQCRQELSPRNRERWCLEIQIMRRLTHPNVVAARDVPEGMQNLAPNDLPLLAMEYCQGGDLRKYLNQFENCCGLREGAILTLLSDIASALRYLHENRIIHRDLKPENIVLQQGEQRLIHKIIDLGYAKELDQGSLCTSFVGTLQYLAPELLEQQKYTVTVDYWSFGTLAFECITGFRPFLPNWQPVQWHSKVRQKSEVDIVVSEDLNGTVKFSSSLPYPNNLNSVLAERLEKWLQLMLMWHPRQRGTDPTYGPNGCFKALDDILNLKLVHILNMVTGTIHTYPVTEDESLQSLKARIQQDTGIPEEDQELLQEAGLALIPDKPATQCISDGKLNEGHTLDMDLVFLFDNSKITYETQISPRPQPESVSCILQEPKRNLAFFQLRKVWGQVWHSIQTLKEDCNRLQQGQRAAMMNLLRNNSCLSKMKNSMASMSQQLKAKLDFFKTSIQIDLEKYSEQTEFGITSDKLLLAWREMEQAVELCGRENEVKLLVERMMALQTDIVDLQRSPMGRKQGGTLDDLEEQARELYRRLREKPRDQRTEGDSQEMVRLLLQAIQSFEKKVRVIYTQLSKTVVCKQKALELLPKVEEVVSLMNEDEKTVVRLQEKRQKELWNLLKIACSKVRGPVSGSPDSMNASRLSQPGQLMSQPSTASNSLPEPAKKSEELVAEAHNLCTLLENAIQDTVREQDQSFTALDWSWLQTEEEEHSCLEQAS

SEQ ID NO: 49764 - protein, 320 aa, Homo sapiens
MNRHLWKSQLCEMVQPSGGPAADQDVLGEESPLGKPAMLHLPSEQGAPETLQRCLEENQELRDAIRQSNQILRERCEELLHFQASQREEKEFLMCKFQEARKLVERLGLEKLDLKRQKEQALREVEHLKRCQQQMAEDKASVKAQVTSLLGELQESQSRLEAATKECQALEGRRKLAQLQVAYHQLFQEYDNHIKSSVVGSERKRADIYKADFQAERQAREKLAEKKELLQEQLEQLQREYSKLKASCQESARIEDMRKRHVEVSQAPLPPAPAYLSSPLALPSQRRSPPEEPPDFCCPKCQYQAPDMDTLQIHVMECIE

SEQ ID NO: 49765 - protein, 533 aa, Homo sapiens
MSSDGTIRHSKVRQKSEVDIVVSEDLNGTVKFSSSLPYPNNLNSVLAERLEKWLQLMLMWHPRQRGTDPTYGPNGCFKALDDILNLKLVHILNMVTGTIHTYPVTEDESLQSLKARIQQDTGIPEEDQELLQEAGLALIPDKPATQCISDGKLNEGHTLDMDLVFLFDNSKITYETQISPRPQPESVSCILQEPKRNLAFFQLRKVWGQVWHSIQTLKEDCNRLQQGQRAAMMNLLRNNSCLSKMKNSMASMSQQLKAKLDFFKTSIQIDLEKYSEQTEFGITSDKLLLAWREMEQAVELCGRENEVKLLVERMMALQTDIVDLQRSPMGRKQGGTLDDLEEQARELYRRLREKPRDQRTEGDSQEMVRLLLQAIQSFEKKVRVIYTQLSKTVVCKQKALELLPKVEEVVSLMNEDEKTVVRLQEKRQKELWNLLKIACSKVRGPVSGSPDSMNASRLSQPGQLMSQPSTASNSLPEPAKKSEELVAEAHNLCTLLENAIQDTVREQDQSFTALDWSWLQTEEEEHSCLEQAS

SEQ ID NO: 49766 - protein, 697 aa, Homo sapiens
MSSDGTIRLTHPNVVAARDVPEGMQNLAPNDLPLLAMEYCQGGDLRKYLNQFENCCGLREGAILTLLSDIASALRYLHENRIIHRDLKPENIVLQQGEQRLIHKIIDLGYAKELDQGSLCTSFVGTLQYLAPELLEQQKYTVTVDYWSFGTLAFECITGFRPFLPNWQPVQWHSKVRQKSEVDIVVSEDLNGTVKFSSSLPYPNNLNSVLAERLEKWLQLMLMWHPRQRGTDPTYGPNGCFKALDDILNLKLVHILNMVTGTIHTYPVTEDESLQSLKARIQQDTGIPEEDQELLQEAGLALIPDKPATQCISDGKLNEGHTLDMDLVFLFDNSKITYETQISPRPQPESVSCILQEPKRNLAFFQLRKVWGQVWHSIQTLKEDCNRLQQGQRAAMMNLLRNNSCLSKMKNSMASMSQQLKAKLDFFKTSIQIDLEKYSEQTEFGITSDKLLLAWREMEQAVELCGRENEVKLLVERMMALQTDIVDLQRSPMGRKQGGTLDDLEEQARELYRRLREKPRDQRTEGDSQEMVRLLLQAIQSFEKKVRVIYTQLSKTVVCKQKALELLPKVEEVVSLMNEDEKTVVRLQEKRQKELWNLLKIACSKVRGPVSGSPDSMNASRLSQPGQLMSQPSTASNSLPEPAKKSEELVAEAHNLCTLLENAIQDTVREQDQSFTALDWSWLQTEEEEHSCLEQAS

SEQ ID NO: 49767 - protein, 756 aa, Homo sapiens
MSWSPSLTTQTCGAWEMKERLGTGGFGNVIRWHNQETGEQIAIKQCRQELSPRNRERWCLEIQIMRRLTHPNVVAARDVPEGMQNLAPNDLPLLAMEYCQGGDLRKYLNQFENCCGLREGAILTLLSDIASALRYLHENRIIHRDLKPENIVLQQGEQRLIHKIIDLGYAKELDQGSLCTSFVGTLQYLAPELLEQQKYTVTVDYWSFGTLAFECITGFRPFLPNWQPVQWHSKVRQKSEVDIVVSEDLNGTVKFSSSLPYPNNLNSVLAERLEKWLQLMLMWHPRQRGTDPTYGPNGCFKALDDILNLKLVHILNMVTGTIHTYPVTEDESLQSLKARIQQDTGIPEEDQELLQEAGLALIPDKPATQCISDGKLNEGHTLDMDLVFLFDNSKITYETQISPRPQPESVSCILQEPKRNLAFFQLRKVWGQVWHSIQTLKEDCNRLQQGQRAAMMNLLRNNSCLSKMKNSMASMSQQLKAKLDFFKTSIQIDLEKYSEQTEFGITSDKLLLAWREMEQAVELCGRENEVKLLVERMMALQTDIVDLQRSPMGRKQGGTLDDLEEQARELYRRLREKPRDQRTEGDSQEMVRLLLQAIQSFEKKVRVIYTQLSKTVVCKQKALELLPKVEEVVSLMNEDEKTVVRLQEKRQKELWNLLKIACSKVRGPVSGSPDSMNASRLSQPGQLMSQPSTASNSLPEPAKKSEELVAEAHNLCTLLENAIQDTVREQDQSFTALDWSWLQTEEEEHSCLEQAS

SEQ ID NO: 49768 - protein, 1332 aa, Homo sapiens
MRNLKLFRTLEFRDIQGPGNPQCFSLRTEQGTVLIGSEHGLIEVDPVSREVKNEVSLVAEGFLPEDGSGRIVGVQDLLDQESVCVATASGDVILCSLSTQQLECVGSVASGISVMSWSPDQELVLLATGQQTLIMMTKDFEPILEQQIHQDDFGESKFITVGWGRKETQFHGSEGRQAAFQMQMHESALPWDDHRPQVTWRGDGQFFAVSVVCPETGARKVRVWNREFALQSTSEPVAGLGPALAWKPSGSLIASTQDKPNQQDIVFFEKNGLLHGHFTLPFLKDEVKVNDLLWNADSSVLAVWLEDLQREESSIPKTCVQLWTVGNYHWYLKQSLSFSTCGKSKIVSLMWDPVTPYRLHVLCQGWHYLAYDWHWTTDRSVGDNSSDLSNVAVIDGNRVLVTVFRQTVVPPPMCTYQLLFPHPVNQVTFLAHPQKSNDLAVLDASNQISVYKCGDCPSADPTVKLGAVGGSGFKVCLRTPHLEKRYKIQFENNEDQDVNPLKLGLLTWIEEDVFLAVSHSEFSPRSVIHHLTAASSEMDEEHGQLNVSSSAAVDGVIISLCCNSKTKSVVLQLADGQIFKYLWESPSLAIKPWKNSGGFPVRFPYPCTQTELAMIGEEECVLGLTDRCRFFINDIEVASNITSFAVYDEFLLLTTHSHTCQCFCLRDASFKTLQAGLSSNHVSHGEVLRKVERGSRIVTVVPQDTKLVLQMPRGNLEVVHHRALVLAQIRKWLDKLMFKEAFECMRKLRINLNLIYDHNPKVFLGNVETFIKQIDSVNHINLFFTELKEEDVTKTMYPAPVTSSVYLSRDPDGNKIDLVCDAMRAVMESINPHKYCLSILTSHVKKTTPELEIVLQKVHELQGNAPSDPDAVSAEEALKYLLHLVDVNELYDHSLGTYDFDLVLMVAEKSQKDPKEYLPFLNTLKKMETNYQRFTIDKYLKRYEKAIGHLSKCGPEYFPECLNLIKDKNLYNEALKLYSPSSQQYQDISIAYGEHLMQEHMYEPAGLMFARCGAHEKALSAFLTCGNWKQALCVAAQLNFTKDQLVGLGRTLAGKLVEQRKHIDAAMVLEECAQDYEEAVLLLLEGAAWEEALRLVYKYNRLDIIETNVKPSILEAQKNYMAFLDSQTATFSRHKKRLLVVRELKEQAQQAGLDDEVPHGQESDLFSETSSVVSGSEMSGKYSHSNSRISARSSKNRRKAERKKHSLKEGSPLEDLALLEALSEVVQNTENLKDEVYHILKVLFLFEFDEQGRELQKAFEDTLQLMERSLPEIWTLTYQQNSATPVLGPNSTANSIMASYQQQKTSVPVLDAELFIPPKINRRTQWKLSLLD

SEQ ID NO: 49769 - protein, 983 aa, Homo sapiens
MWDPVTPYRLHVLCQGWHYLAYDWHWTTDRSVGDNSSDLSNVAVIDGNRVLVTVFRQTVVPPPMCTYQLLFPHPVNQVTFLAHPQKSNDLAVLDASNQISVYKCGDCPSADPTVKLGAVGGSGFKVCLRTPHLEKRYKIQFENNEDQDVNPLKLGLLTWIEEDVFLAVSHSEFSPRSVIHHLTAASSEMDEEHGQLNVSSSAAVDGVIISLCCNSKTKSVVLQLADGQIFKYLWESPSLAIKPWKNSGGFPVRFPYPCTQTELAMIGEEECVLGLTDRCRFFINDIEVASNITSFAVYDEFLLLTTHSHTCQCFCLRDASFKTLQAGLSSNHVSHGEVLRKVERGSRIVTVVPQDTKLVLQMPRGNLEVVHHRALVLAQIRKWLDKLMFKEAFECMRKLRINLNLIYDHNPKVFLGNVETFIKQIDSVNHINLFFTELKEEDVTKTMYPAPVTSSVYLSRDPDGNKIDLVCDAMRAVMESINPHKYCLSILTSHVKKTTPELEIVLQKVHELQGNAPSDPDAVSAEEALKYLLHLVDVNELYDHSLGTYDFDLVLMVAEKSQKDPKEYLPFLNTLKKMETNYQRFTIDKYLKRYEKAIGHLSKCGPEYFPECLNLIKDKNLYNEALKLYSPSSQQYQDISIAYGEHLMQEHMYEPAGLMFARCGAHEKALSAFLTCGNWKQALCVAAQLNFTKDQLVGLGRTLAGKLVEQRKHIDAAMVLEECAQDYEEAVLLLLEGAAWEEALRLVYKYNRLDIIETNVKPSILEAQKNYMAFLDSQTATFSRHKKRLLVVRELKEQAQQAGLDDEVPHGQESDLFSETSSVVSGSEMSGKYSHSNSRISARSSKNRRKAERKKHSLKEGSPLEDLALLEALSEVVQNTENLKDEVYHILKVLFLFEFDEQGRELQKAFEDTLQLMERSLPEIWTLTYQQNSATPVLGPNSTANSIMASYQQQKTSVPVLDAELFIPPKINRRTQWKLSLLD

SEQ ID NO: 49770 - protein, 716 aa, Homo sapiens
MQSTANYLWHTDDLLGQGATASVYKARNKKSGELVAVKVFNTTSYLRPREVQVREFEVLRKLNHQNIVKLFAVEETGGSRQKVLVMEYCSSGSLLSVLESPENAFGLPEDEFLVVLRCVVAGMNHLRENGIVHRDIKPGNIMRLVGEEGQSIYKLTDFGAARELDDDEKFVSVYGTEEYLHPDMYERAVLRKPQQKAFGVTVDLWSIGVTLYHAATGSLPFIPFGGPRRNKEIMYRITTEKPAGAIAGAQRRENGPLEWSYTLPITCQLSLGLQSQLVPILANILEVEQAKCWGFDQFFAETSDILQRVVVHVFSLSQAVLHHIYIHAHNTIAIFQEAVHKQTSVAPRHQEYLFEGHLCVLEPSVSAQHIAHTTASSPLTLFSTAIPKGLAFRDPALDVPKFVPKVDLQADYNTAKGVLGAGYQALRLARALLDGQELMFRGLHWVMEVLQATCRRTLEVARTSLLYLSSSLGTERFSSVAGTPEIQELKAAAELRSRLRTLAEVLSRCSQNITETQESLSSLNRELVKSRDQVHEDRSIQQIQCCLDKMNFIYKQFKKSRMRPGLGYNEEQIHKLDKVNFSHLAKRLLQVFQEECVQKYQASLVTHGKRMRVVHETRNHLRLVGCSVAACNTEAQGVQESLSKLLEELSHQLLQDRAKGAQASPPPIAPYPSPTRKDLLLHMQELCEGMKLLASDLLDNNRIIERLNRVPAPPDV

SEQ ID NO: 49771 - protein, 631 aa, Homo sapiens
MEYCSSGSLLSVLESPENAFGLPEDEFLVVLRCVVAGMNHLRENGIVHRDIKPGNIMRLVGEEGQSIYKLTDFGAARELDDDEKFVSVYGTEEYLHPDMYERAVLRKPQQKAFGVTVDLWSIGVTLYHAATGSLPFIPFGGPRRNKEIMYRITTEKPAGAIAGAQRRENGPLEWSYTLPITCQLSLGLQSQLVPILANILEVEQAKCWGFDQFFAETSDILQRVVVHVFSLSQAVLHHIYIHAHNTIAIFQEAVHKQTSVAPRHQEYLFEGHLCVLEPSVSAQHIAHTTASSPLTLFSTAIPKGLAFRDPALDVPKFVPKVDLQADYNTAKGVLGAGYQALRLARALLDGQELMFRGLHWVMEVLQATCRRTLEVARTSLLYLSSSLGTERFSSVAGTPEIQELKAAAELRSRLRTLAEVLSRCSQNITETQESLSSLNRELVKSRDQVHEDRSIQQIQCCLDKMNFIYKQFKKSRMRPGLGYNEEQIHKLDKVNFSHLAKRLLQVFQEECVQKYQASLVTHGKRMRVVHETRNHLRLVGCSVAACNTEAQGVQESLSKLLEELSHQLLQDRAKGAQASPPPIAPYPSPTRKDLLLHMQELCEGMKLLASDLLDNNRIIERLNRVPAPPDV

SEQ ID NO: 49772 - protein, 368 aa, Homo sapiens
MNRHLWKSQLCEMVQPSGGPAADQDVLGEESPLGKPAMLHLPSEQGAPETLQRCLEENQELRDAIRQSNQILRERCEELLHFQASQREEKEFLMCKFQEARKLVERLGLEKLDLKRQKEQALREVEHLKRCQQQMAEDKASVKAQVTSLLGELQESQSRLEAATKECQALEGRRKLAQLQVAYHQLFQEYDNHIKSSVVGSERKRGMQLEDLKQQLQQAEEALVAKQEVIDKLKEEAEQHKIVMETVPVLKAQADIYKADFQAERQAREKLAEKKELLQEQLEQLQREYSKLKASCQESARIEDMRKRHVEVSQAPLPPAPAYLSSPLALPSQRRSPPEEPPDFCCPKCQYQAPDMDTLQIHVMECIE

SEQ ID NO: 49773 - protein, 419 aa, Homo sapiens
MNRHLWKSQLCEMVQPSGGPAADQDVLGEESPLGKPAMLHLPSEQGAPETLQRCLEENQELRDAIRQSNQILRERCEELLHFQASQREEKEFLMCKFQEARKLVERLGLEKLDLKRQKEQALREVEHLKRCQQQMAEDKASVKAQVTSLLGELQESQSRLEAATKECQALEGRARAASEQARQLESEREALQQQHSVQVDQLRMQGQSVEAALRMERQAASEEKRKLAQLQVAYHQLFQEYDNHIKSSVVGSERKRGMQLEDLKQQLQQAEEALVAKQEVIDKLKEEAEQHKIVMETVPVLKAQADIYKADFQAERQAREKLAEKKELLQEQLEQLQREYSKLKASCQESARIEDMRKRHVEVSQAPLPPAPAYLSSPLALPSQRRSPPEEPPDFCCPKCQYQAPDMDTLQIHVMECIE

SEQ ID NO: 49774 - protein, 419 aa, Homo sapiens; identical to SEQ ID NO: 49773

SEQ ID NO: 49775 - protein, 419 aa, Homo sapiens; identical to SEQ ID NO: 49773

SEQ ID NO: 49776 - protein, 487 aa, Homo sapiens
MALVIQVGKLRPREVRTPQTINPSLFPSLPVKLSSIIEVPSGGERCCSRRTLVYKARAFWKGAPLPCWMNRHLWKSQLCEMVQPSGGPAADQDVLGEESPLGKPAMLHLPSEQGAPETLQRCLEENQELRDAIRQSNQILRERCEELLHFQASQREEKEFLMCKFQEARKLVERLGLEKLDLKRQKEQALREVEHLKRCQQQMAEDKASVKAQVTSLLGELQESQSRLEAATKECQALEGRARAASEQARQLESEREALQQQHSVQVDQLRMQGQSVEAALRMERQAASEEKRKLAQLQVAYHQLFQEYDNHIKSSVVGSERKRGMQLEDLKQQLQQAEEALVAKQEVIDKLKEEAEQHKIVMETVPVLKAQADIYKADFQAERQAREKLAEKKELLQEQLEQLQREYSKLKASCQESARIEDMRKRHVEVSQAPLPPAPAYLSSPLALPSQRRSPPEEPPDFCCPKCQYQAPDMDTLQIHVMECIE

SEQ ID NO: 49777 - protein, 206 aa, Homo sapiens
MNRHLWKSQLCEMVQPSGGPAADQDVLGEESPLGKPAMLHLPSEQGAPETLQRCLEENQELRDAIRQSNQILRERCEELLHFQASQREEKEFLMCKFQEARKLVERLGLEKLDLKRQKEQALREVEHLKRCQQQMAEDKASVKAQVTSLLGELQESQSRLEAATKECQALEGRARAASEQARQLESEREALQQQHSVQVDQLRMQG

SEQ ID NO: 49778 - protein, 251 aa, Homo sapiens
MNRHLWKSQLCEMVQPSGGPAADQDVLGEESPLGKPAMLHLPSEQGAPETLQRCLEENQELRDAIRQSNQILRERCEELLHFQASQREEKEFLMCKFQEARKLVERLGLEKLDLKRQKEQALREVEHLKRCQQQMAEDKASVKAQVTSLLGELQESQSRLEAATKECQALEGRARAASEQARQLESEREALQQQHSVQVDQLRMQGQSVEAALRMERQAASEEKRKLAQLQVAYHQLFQEYDNHIKSSVVG

SEQ ID NO: 49779 - protein, 138 aa, Homo sapiens
MNRHLWKSQLCEMVQPSGGPAADQDVLGEESPLGKPAMLHLPSEQGAPETLQRCLEENQELRDAIRQSNQILRERCEELLHFQASQREEKEFLMCKFQEARKLVERLGLEKLDLKRQKEQALREVEHLKRCQQQMAED

SEQ ID NO: 49780 - protein, 418 aa, Homo sapiens
MNRHLWKSQLCEMVQPSGGPAADQDVLGEESPLGKPAMLHLPSEQGAPETLQRCLEENQELRDAIRQSNQILRERCEELLHFQASQREEKEFLMCKFQEARKLVERLGLEKLDLKRQKEQALREVEHLKRCQQMAEDKASVKAQVTSLLGELQESQSRLEAATKECQALEGRARAASEQARQLESEREALQQQHSVQVDQLRMQGQSVEAALRMERQAASEEKRKLAQLQVAYHQLFQEYDNHIKSSVVGSERKRGMQLEDLKQQLQQAEEALVAKQEVIDKLKEEAEQHKIVMETVPVLKAQADIYKADFQAERQAREKLAEKKELLQEQLEQLQREYSKLKASCQESARIEDMRKRHVEVSQAPLPPAPAYLSSPLALPSQRRSPPEEPPDFCCPKCQYQAPDMDTLQIHVMECIE

SEQ ID NO: 49781 - protein, 726 aa, Homo sapiens
MLRACQLSGVTAAAQSCLCGKFVLRPLRPCRRYSTSGSSGLTTGKIAGAGLLFVGGGIGGTILYAKWDSHFRESVEKTIPYSDKLFEMVLGPAAYNVPLPKKSIQSGPLKISSVSEVMKESKQPASQLQKQKGDTPASATAPTEAAQIISAAGDTLSVPAPAVQPEESLKTDHPEIGEGKPTPALSALAKSLEDALRQTASVTLQAIAAQNAAVQAVNAHSNILKAAMDNSEIAGEKKSAQWRTVEGALKERRKAVDEAADALLKAKEELEKMKSVIENAKKKEVAGAKPHITAAEGKLHNMIVDLDNVVKKVQAAQSEAKVVSQYHELVVQARDDFKRELDSITPEVLPGWKGMSEYNLADKLSTDDLNSLIAHAHRRIDQLNRELAEQKATEKQHITLALEKQKLEEKRAFDSAVAKALEHHRSEIQAEQDRKIEEVRDAMENEMRTQLRRQAAAHTDHLRDVLRVQEQELKSEFEQNLSEKLSEQELQFRRLSQEQVDNFTLDINTAYARLRGIEQAVQSHAVAEEEARKAHQLWLSVEALKYSMKTSSAETPTIPLGSAVEAIKANCSDNEFTQALTAAIPPESLTRGVYSEETLRARFYAVQKLARRVAMIDETRNSLYQYFLSYLQSLLLFPPQQLKPPPELCPEDINTFKLLSYASYCIEHGDLELAAKFVNQLKGESRRVAQDWLKEARMTLETKQIVEILTAYASAVGIGTTQVQPE

SEQ ID NO: 49782 - protein, 372 aa, Homo sapiens
MLRACQLSGVTAAAQSCLCGKFVLRPLRPCRRYSTSGSSGLTTGKIAGAGLLFVGGGIGGTILYAKWDSHFRESVEKTIPYSDKLFEMVLGPAAYNVPLPKKSIQSGPLKISSVSEVMKESKQPASQLQKQKGDTPASATAGDTLSVPAPAVQPEESLKTDHPEIGEGKPTPALSEASSSSIRERPPEEVAARLAQQEKQEQVKIESLAKSLEDALRQTASVTLQAIAAIPPESLTRGVYSEETLRARFYAVQKLARRVAMIDETRNSLYQYFLSYLQSLLLFPPQQLKPPPELCPEDINTFKLLSYASYCIEHGDLELAAKFVNQLKGESRRVAQDWLKEARMTLETKQIVEILTAYASAVGIGTTQVQPE

SEQ ID NO: 49783 - protein, 659 aa, Homo sapiens
MLRACQLSGVTAAAQSCLCGKFVLRPLRPCRRYSTSGSSGLTTGKIAGAGLLFVGGGIGGTILYAKWDSHFRESVEKTIPYSDKLFEMVLGPAAYNVPLPKKSIQSGPLKISSVSEVMKESKQPASQLQKQKGDTPASATALAKSLEDALRQTASVTLQAIAAQNAAVQAVNAHSNILKAAMDNSEIAGEKKSAQWRTVEGALKERRKAVDEAADALLKAKEELEKMKSVIENAKKKEVAGAKPHITAAEGKLHNMIVDLDNVVQARDDFKRELDSITPEVLPGWKGMSVSDLADKLSTDDLNSLIAHAHRRIDQLNRELAEQKATEKQHITLALEKQKLEEKRAFDSAVAKALEHHRSEIQAEQDRKIEEVRDAMENEMRTQLRRQAAAHTDHLRDVLRVQEQELKSEFEQNLSEKLSEQELQFRRLSQEQVDNFTLDINTAYARLRGIEQAVQSHAVAEEEARKAHQLWLSVEALKYSMKTSSAETPTIPLGSAVEAIKANCSDNEFTQALTAAIPPESLTRGVYSEETLRARFYAVQKLARRVAMIDETRNSLYQYFLSYLQSLLLFPPQQLKPPPELCPEDINTFKLLSYASYCIEHGDLELAAKFVNQLKGESRRVAQDWLKEARMTLETKQIVEILTAYASAVGIGTTQVQPE

SEQ ID NO: 49784 - protein, 758 aa, Homo sapiens
MLRACQLSGVTAAAQSCLCGKFVLRPLRPCRRYSTSGSSGLTTGKIAGAGLLFVGGGIGGTILYAKWDSHFRESVEKTIPYSDKLFEMVLGPAAYNVPLPKKSIQSGPLKISSVSEVMKESKQPASQLQKQKGDTPASATAPTEAAQIISAAGDTLSVPAPAVQPEESLKTDHPEIGEGKPTPALSEEASSSSIRERPPEEVAARLAQQEKQEQVKIESLAKSLEDALRQTASVTLQAIAAQNAAVQAVNAHSNILKAAMDNSEIAGEKKSAQWRTVEGALKERRKAVDEAADALLKAKEELEKMKSVIENAKKKEVAGAKPHITAAEGKLHNMIVDLDNVVKKVQAAQSEAKVVSQYHELVVQARDDFKRELDSITPEVLPGWKGMSVSDLADKLSTDDLNSLIAHAHRRIDQLNRELAEQKATEKQHITLALEKQKLEEKRAFDSAVAKALEHHRSEIQAEQDRKIEEVRDAMENEMRTQLRRQAAAHTDHLRDVLRVQEQELKSEFEQNLSEKLSEQELQFRRLSQEQVDNFTLDINTAYARLRGIEQAVQSHAVAEEEARKAHQLWLSVEALKYSMKTSSAETPTIPLGSAVEAIKANCSDNEFTQALTAAIPPESLTRGVYSEETLRARFYAVQKLARRVAMIDETRNSLYQYFLSYLQSLLLFPPQQLKPPPELCPEDINTFKLLSYASYCIEHGDLELAAKFVNQLKGESRRVAQDWLKEARMTLETKQIVEILTAYASAVGIGTTQVQPE

SEQ ID NO: 49785 - protein, 757 aa, Homo sapiens
MLRACQLSGVTAAAQSCLCGKFVLRPLRPCRRYSTSGSSGLTTGKIAGAGLLFVGGGIGGTILYAKWDSHFRESVEKTIPYSDKLFEMVLGPAAYNVPLPKKSIQSGPLKISSVSEVMKESKQPASQLQKQKGDTPASATAPTEAAQIISAAGDTLSVPAPAVQPEESLKTDHPEIGEGKPTPALSEASSSSIRERPPEEVAARLAQQEKQEQVKIESLAKSLEDALRQTASVTLQAIAAQNAAVQAVNAHSNILKAAMDNSEIAGEKKSAQWRTVEGALKERRKAVDEAADALLKAKEELEKMKSVIENAKKKEVAGAKPHITAAEGKLHNMIVDLDNVVKKVQAAQSEAKVVSQYHELVVQARDDFKRELDSITPEVLPGWKGMSVSDLADKLSTDDLNSLIAHAHRRIDQLNRELAEQKATEKQHITLALEKQKLEEKRAFDSAVAKALEHHRSEIQAEQDRKIEEVRDAMENEMRTQLRRQAAAHTDHLRDVLRVQEQELKSEFEQNLSEKLSEQELQFRRLSQEQVDNFTLDINTAYARLRGIEQAVQSHAVAEEEARKAHQLWLSVEALKYSMKTSSAETPTIPLGSAVEAIKANCSDNEFTQALTAAIPPESLTRGVYSEETLRARFYAVQKLARRVAMIDETRNSLYQYFLSYLQSLLLFPPQQLKPPPELCPEDINTFKLLSYASYCIEHGDLELAAKFVNQLKGESRRVAQDWLKEARMTLETKQIVEILTAYASAVGIGTTQVQPE

SEQ ID NO: 49786 - protein, 747 aa, Homo sapiens
MLRACQLSGVTAAAQSCLCGKFVLRPLRPCRRYSTSGSSGLTTGKIAGAGLLFVGGGIGGTILYAKWDSHFRESVEKTIPYSDKLFEMVLGPAAYNVPLPKKSIQSGPLKISSVSEVMKESKQPASQLQKQKGDTPASATAGDTLSVPAPAVQPEESLKTDHPEIGEGKPTPALSEEASSSSIRERPPEEVAARLAQQEKQEQVKIESLAKSLEDALRQTASVTLQAIAAQNAAVQAVNAHSNILKAAMDNSEIAGEKKSAQWRTVEGALKERRKAVDEAADALLKAKEELEKMKSVIENAKKKEVAGAKPHITAAEGKLHNMIVDLDNVVKKVQAAQSEAKVVSQYHELVVQARDDFKRELDSITPEVLPGWKGMSVSDLADKLSTDDLNSLIAHAHRRIDQLNRELAEQKATEKQHITLALEKQKLEEKRAFDSAVAKALEHHRSEIQAEQDRKIEEVRDAMENEMRTQLRRQAAAHTDHLRDVLRVQEQELKSEFEQNLSEKLSEQELQFRRLSQEQVDNFTLDINTAYARLRGIEQAVQSHAVAEEEARKAHQLWLSVEALKYSMKTSSAETPTIPLGSAVEAIKANCSDNEFTQALTAAIPPESLTRGVYSEETLRARFYAVQKLARRVAMIDETRNSLYQYFLSYLQSLLLFPPQQLKPPPELCPEDINTFKLLSYASYCIEHGDLELAAKFVNQLKGESRRVAQDWLKEARMTLETKQIVEILTAYASAVGIGTTQVQPE

SEQ ID NO: 49787 - protein, 747 aa, Homo sapiens
MLRACQLSGVTAAAQSCLCGKFVLRPLRPCRRYSTSGSSGLTTGKIAGAGLLFVGGGIGGTILYAKWDSHFRESVEKTIPYSDKLFEMVLGPAAYNVPLPKKSIQSGPLKISSVSEVMKESKQPASQLQKQKGDTPASATAGDTLSVPAPAVQPEESLKTDHPEIGEGKPTPALSEEASSSSIRERPPEEVAARLAQQEKQEQVKIESLAKSLEDALRQTASVTLQAIAAQNAAVQAVNAHSNILKAAMDNSEIAGEKKSAQWRTVEGALKERRKAVDEAADALLKAKEELEKMKSVIENAKKKEVAGAKPHITAAEGKLHNMIVDLDNVVKKVQAAQSEAKVVSQYHELVVQARDDFKRELDSITPEVLPGWKGMSEYNLADKLSTDDLNSLIAHAHRRIDQLNRELAEQKATEKQHITLALEKQKLEEKRAFDSAVAKALEHHRSEIQAEQDRKIEEVRDAMENEMRTQLRRQAAAHTDHLRDVLRVQEQELKSEFEQNLSEKLSEQELQFRRLSQEQVDNFTLDINTAYARLRGIEQAVQSHAVAEEEARKAHQLWLSVEALKYSMKTSSAETPTIPLGSAVEAIKANCSDNEFTQALTAAIPPESLTRGVYSEETLRARFYAVQKLARRVAMIDETRNSLYQYFLSYLQSLLLFPPQQLKPPPELCPEDINTFKLLSYASYCIEHGDLELAAKFVNQLKGESRRVAQDWLKEARMTLETKQIVEILTAYASAVGIGTTQVQPE

SEQ ID NO: 49788 - protein, 192 aa, Homo sapiens
MDRAHRLGQTKQVTVYRLICKGTIEERILQRAKEKSEIQRMVISGGNFKPDTLKPKEVVSLLLDDEELEKKLRLRQEEKRQQEETNRVKERKRKREKYAEKKKKEDELDGKRRKEGVNLVIPFVPSADNSNLSADGDDSFISVDSAMPSPFSEISISSELHTGSIPLDESSSLAPDSLVRKQGKGTNPSGGR

SEQ ID NO: 49789 - protein, 1556 aa, Homo sapiens
MASELGARDDGGCTELAKPLYLQYLERALRLDHFLRQTSAIFNRNISSDDSEDGLDDSNPLLPQSGDPLIQVKEEPPNSLLGETSGAGSSGMLNTYSLNGVLQSESKCDKGNLYNFSKLKKSRKWLKSILLSDESSEADSQSEDDDEEELNLSREELHNMLRLHKYKKLHQNKYSKDKELQQYQYYSAGLLSTYDPFYEQQRHLLGPKKKKFKEEKKLKAKLKKVKKKRRRDEELSSEESPRRHHHQTKVFAKFSHDAPPPGTKKKHLSIEQLNARRRKVWLSIVKKELPKANKQKASARNLFLTNSRKLAHQCMKEVRRAALQAQKNCKETLPRARRLTKEMLLYWKKYEKVEKEHRKRAEKEALEQRKLDEEMREAKRQQRKLNFLITQTELYAHFMSRKRDMGHDGIQEEILRKLEDSSTQRQIDIGGGVVVNITQEDYDSNHFKAQALKNAENAYHIHQARTRSFDEDAKESRAAALRAANKSGTGFGESYSLANPSIRAGEDIPQPTIFNGKLKGYQLKGMNWLANLYEQGINGILADEMGLGKTVQSIALLAHLAERENIWGPFLIISPASTLNNWHQEFTRFVPKFKVLPYWGNPHDRKVIRRFWSQKTLYTQDAPFHVVITSYQLVVQDVKYFQRVKWQYMVLDEAQALKSSSSVRWKILLQFQCRNRLLLTGTPIQNTMAELWALLHFIMPTLFDSHEEFNEWFSKDIESHAENKSAIDENQLSRLHMILKPFMLRRIKKDVENELSDKIEILMYCQLTSRQKLLYQALKNKISIEDLLQSSMGSTQQAQNTTSSLMNLVMQFRKVCNHPELFERQETWSPFHISLKPYHISKFIYRHGQIRVFNHSRDRWLRVLSPFAPDYIQRSLFHRKGINEESCFSFLRFIDISPAEMANLMLQGLLARWLALFLSLKASYRLHQLRSWGAPEGESHQRYLRNKDFLLGVNFPLSFPNLCSCPLLKSLVFSSHCKAVSGYSDQVVHQRRSATSSLRRCLLTELPSFLCVASPRVTAVPLDSYCNDRSAEYERRVLKEGGSLAAKQCLLNGAPELAADWLNRRSQFFPEPAGGLWSIRPQNGWSFIRIPGKESLITDSGKLYALDVLLTRLKSQGHRVLIYSQMTRMIDLLEEYMVYRKHTYMRLDGSSKISERRDMVADFQNRNDIFVFLLSTRAGGLGINLTAADTVIFYDSDWNPTVDQQAMDRAHRLGQTKQVTVYRLICKGTIEERILQRAKEKSEIQRMVISGGNFKPDTLKPKEVVSLLLDDEELEKKLRLRQEEKRQQEETNRVKERKRKREKYAEKKKKEDELDGKRRKEGVNLVIPFVPSADNSNLSADGDDSFISVDSAMPSPFSEISISSELHTGSIPLDESSSDMLVIVDDPASSAPQSRATNSPASITGSVSDTVNGISIQEMPAAGRGHSARSRGRPKGSGSTAKGAGKGRSRKSTAGSAAAMAGAKAGAAAASAAAYAAYGYNVSKGISASSPLQTSLVRPAGLADFGPSSASSPLSSPLSKGNNVPGNPKNLHMTSSLAPDSLVRKQGKGTNPSGGR

SEQ ID NO: 49790 - protein, 1556 aa, Homo sapiens; identical to SEQ ID NO: 49789

SEQ ID NO: 49791 - protein, 194 aa, Homo sapiens
MAASLVGKKIVFVTGNAKKLEEVVQILGDKFPCTLVAQKIDLPEYQGEPDEISIQKCQEAVRQVQGPVLVEDTCLCFNALGGLPGPYIKWFLEKLKPEGLHQLLAGFEDKSAYALCTFALSTGDPSQPVRLFRGRTSGRIVAPRGCQDFGWDPCFQPDGYEQTYAEMPKAEKNAVSHRFRALLELQEYFGSLAA

SEQ ID NO: 49792 - protein, 153 aa, Homo sapiens
MAASLVGKKIVFVTGNAKKLEEVQGPVLVEDTCLCFNALGGLPGPYIKWFLEKLKPEGLHQLLAGFEDKSAYALCTFALSTGDPSQPVRLFRGRTSGRIVAPRGCQDFGWDPCFQPDGYEQTYAEMPKAEKNAVSHRFRALLELQEYFGSLAA

SEQ ID NO: 49793 - protein, 177 aa, Homo sapiens
MAASLVVQILGDKFPCTLVAQKIDLPEYQGEPDEISIQKCQEAVRQVQGPVLVEDTCLCFNALGGLPGPYIKWFLEKLKPEGLHQLLAGFEDKSAYALCTFALSTGDPSQPVRLFRGRTSGRIVAPRGCQDFGWDPCFQPDGYEQTYAEMPKAEKNAVSHRFRALLELQEYFGSLAA

SEQ ID NO: 49794 - protein, 2743 aa, Homo sapiens
MSDKMSSFLHIGDICSLYAEGSTNGFISTLGLVDDRCVVQPETGDLNNPPKKFRDCLFKLCPMNRYSAQKQFWKAAKPGANSTTDAVLLNKLHHAADLEKKQNETENRKLLGTVIQYGNVIQLLHLKSNKYLTVNKRLPALLEKNAMRVTLDEAGNEGSWFYIQPFYKLRSIGDSVVIGDKVVLNPVNAGQPLHASSHQLVDNPGCNEVNSVNCNTSWKIVLFMKWSDNKDDILKGGDVVRLFHAEQEKFLTCDEHRKKQHVFLRTTGRQSATSATSSKALWEVEVVQHDPCRGGAGYWNSLFRFKHLATGHYLAAEVDPDQDASRSRLRNAQEKMVYSLVSVPEGNDISSIFELDPTTLRGGDSLVPRNSYVRLRHLCTNTWVHSTNIPIDKEEEKPVMLKIGTSPVKEDKEAFAIVPVSPAEVRDLDFANDASKVLGSIAGKLEKGTITQNERRSVTKLLEDLVYFVTGGTNSGQDVLEVVFSKPNRERQKLMREQNILKQIFKLLQAPFTDCGDGPMLRLEELGDQRHAPFRHICRLCYRVLRHSQQDYRKNQEYIAKQFGFMQKQIGYDVLAEDTITALLHNNRKLLEKHITAAEIDTFVSLVRKNREPRFLDYLSDLCVSMNKSIPVTQELICKAVLNPTNADILIETKLVLSRFEFEGVSSTGENALEAGEDEEEVWLFWRDSNKEIRSKSVRELAQDAKEGQKEDRDVLSYYRYQLNLFARMCLDRQYLAINEISGQLDVDLILRCMSDENLPYDLRASFCRLMLHMHVDRDPQEQVTPVKYARLWSEIPSEIAIDDYDSSGASKDEIKERFAQTMEFVEEYLRDVVCQRFPFSDKEKNKLTFEVVNLARNLIYFGFYNFSDLLRLTKILLAILDCVHVTTIFPISKMAKGEENKGNNDVEKLKSSNVMRSIHGVGELMTQVVLRGGGFLPMTPMAAAPEGNVKQAEPEKEDIMVMDTKLKIIEILQFILNVRLDYRISCLLCIFKREFDESNSQTSETSSGNSSQEGPSNVPGALDFEHIEEQAEGIFGGSEENTPLDLDDHGGRTFLRVLLHLTMHDYPPLVSGALQLLFRHFSQRQEVLQAFKQVQLLVTSQDVDNYKQIKQDLDQLRSIVEKSELWVYKGQGPDETMDGASGENEHKKTEEGNNKPQKHESTSSYNYRVVKEILIRLSKLCVQESASVRKSRKQQQRLLRNMGAHAVVLELLQIPYEKAEDTKMQEIMRLAHEFLQNFCAGNQQNQALLHKHINLFLNPGILEAVTMQHIFMNNFQLCSEINERVVQHFVHCIETHGRNVQYIKFLQTIVKAEGKFIKKCQDMVMAELVNSGEDVLVFYNDRASFQTLIQMMRSERDRMDENSPLMYHIHLVELLAVCTEGKNVYTEIKCNSLLPLDDIVRVVTHEDCIPEVKIAYINFLNHCYVDTEVEMKEIYTSNHMWKLFENFLVDICRACNNTSDRKHADSILEKYVTEIVMSIVTTFFSSPFSDQSTTLQTRQPVFVQLLQGVFRVYHCNWLMPSQKASVESCIRVLSDVAKSRAIAIPVDLDSQVNNLFLKSHSIVQKTAMNWRLSARNAARRDSVLAASRDYRNIIERLQDIVSALEDRLRPLVQAELSVLVDVLHRPELLFPENTDARRKCESGGFICKLIKHTKQLLEENEEKLCIKVLQTLREMMTKDRGYGEKLISIDELDNAELPPAPDSENATEELEPSPPLRQLEDHKRGEALRQVLVNRYYGNVRPSGRRESLTSFGNGPLSAGGPGKPGGGGGGSGSSSMSRGEMSLAEVQCHLDKEGASNLVIDLIMNASSDRVFHESILLAIALLEGGNTTIQHSFFCRLTEDKKSEKFFKVFYDRMKVAQQEIKATVTVNTSDLGNKKKDDEVDRDAPSRKKAKEPTTQITEEVRDQLLEASAATRKAFTTFRREADPDDHYQPGEGTQATADKAKDDLEMSAVITIMQPILRFLQLLCENHNRDLQNFLRCQNNKTNYNLVCETLQFLDCICGSTTGGLGLLGLYINEKNVALINQTLESLTEYCQGPCHENQNCIATHESNGIDIITALILNDINPLGKKRMDLVLELKNNASKLLLAIMESRHDSENAERILYNMRPKELVEVIKKAYMQGEVEFEDGENGEDGAASPRNVGHNIYILAHQLARHNKELQSMLKPGGQVDGDEALEFYAKHTAQIEIVRLDRTMEQIVFPVPSICEFLTKESKLRIYYTTERDEQGSKINDFFLRSEDLFNEMNWQKKLRAQPVLYWCARNMSFWSSISFNLAVLMNLLVAFFYPFKGVRGGTLEPHWSGLLWTAMLISLAIVIALPKPHGIRALIASTILRLIFSVGLQPTLFLLGAFNVCNKIIFLMSFVGNCGTFTRGYRAMVLDVEFLYHLLYLVICAMGLFVHEFFYSLLLFDLVYREETLLNVIKSVTRNGRSIILTAVLALILVYLFSIVGYLFFKDDFILEVDRLPNETAVPETGESLASEFLFSDVCRVESGENCSSPAPREELVPAEETEQDKEHTCETLLMCIVTVLSHGLRSGGGVGDVLRKPSKEEPLFAARVIYDLLFFFMVIIIVLNLIFGVIIDTFADLRSEKQKKEEILKTTCFICGLERDKFDNKTVTFEEHIKEEHNMWHYLCFIVLVKVKDSTEYTGPESYVAEMIKERNLDWFPRMRAMSLVSSDSEGEQNELRNLQEKLESTMKLVTNLSGQLSELKDQMTEQRKQKQRIGLLGHPPHMNVNPQQPA

SEQ ID NO: 49795 - protein, 2743 aa, Homo sapiens
MSDKMSSFLHIGDICSLYAEGSTNGFISTLGLVDDRCVVQPETGDLNNPPKKFRDCLFKLCPMNRYSAQKQFWKAAKPGANSTTDAVLLNKLHHAADLEKKQNETENRKLLGTVIQYGNVIQLLHLKSNKYLTVNKRLPALLEKNAMRVTLDEAGNEGSWFYIQPFYKLRSIGDSVVIGDKVVLNPVNAGQPLHASSHQLVDNPGCNEVNSVNCNTSWKIVLFMKWSDNKDDILKGGDVVRLFHAEQEKFLTCDEHRKKQHVFLRTTGRQSATSATSSKALWEVEVVQHDPCRGGAGYWNSLFRFKHLATGHYLAAEVDPDFEEECLEFQPSVDPDQDASRSRLRNAQEKMVYSLVSVPEGNDISSIFELDPTTLRGGDSLVPRNSYVRLRHLCTNTWVHSTNIPIDKEEEKPVMLKIGTSPVKEDKEAFAIVPVSPAEVRDLDFANDASKVLGSIAGKLEKGTITQNERRSVTKLLEDLVYFVTGGTNSGQDVLEVVFSKPNRERQKLMREQNILKQIFKLLQAPFTDCGDGPMLRLEELGDQRHAPFRHICRLCYRVLRHSQQDYRKNQEYIAKQFGFMQKQIGYDVLAEDTITALLHNNRKLLEKHITAAEIDTFVSLVRKNREPRFLDYLSDLCVSMNKSIPVTQELICKAVLNPTNADILIETKLVLSRFEFEGVSSTGENALEAGEDEEEVWLFWRDSNKEIRSKSVRELAQDAKEGQKEDRDVLSYYRYQLNLFARMCLDRQYLAINEISGQLDVDLILRCMSDENLPYDLRASFCRLMLHMHVDRDPQEQVTPVKYARLWSEIPSEIAIDDYDSSGASKDEIKERFAQTMEFVEEYLRDVVCQRFPFSDKEKNKLTFEVVNLARNLIYFGFYNFSDLLRLTKILLAILDCVHVTTIFPISKMAKGEENKGNNDVEKLKSSNVMRSIHGVGELMTQVVLRGGGFLPMTPMAAAPEGNVKQAEPEKEDIMVMDTKLKIIEILQFILNVRLDYRISCLLCIFKREFDESNSQTSETSSGNSSQEGPSNVPGALDFEHIEEQAEGIFGGSEENTPLDLDDHGGRTFLRVLLHLTMHDYPPLVSGALQLLFRHFSQRQEVLQAFKQVQLLVTSQDVDNYKQIKQDLDQLRSIVEKSELWVYKGQGPDETMDGASGENEHKKTEEGNNKPQKHESTSSYNYRVVKEILIRLSKLCVQESASVRKSRKQQQRLLRNMGAHAVVLELLQIPYEKAEDTKMQEIMRLAHEFLQNFCAGNQQNQALLHKHINLFLNPGILEAVTMQHIFMNNFQLCSEINERVVQHFVHCIETHGRNVQYIKFLQTIVKAEGKFIKKCQDMVMAELVNSGEDVLVFYNDRASFQTLIQMMRSERDRMDENSPLMYHIHLVELLAVCTEGKNVYTEIKCNSLLPLDDIVRVVTHEDCIPEVKIAYINFLNHCYVDTEVEMKEIYTSNHMWKLFENFLVDICRACNNTSDRKHADSILEKYVTEIVMSIVTTFFSSPFSDQSTTLQTRQPVFVQLLQGVFRVYHCNWLMPSQKASVESCIRVLSDVAKSRAIAIPVDLDSQVNNLFLKSHSIVQKTAMNWRLSARNAARRDSVLAASRDYRNIIERLQDIVSALEDRLRPLVQAELSVLVDVLHRPELLFPENTDARRKCESGGFICKLIKHTKQLLEENEEKLCIKVLQTLREMMTKDRGYGEKLISIDELDNAELPPAPDSENATEKGEALRQVLVNRYYGNVRPSGRRESLTSFGNGPLSAGGPGKPGGGGGGSGSSSMSRGEMSLAEVQCHLDKEGASNLVIDLIMNASSDRVFHESILLAIALLEGGNTTIQHSFFCRLTEDKKSEKFFKVFYDRMKVAQQEIKATVTVNTSDLGNKKKDDEVDRDAPSRKKAKEPTTQITEEVRDQLLEASAATRKAFTTFRREADPDDHYQPGEGTQATADKAKDDLEMSAVITIMQPILRFLQLLCENHNRDLQNFLRCQNNKTNYNLVCETLQFLDCICGSTTGGLGLLGLYINEKNVALINQTLESLTEYCQGPCHENQNCIATHESNGIDIITALILNDINPLGKKRMDLVLELKNNASKLLLAIMESRHDSENAERILYNMRPKELVEVIKKAYMQGEVEFEDGENGEDGAASPRNVGHNIYILAHQLARHNKELQSMLKPGGQVDGDEALEFYAKHTAQIEIVRLDRTMEQIVFPVPSICEFLTKESKLRIYYTTERDEQGSKINDFFLRSEDLFNEMNWQKKLRAQPVLYWCARNMSFWSSISFNLAVLMNLLVAFFYPFKGVRGGTLEPHWSGLLWTAMLISLAIVIALPKPHGIRALIASTILRLIFSVGLQPTLFLLGAFNVCNKIIFLMSFVGNCGTFTRGYRAMVLDVEFLYHLLYLVICAMGLFVHEFFYSLLLFDLVYREETLLNVIKSVTRNGRSIILTAVLALILVYLFSIVGYLFFKDDFILEVDRLPNETAVPETGESLASEFLFSDVCRVESGENCSSPAPREELVPAEETEQDKEHTCETLLMCIVTVLSHGLRSGGGVGDVLRKPSKEEPLFAARVIYDLLFFFMVIIIVLNLIFGVIIDTFADLRSEKQKKEEILKTTCFICGLERDKFDNKTVTFEEHIKEEHNMWHYLCFIVLVKVKDSTEYTGPESYVAEMIKERNLDWFPRMRAMSLVSSDSEGEQNELRNLQEKLESTMKLVTNLSGQLSELKDQMTEQRKQKQRIGLLGHPPHMNVNPQQPA

SEQ ID NO: 49796 - protein, 2758 aa, Homo sapiens
MSDKMSSFLHIGDICSLYAEGSTNGFISTLGLVDDRCVVQPETGDLNNPPKKFRDCLFKLCPMNRYSAQKQFWKAAKPGANSTTDAVLLNKLHHAADLEKKQNETENRKLLGTVIQYGNVIQLLHLKSNKYLTVNKRLPALLEKNAMRVTLDEAGNEGSWFYIQPFYKLRSIGDSVVIGDKVVLNPVNAGQPLHASSHQLVDNPGCNEVNSVNCNTSWKIVLFMKWSDNKDDILKGGDVVRLFHAEQEKFLTCDEHRKKQHVFLRTTGRQSATSATSSKALWEVEVVQHDPCRGGAGYWNSLFRFKHLATGHYLAAEVDPDFEEECLEFQPSVDPDQDASRSRLRNAQEKMVYSLVSVPEGNDISSIFELDPTTLRGGDSLVPRNSYVRLRHLCTNTWVHSTNIPIDKEEEKPVMLKIGTSPVKEDKEAFAIVPVSPAEVRDLDFANDASKVLGSIAGKLEKGTITQNERRSVTKLLEDLVYFVTGGTNSGQDVLEVVFSKPNRERQKLMREQNILKQIFKLLQAPFTDCGDGPMLRLEELGDQRHAPFRHICRLCYRVLRHSQQDYRKNQEYIAKQFGFMQKQIGYDVLAEDTITALLHNNRKLLEKHITAAEIDTFVSLVRKNREPRFLDYLSDLCVSMNKSIPVTQELICKAVLNPTNADILIETKLVLSRFEFEGVSSTGENALEAGEDEEEVWLFWRDSNKEIRSKSVRELAQDAKEGQKEDRDVLSYYRYQLNLFARMCLDRQYLAINEISGQLDVDLILRCMSDENLPYDLRASFCRLMLHMHVDRDPQEQVTPVKYARLWSEIPSEIAIDDYDSSGASKDEIKERFAQTMEFVEEYLRDVVCQRFPFSDKEKNKLTFEVVNLARNLIYFGFYNFSDLLRLTKILLAILDCVHVTTIFPISKMAKGEENKGNNDVEKLKSSNVMRSIHGVGELMTQVVLRGGGFLPMTPMAAAPEGNVKQAEPEKEDIMVMDTKLKIIEILQFILNVRLDYRISCLLCIFKREFDESNSQTSETSSGNSSQEGPSNVPGALDFEHIEEQAEGIFGGSEENTPLDLDDHGGRTFLRVLLHLTMHDYPPLVSGALQLLFRHFSQRQEVLQAFKQVQLLVTSQDVDNYKQIKQDLDQLRSIVEKSELWVYKGQGPDETMDGASGENEHKKTEEGNNKPQKHESTSSYNYRVVKEILIRLSKLCVQESASVRKSRKQQQRLLRNMGAHAVVLELLQIPYEKAEDTKMQEIMRLAHEFLQNFCAGNQQNQALLHKHINLFLNPGILEAVTMQHIFMNNFQLCSEINERVVQHFVHCIETHGRNVQYIKFLQTIVKAEGKFIKKCQDMVMAELVNSGEDVLVFYNDRASFQTLIQMMRSERDRMDENSPLMYHIHLVELLAVCTEGKNVYTEIKCNSLLPLDDIVRVVTHEDCIPEVKIAYINFLNHCYVDTEVEMKEIYTSNHMWKLFENFLVDICRACNNTSDRKHADSILEKYVTEIVMSIVTTFFSSPFSDQSTTLQTRQPVFVQLLQGVFRVYHCNWLMPSQKASVESCIRVLSDVAKSRAIAIPVDLDSQVNNLFLKSHSIVQKTAMNWRLSARNAARRDSVLAASRDYRNIIERLQDIVSALEDRLRPLVQAELSVLVDVLHRPELLFPENTDARRKCESGGFICKLIKHTKQLLEENEEKLCIKVLQTLREMMTKDRGYGEKLISIDELDNAELPPAPDSENATEELEPSPPLRQLEDHKRGEALRQVLVNRYYGNVRPSGRRESLTSFGNGPLSAGGPGKPGGGGGGSGSSSMSRGEMSLAEVQCHLDKEGASNLVIDLIMNASSDRVFHESILLAIALLEGGNTTIQHSFFCRLTEDKKSEKFFKVFYDRMKVAQQEIKATVTVNTSDLGNKKKDDEVDRDAPSRKKAKEPTTQITEEVRDQLLEASAATRKAFTTFRREADPDDHYQPGEGTQATADKAKDDLEMSAVITIMQPILRFLQLLCENHNRDLQNFLRCQNNKTNYNLVCETLQFLDCICGSTTGGLGLLGLYINEKNVALINQTLESLTEYCQGPCHENQNCIATHESNGIDIITALILNDINPLGKKRMDLVLELKNNASKLLLAIMESRHDSENAERILYNMRPKELVEVIKKAYMQGEVEFEDGENGEDGAASPRNVGHNIYILAHQLARHNKELQSMLKPGGQVDGDEALEFYAKHTAQIEIVRLDRTMEQIVFPVPSICEFLTKESKLRIYYTTERDEQGSKINDFFLRSEDLFNEMNWQKKLRAQPVLYWCARNMSFWSSISFNLAVLMNLLVAFFYPFKGVRGGTLEPHWSGLLWTAMLISLAIVIALPKPHGIRALIASTILRLIFSVGLQPTLFLLGAFNVCNKIIFLMSFVGNCGTFTRGYRAMVLDVEFLYHLLYLVICAMGLFVHEFFYSLLLFDLVYREETLLNVIKSVTRNGRSIILTAVLALILVYLFSIVGYLFFKDDFILEVDRLPNETAVPETGESLASEFLFSDVCRVESGENCSSPAPREELVPAEETEQDKEHTCETLLMCIVTVLSHGLRSGGGVGDVLRKPSKEEPLFAARVIYDLLFFFMVIIIVLNLIFGVIIDTFADLRSEKQKKEEILKTTCFICGLERDKFDNKTVTFEEHIKEEHNMWHYLCFIVLVKVKDSTEYTGPESYVAEMIKERNLDWFPRMRAMSLVSSDSEGEQNELRNLQEKLESTMKLVTNLSGQLSELKDQMTEQRKQKQRIGLLGHPPHMNVNPQQPA

SEQ ID NO: 49797 - protein, 2710 aa, Homo sapiens
MSDKMSSFLHIGDICSLYAEGSTNGFISTLGLVDDRCVVQPETGDLNNPPKKFRDCLFKLCPMNRYSAQKQFWKAAKPGANSTTDAVLLNKLHHAADLEKKQNETENRKLLGTVIQYGNVIQLLHLKSNKYLTVNKRLPALLEKNAMRVTLDEAGNEGSWFYIQPFYKLRSIGDSVVIGDKVVLNPVNAGQPLHASSHQLVDNPGCNEVNSVNCNTSWKIVLFMKWSDNKDDILKGGDVVRLFHAEQEKFLTCDEHRKKQHVFLRTTGRQSATSATSSKALWEVEVVQHDPCRGGAGYWNSLFRFKHLATGHYLAAEVDPDFEEECLEFQPSVDPDQDASRSRLRNAQEKMVYSLVSVPEGNDISSIFELDPTTLRGGDSLVPRNSYVRLRHLCTNTWVHSTNIPIDKEEEKPVMLKIGTSPVKEDKEAFAIVPVSPAEVRDLDFANDASKVLGSIAGKLEKGTITQNERRSVTKLLEDLVYFVTGGTNSGQDVLEVVFSKPNRERQKLMREQNILKQIFKLLQAPFTDCGDGPMLRLEELGDQRHAPFRHICRLCYRVLRHSQQDYRKNQEYIAKQFGFMQKQIGYDVLAEDTITALLHNNRKLLEKHITAAEIDTFVSLVRKNREPRFLDYLSDLCVSMNKSIPVTQELICKAVLNPTNADILIETKLVLSRFEFEGVSSTGENALEAGEDEEEVWLFWRDSNKEIRSKSVRELAQDAKEGQKEDRDVLSYYRYQLNLFARMCLDRQYLAINEISGQLDVDLILRCMSDENLPYDLRASFCRLMLHMHVDRDPQEQVTPVKYARLWSEIPSEIAIDDYDSSGASKDEIKERFAQTMEFVEEYLRDVVCQRFPFSDKEKNKLTFEVVNLARNLIYFGFYNFSDLLRLTKILLAILDCVHVTTIFPISKMAKGEENKGSNVMRSIHGVGELMTQVVLRGGGFLPMTPMAAAPEGNVKQAEPEKEDIMVMDTKLKIIEILQFILNVRLDYRISCLLCIFKREFDESNSQTSETSSGNSSQEGPSNVPGALDFEHIEEQAEGIFGGSEENTPLDLDDHGGRTFLRVLLHLTMHDYPPLVSGALQLLFRHFSQRQEVLQAFKQVQLLVTSQDVDNYKQIKQDLDQLRSIVEKSELWVYKGQGPDETMDGASGENEHKKTEEGNNKPQKHESTSSYNYRVVKEILIRLSKLCVQESASVRKSRKQQQRLLRNMGAHAVVLELLQIPYEKAEDTKMQEIMRLAHEFLQNFCAGNQQNQALLHKHINLFLNPGILEAVTMQHIFMNNFQLCSEINERVVQHFVHCIETHGRNVQYIKFLQTIVKAEGKFIKKCQDMVMAELVNSGEDVLVFYNDRASFQTLIQMMRSERDRMDENSPLMYHIHLVELLAVCTEGKNVYTEIKCNSLLPLDDIVRVVTHEDCIPEVKIAYINFLNHCYVDTEVEMKEIYTSNHMWKLFENFLVDICRACNNTSDRKHADSILEKYVTEIVMSIVTTFFSSPFSDQSTTLQTRQPVFVQLLQGVFRVYHCNWLMPSQKASVESCIRVLSDVAKSRAIAIPVDLDSQVNNLFLKSHSIVQKTAMNWRLSARNAARRDSVLAASRDYRNIIERLQDIVSALEDRLRPLVQAELSVLVDVLHRPELLFPENTDARRKCESGGFICKLIKHTKQLLEENEEKLCIKVLQTLREMMTKDRGYGEKGEALRQVLVNRYYGNVRPSGRRESLTSFGNGPLSAGGPGKPGGGGGGSGSSSMSRGEMSLAEVQCHLDKEGASNLVIDLIMNASSDRVFHESILLAIALLEGGNTTIQHSFFCRLTEDKKSEKFFKVFYDRMKVAQQEIKATVTVNTSDLGNKKKDDEVDRDAPSRKKAKEPTTQITEEVRDQLLEASAATRKAFTTFRREADPDDHYQPGEGTQATADKAKDDLEMSAVITIMQPILRFLQLLCENHNRDLQNFLRCQNNKTNYNLVCETLQFLDCICGSTTGGLGLLGLYINEKNVALINQTLESLTEYCQGPCHENQNCIATHESNGIDIITALILNDINPLGKKRMDLVLELKNNASKLLLAIMESRHDSENAERILYNMRPKELVEVIKKAYMQGEVEFEDGENGEDGAASPRNVGHNIYILAHQLARHNKELQSMLKPGGQVDGDEALEFYAKHTAQIEIVRLDRTMEQIVFPVPSICEFLTKESKLRIYYTTERDEQGSKINDFFLRSEDLFNEMNWQKKLRAQPVLYWCARNMSFWSSISFNLAVLMNLLVAFFYPFKGVRGGTLEPHWSGLLWTAMLISLAIVIALPKPHGIRALIASTILRLIFSVGLQPTLFLLGAFNVCNKIIFLMSFVGNCGTFTRGYRAMVLDVEFLYHLLYLVICAMGLFVHEFFYSLLLFDLVYREETLLNVIKSVTRNGRSIILTAVLALILVYLFSIVGYLFFKDDFILEVDRLPNETAVPETGESLASEFLFSDVCRVESGENCSSPAPREELVPAEETEQDKEHTCETLLMCIVTVLSHGLRSGGGVGDVLRKPSKEEPLFAARVIYDLLFFFMVIIIVLNLIFGVIIDTFADLRSEKQKKEEILKTTCFICGLERDKFDNKTVTFEEHIKEEHNMWHYLCFIVLVKVKDSTEYTGPESYVAEMIKERNLDWFPRMRAMSLVSSDSEGEQNELRNLQEKLESTMKLVTNLSGQLSELKDQMTEQRKQKQRIGLLGHPPHMNVNPQQPA

SEQ ID NO: 49798 - protein, 2710 aa, Homo sapiens
MSDKMSSFLHIGDICSLYAEGSTNGFISTLGLVDDRCVVQPETGDLNNPPKKFRDCLFKLCPMNRYSAQKQFWKAAKPGANSTTDAVLLNKLHHAADLEKKQNETENRKLLGTVIQYGNVIQLLHLKSNKYLTVNKRLPALLEKNAMRVTLDEAGNEGSWFYIQPFYKLRSIGDSVVIGDKVVLNPVNAGQPLHASSHQLVDNPGCNEVNSVNCNTSWKIVLFMKWSDNKDDILKGGDVVRLFHAEQEKFLTCDEHRKKQHVFLRTTGRQSATSATSSKALWEVEVVQHDPCRGGAGYWNSLFRFKHLATGHYLAAEVDPDFEEECLEFQPSVDPDQDASRSRLRNAQEKMVYSLVSVPEGNDISSIFELDPTTLRGGDSLVPRNSYVRLRHLCTNTWVHSTNIPIDKEEEKPVMLKIGTSPVKEDKEAFAIVPVSPAEVRDLDFANDASKVLGSIAGKLEKGTITQNERRSVTKLLEDLVYFVTGGTNSGQDVLEVVFSKPNRERQKLMREQNILKQIFKLLQAPFTDCGDGPMLRLEELGDQRHAPFRHICRLCYRVLRHSQQDYRKNQEYIAKQFGFMQKQIGYDVLAEDTITALLHNNRKLLEKHITAAEIDTFVSLVRKNREPRFLDYLSDLCVSMNKSIPVTQELICKAVLNPTNADILIETKLVLSRFEFEGVSSTGENALEAGEDEEEVWLFWRDSNKEIRSKSVRELAQDAKEGQKEDRDVLSYYRYQLNLFARMCLDRQYLAINEISGQLDVDLILRCMSDENLPYDLRASFCRLMLHMHVDRDPQEQVTPVKYARLWSEIPSEIAIDDYDSSGASKDEIKERFAQTMEFVEEYLRDVVCQRFPFSDKEKNKLTFEVVNLARNLIYFGFYNFSDLLRLTKILLAILDCVHVTTIFPISKMAKGEENKGSNVMRSIHGVGELMTQVVLRGGGFLPMTPMAAAPEGNVKQAEPEKEDIMVMDTKLKIIEILQFILNVRLDYRISCLLCIFKREFDESNSQTSETSSGNSSQEGPSNVPGALDFEHIEEQAEGIFGGRKENTPLDLDDHGGRTFLRVLLHLTMHDYPPLVSGALQLLFRHFSQRQEVLQAFKQVQLLVTSQDVDNYKQIKQDLDQLRSIVEKSELWVYKGQGPDETMDGASGENEHKKTEEGNNKPQKHESTSSYNYRVVKEILIRLSKLCVQESASVRKSRKQQQRLLRNMGAHAVVLELLQIPYEKAEDTKMQEIMRLAHEFLQNFCAGNQQNQALLHKHINLFLNPGILEAVTMQHIFMNNFQLCSEINERVVQHFVHCIETHGRNVQYIKFLQTIVKAEGKFIKKCQDMVMAELVNSGEDVLVFYNDRASFQTLIQMMRSERDRMDENSPLMYHIHLVELLAVCTEGKNVYTEIKCNSLLPLDDIVRVVTHEDCIPEVKIAYINFLNHCYVDTEVEMKEIYTSNHMWKLFENFLVDICRACNNTSDRKHADSILEKYVTEIVMSIVTTFFSSPFSDQSTTLQTRQPVFVQLLQGVFRVYHCNWLMPSQKASVESCIRVLSDVAKSRAIAIPVDLDSQVNNLFLKSHSIVQKTAMNWRLSARNAARRDSVLAASRDYRNIIERLQDIVSALEDRLRPLVQAELSVLVDVLHRPELLFPENTDARRKCESGGFICKLIKHTKQLLEENEEKLCIKVLQTLREMMTKDRGYGEKGEALRQVLVNRYYGNVRPSGRRESLTSFGNGPLSAGGPGKPGGGGGGSGSSSMSRGEMSLAEVQCHLDKEGASNLVIDLIMNASSDRVFHESILLAIALLEGGNTTIQHSFFCRLTEDKKSEKFFKVFYDRMKVAQQEIKATVTVNTSDLGNKKKDDEVDRDAPSRKKAKEPTTQITEEVRDQLLEASAATRKAFTTFRREADPDDHYQPGEGTQATADKAKDDLEMSAVITIMQPILRFLQLLCENHNRDLQNFLRCQNNKTNYNLVCETLQFLDCICGSTTGGLGLLGLYINEKNVALINQTLESLTEYCQGPCHENQNCIATHESNGIDIITALILNDINPLGKKRMDLVLELKNNASKLLLAIMESRHDSENAERILYNMRPKELVEVIKKAYMQGEVEFEDGENGEDGAASPRNVGHNIYILAHQLARHNKELQSMLKPGGQVDGDEALEFYAKHTAQIEIVRLDRTMEQIVFPVPSICEFLTKESKLRIYYTTERDEQGSKINDFFLRSEDLFNEMNWQKKLRAQPVLYWCARNMSFWSSISFNLAVLMNLLVAFFYPFKGVRGGTLEPHWSGLLWTAMLISLAIVIALPKPHGIRALIASTILRLIFSVGLQPTLFLLGAFNVCNKIIFLMSFVGNCGTFTRGYRAMVLDVEFLYHLLYLVICAMGLFVHEFFYSLLLFDLVYREETLLNVIKSVTRNGRSIILTAVLALILVYLFSIVGYLFFKDDFILEVDRLPNETAVPETGESLASEFLFSDVCRVESGENCSSPAPREELVPAEETEQDKEHTCETLLMCIVTVLSHGLRSGGGVGDVLRKPSKEEPLFAARVIYDLLFFFMVIIIVLNLIFGVIIDTFADLRSEKQKKEEILKTTCFICGLERDKFDNKTVTFEEHIKEEHNMWHYLCFIVLVKVKDSTEYTGPESYVAEMIKERNLDWFPRMRAMSLVSSDSEGEQNELRNLQEKLESTMKLVTNLSGQLSELKDQMTEQRKQKQRIGLLGHPPHMNVNPQQPA

SEQ ID NO: 49799 - protein, 1204 aa, Homo sapiens
QEPGHCHSRGPGQPSQQPLSQVPQHCAEAMNWRLSARNAARRDSVLAASRDYRNIIERLQDIVSALEDRLRPLVQAELSVLVDVLHRPELLFPENTDARRKCESGGFICKLIKHTKQLLEENEEKLCIKVLQTLREMMTKDRGYGEKLISIDELDNAELPPAPDSENATEELEPSPPLRQLEDHKRGEALRQVLVNRYYGNVRPSGRRESLTSFGNGPLSAGGPGKPGGGGGGSGSSSMSRGEMSLAEVQCHLDKEGASNLVIDLIMNASSDRVFHESILLAIALLEGGNTTIQHSFFCRLTEDKKSEKFFKVFYDRMKVAQQEIKATVTVNTSDLGNKKKDDEVDRDAPSRKKAKEPTTQITEEVRDQLLEASAATRKAFTTFRREADPDDHYQPGEGTQATADKAKDDLEMSAVITIMQPILRFLQLLCENHNRDLQNFLRCQNNKTNYNLVCETLQFLDCICGSTTGGLGLLGLYINEKNVALINQTLESLTEYCQGPCHENQNCIATHESNGIDIITALILNDINPLGKKRMDLVLELKNNASKLLLAIMESRHDSENAERILYNMRPKELVEVIKKAYMQGEVEFEDGENGEDGAASPRNVGHNIYILAHQLARHNKELQSMLKPGGQVDGDEALEFYAKHTAQIEIVRLDRTMEQIVFPVPSICEFLTKESKLRIYYTTERDEQGSKINDFFLRSEDLFNEMNWQKKLRAQPVLYWCARNMSFWSSISFNLAVLMNLLVAFFYPFKGVRGGTLEPHWSGLLWTAMLISLAIVIALPKPHGIRALIASTILRLIFSVGLQPTLFLLGAFNVCNKIIFLMSFVGNCGTFTRGYRAMVLDVEFLYHLLYLVICAMGLFVHEFFYSLLLFDLVYREETLLNVIKSVTRNGRSIILTAVLALILVYLFSIVGYLFFKDDFILEVDRLPNETAVPETGESLASEFLFSDVCRVESGENCSSPAPREELVPAEETEQDKEHTCETLLMCIVTVLSHGLRSGGGVGDVLRKPSKEEPLFAARVIYDLLFFFMVIIIVLNLIFGVIIDTFADLRSEKQKKEEILKTTCFICGLERDKFDNKTVTFEEHIKEEHNMWHYLCFIVLVKVKDSTEYTGPESYVAEMIKERNLDWFPRMRAMSLVSSDSEGEQNELRNLQEKLESTMKLVTNLSGQLSELKDQMTEQRKQKQRIGLLGHPPHMNVNPQQPA

SEQ ID NO: 49800 - protein, 2743 aa, Homo sapiens; identical to SEQ ID NO: 49794

SEQ ID NO: 49801 - protein, 2695 aa, Homo sapiens
MSDKMSSFLHIGDICSLYAEGSTNGFISTLGLVDDRCVVQPETGDLNNPPKKFRDCLFKLCPMNRYSAQKQFWKAAKPGANSTTDAVLLNKLHHAADLEKKQNETENRKLLGTVIQYGNVIQLLHLKSNKYLTVNKRLPALLEKNAMRVTLDEAGNEGSWFYIQPFYKLRSIGDSVVIGDKVVLNPVNAGQPLHASSHQLVDNPGCNEVNSVNCNTSWKIVLFMKWSDNKDDILKGGDVVRLFHAEQEKFLTCDEHRKKQHVFLRTTGRQSATSATSSKALWEVEVVQHDPCRGGAGYWNSLFRFKHLATGHYLAAEVDPDQDASRSRLRNAQEKMVYSLVSVPEGNDISSIFELDPTTLRGGDSLVPRNSYVRLRHLCTNTWVHSTNIPIDKEEEKPVMLKIGTSPVKEDKEAFAIVPVSPAEVRDLDFANDASKVLGSIAGKLEKGTITQNERRSVTKLLEDLVYFVTGGTNSGQDVLEVVFSKPNRERQKLMREQNILKQIFKLLQAPFTDCGDGPMLRLEELGDQRHAPFRHICRLCYRVLRHSQQDYRKNQEYIAKQFGFMQKQIGYDVLAEDTITALLHNNRKLLEKHITAAEIDTFVSLVRKNREPRFLDYLSDLCVSMNKSIPVTQELICKAVLNPTNADILIETKLVLSRFEFEGVSSTGENALEAGEDEEEVWLFWRDSNKEIRSKSVRELAQDAKEGQKEDRDVLSYYRYQLNLFARMCLDRQYLAINEISGQLDVDLILRCMSDENLPYDLRASFCRLMLHMHVDRDPQEQVTPVKYARLWSEIPSEIAIDDYDSSGASKDEIKERFAQTMEFVEEYLRDVVCQRFPFSDKEKNKLTFEVVNLARNLIYFGFYNFSDLLRLTKILLAILDCVHVTTIFPISKMAKGEENKGSNVMRSIHGVGELMTQVVLRGGGFLPMTPMAAAPEGNVKQAEPEKEDIMVMDTKLKIIEILQFILNVRLDYRISCLLCIFKREFDESNSQTSETSSGNSSQEGPSNVPGALDFEHIEEQAEGIFGGSEENTPLDLDDHGGRTFLRVLLHLTMHDYPPLVSGALQLLFRHFSQRQEVLQAFKQVQLLVTSQDVDNYKQIKQDLDQLRSIVEKSELWVYKGQGPDETMDGASGENEHKKTEEGNNKPQKHESTSSYNYRVVKEILIRLSKLCVQESASVRKSRKQQQRLLRNMGAHAVVLELLQIPYEKAEDTKMQEIMRLAHEFLQNFCAGNQQNQALLHKHINLFLNPGILEAVTMQHIFMNNFQLCSEINERVVQHFVHCIETHGRNVQYIKFLQTIVKAEGKFIKKCQDMVMAELVNSGEDVLVFYNDRASFQTLIQMMRSERDRMDENSPLMYHIHLVELLAVCTEGKNVYTEIKCNSLLPLDDIVRVVTHEDCIPEVKIAYINFLNHCYVDTEVEMKEIYTSNHMWKLFENFLVDICRACNNTSDRKHADSILEKYVTEIVMSIVTTFFSSPFSDQSTTLQTRQPVFVQLLQGVFRVYHCNWLMPSQKASVESCIRVLSDVAKSRAIAIPVDLDSQVNNLFLKSHSIVQKTAMNWRLSARNAARRDSVLAASRDYRNIIERLQDIVSALEDRLRPLVQAELSVLVDVLHRPELLFPENTDARRKCESGGFICKLIKHTKQLLEENEEKLCIKVLQTLREMMTKDRGYGEKGEALRQVLVNRYYGNVRPSGRRESLTSFGNGPLSAGGPGKPGGGGGGSGSSSMSRGEMSLAEVQCHLDKEGASNLVIDLIMNASSDRVFHESILLAIALLEGGNTTIQHSFFCRLTEDKKSEKFFKVFYDRMKVAQQEIKATVTVNTSDLGNKKKDDEVDRDAPSRKKAKEPTTQITEEVRDQLLEASAATRKAFTTFRREADPDDHYQPGEGTQATADKAKDDLEMSAVITIMQPILRFLQLLCENHNRDLQNFLRCQNNKTNYNLVCETLQFLDCICGSTTGGLGLLGLYINEKNVALINQTLESLTEYCQGPCHENQNCIATHESNGIDIITALILNDINPLGKKRMDLVLELKNNASKLLLAIMESRHDSENAERILYNMRPKELVEVIKKAYMQGEVEFEDGENGEDGAASPRNVGHNIYILAHQLARHNKELQSMLKPGGQVDGDEALEFYAKHTAQIEIVRLDRTMEQIVFPVPSICEFLTKESKLRIYYTTERDEQGSKINDFFLRSEDLFNEMNWQKKLRAQPVLYWCARNMSFWSSISFNLAVLMNLLVAFFYPFKGVRGGTLEPHWSGLLWTAMLISLAIVIALPKPHGIRALIASTILRLIFSVGLQPTLFLLGAFNVCNKIIFLMSFVGNCGTFTRGYRAMVLDVEFLYHLLYLVICAMGLFVHEFFYSLLLFDLVYREETLLNVIKSVTRNGRSIILTAVLALILVYLFSIVGYLFFKDDFILEVDRLPNETAVPETGESLASEFLFSDVCRVESGENCSSPAPREELVPAEETEQDKEHTCETLLMCIVTVLSHGLRSGGGVGDVLRKPSKEEPLFAARVIYDLLFFFMVIIIVLNLIFGVIIDTFADLRSEKQKKEEILKTTCFICGLERDKFDNKTVTFEEHIKEEHNMWHYLCFIVLVKVKDSTEYTGPESYVAEMIKERNLDWFPRMRAMSLVSSDSEGEQNELRNLQEKLESTMKLVTNLSGQLSELKDQMTEQRKQKQRIGLLGHPPHMNVNPQQPA

SEQ ID NO: 49802 - protein, 721 aa, Homo sapiens
MSDKMSSFLHIGDICSLYAEGSTNGFISTLGLVDDRCVVQPETGDLNNPPKKFRDCLFKLCPMNRYSAQKQFWKAAKPGANSTTDAVLLNKLHHAADLEKKQNETENRKLLGTVIQYGNVIQLLHLKSNKYLTVNKRLPALLEKNAMRVTLDEAGNEGSWFYIQPFYKLRSIGDSVVIGDKVVLNPVNAGQPLHASSHQLVDNPGCNEVNSVNCNTSWKIVLFMKWSDNKDDILKGGDVVRLFHAEQEKFLTCDEHRKKQHVFLRTTGRQSATSATSSKALWEVEVVQHDPCRGGAGYWNSLFRFKHLATGHYLAAEVDPDFEEECLEFQPSVCNKIIFLMSFVGNCGTFTRGYRAMVLDVEFLYHLLYLVICAMGLFVHEFFYSLLLFDLVYREETLLNVIKSVTRNGRSIILTAVLALILVYLFSIVGYLFFKDDFILEVDRLPNETAVPETGESLASEFLFSDVCRVESGENCSSPAPREELVPAEETEQDKEHTCETLLMCIVTVLSHGLRSGGGVGDVLRKPSKEEPLFAARVIYDLLFFFMVIIIVLNLIFGVIIDTFADLRSEKQKKEEILKTTCFICGLERDKFDNKTVTFEEHIKEEHNMWHYLCFIVLVKVKDSTEYTGPESYVAEMIKERNLDWFPRMRAMSLVSSDSEGEQNELRNLQEKLESTMKLVTNLSGQLSELKDQMTEQRKQKQRIGLLGHPPHMNVNPQQPA

SEQ ID NO: 49803 - protein, 181 aa, Homo sapiens
MTEKMSSFLYIGDIVSLYAEGSVNGFISTLGLVDDRCVVHPEAGDLANPPKKFRDCLFKVCPMNRYSAQKQYWKAKQAKQGNHTEAALLKKLQHAAELEQKQNESENKKLLGEIVKYSNVIQLLHIKSNKYLTVNKRLPALLEKNAMRVSLDAAGNEGSWFYIHPFWKLRSEGDNDASFWI

SEQ ID NO: 49804 - protein, 2701 aa, Homo sapiens
MTEKMSSFLYIGDIVSLYAEGSVNGFISTLGLVDDRCVVHPEAGDLANPPKKFRDCLFKVCPMNRYSAQKQYWKAKQAKQGNHTEAALLKKLQHAAELEQKQNESENKKLLGEIVKYSNVIQLLHIKSNKYLTVNKRLPALLEKNAMRVSLDAAGNEGSWFYIHPFWKLRSEGDNIVVGDKVVLMPVNAGQPLHASNIELLDNPGCKEVNAVNCNTSWKITLFMKYSSYREDVLKGGDVVRLFHAEQEKFLTCDEYEKKQHIFLRTTLRQSATSATSSKALWEIEVVHHDPCRGGAGQWNSLFRFKHLATGNYLAAELNPDYRDAQNEGKNVRDGVPPTSKKKRQAGEKIMYTLVSVPHGNDIASLFELDATTLQRADCLVPRNSYVRLRHLCTNTWVTSTSIPIDTDEERPVMLKIGTCQTKEDKEAFAIVSVPLSEVRDLDFANDANKVLATTVKKLENGTITQNERRFVTKLLEDLIFFVADVPNNGQEVLDVVITKPNRERQKLMREQNILAQVFGILKAPFKEKAGEGSMLRLEDLGDQRYAPYKYMLRLCYRVLRHSQQDYRKNQEYIAKNFCVMQSQIGYDILAEDTITALLHNNRKLLEKHITAKEIETFVSLLRRNREPRFLDYLSDLCVSNTTAIPVTQELICKFMLSPGNADILIQTKVVSMQADNPMESSILSDDIDDEEVWLYWIDSNKEPHGKAIRHLAQEAKEGTKADLEVLTYYRYQLNLFARMCLDRQYLAINQISTQLSVDLILRCVSDESLPFDLRASFCRLMLHMHVDRDPQESVVPVRYARLWTEIPTKITIHEYDSITDSSRNDMKRKFALTMEFVEEYLKEVVNQPFPFGDKEKNKLTFEVVHLARNLIYFGFYSFSELLRLTRTLLAILDIVQAPMSSYFERLSKFQDGGNNVMRTIHGVGEMMTQMVLSRGSIFPMSVPDVPPSIHPSKQGSPTEHEDVTVMDTKLKIIEILQFILSVRLDYRISYMLSIYKKEFGEDNDNAETSASGSPDTLLPSAIVPDIDEIAAQAETMFAGRKEKNPVQLDDEGGRTFLRVLIHLIMHDYPPLLSGALQLLFKHFSQRAEVLQAFKQVQLLVSNQDVDNYKQIKADLDQLRLTVEKSELWVEKSSNYENGEIGESQVKGGEEPIEESNILSPVQDGTKKPQIDSNKSNNYRIVKEILIRLSKLCVQNKKCRNQHQRLLKNMGAHSVVLDLLQIPYEKNDEKMNEVMNLAHTFLQNFCRGNPQNQVLLHKHLNLFLTPGLLEAETMRHIFMNNYHLCNEISERVVQHFVHCIETHGRHVEYLRFLQTIVKADGKYVKKCQDMVMTELINGGEDVLIFYNDRASFPILLHMMCSERDRGDESGPLAYHITLVELLAACTEGKNVYTEIKCNSLLPLDDIVRVVTHDDCIPEVKIAYVNFVNHCYVDTEVEMKEIYTSNHIWKLFENFLVDMARVCNTTTDRKHADIFLEKCVTESIMNIVSGFFNSPFSDNSTSLQTHQPVFIQLLQSAFRIYNCTWPNPAQKASVESCIRTLAEVAKNRGIAIPVDLDSQVNTLFMKSHSNMVQRAAMGWRLSARSGPRFKEALGGPAWDYRNIIEKLQDVVASLEHQFSPMMQAEFSVLVDVLYSPELLFPEGSDARIRCGAFMSKLINHTKKLMEKEEKLCIKILQTLREMLEKKDSFVEEGNTLRKILLNRYFKGDYSIGVNGHLSGAYSKTAQVGGSFSGQDSDKMGISMSDIQCLLDKEGASELVIDVIVNTKNDRIFSEGIFLGIALLEGGNTQTQYSFYQQLHEQKKSEKFFKVLYDRMKAAQKEIRSTVTVNTIDLGNKKRDDDNELMTSGPRMRVRDSTLHLKEGMKGQLTEASSATSKAYCVYRREMDPEIDIMCTGPEAGNTEEKSAEEVTMSPAIAIMQPILRFLQLLCENHNRELQNFLRNQNNKTNYNLVCETLQFLDCICGSTTGGLGLLGLYINEKNVALVNQNLESLTEYCQGPCHENQTCIATHESNGIDIIIALILNDINPLGKYRMDLVLQLKNNASKLLLAIMESRHDSENAERILFNMRPRELVDVMKNAYNQGLECDHGDDEGGDDGVSPKDVGHNIYILAHQLARHNKLLQQMLKPGSDPDEGDEALKYYANHTAQIEIVRHDRTMEQIVFPVPNICEYLTRESKCRVFNTTERDEQGSKVNDFFQQTEDLYNEMKWQKKIRNNPALFWFSRHISLWGSISFNLAVFINLAVALFYPFGDDGDEGTLSPLFSVLLWIAVAICTSMLFFFSKPVGIRPFLVSIMLRSIYTIGLGPTLILLGAANLCNKIVFLVSFVGNRGTFTRGYRAVILDMAFLYHVAYVLVCMLGLFVHEFFYSFLLFDLVYREETLLNVIKSVTRNGRSIILTAVLALILVYLFSIIGFLFLKDDFTMEVDRLKNRTPVTGSHQVPTMTLTTMMEACAKENCSPTIPASNTADEEYEDGIERTCDTLLMCIVTVLNQGLRNGGGVGDVLRRPSKDEPLFAARVVYDLLFYFIVIIIVLNLIFGVIIDTFADLRSEKQKKEEILKTTCFICGLERDKFDNKTVSFEEHIKSEHNMWHYLYFIVLVKVKDPTEYTGPESYVAQMIVEKNLDWFPRMRAMSLVSNEGDSEQNEIRSLQEKLESTMSLVKQLSGQLAELKEQMTEQRKNKQRLGFLGSNTPHVNHHMPPH

SEQ ID NO: 49805 - protein, 2671 aa, Homo sapiens
MSEMSSFLHIGDIVSLYAEGSVNGFISTLGLVDDRCVVEPAAGDLDNPPKKFRDCLFKVCPMNRYSAQKQYWKAKQTKQDKEKIADVVLLQKLQHAAQMEQKQNDTENKKVHGDVVKYGSVIQLLHMKSNKYLTVNKRLPALLEKNAMRVTLDATGNEGSWLFIQPFWKLRSNGDNVVVGDKVILNPVNAGQPLHASNYELSDNAGCKEVNSVNCNTSWKINLFMQFRDHLEEVLKGGDVVRLFHAEQEKFLTCDEYKGKLQVFLRTTLRQSATSATSSNALWEVEVVHHDPCRGGAGHWNGLYRFKHLATGNYLAAEENPSYKGDASDPKAAGMGAQGRTGRRNAGEKIKYCLVAVPHGNDIASLFELDPTTLQKTDSFVPRNSYVRLRHLCTNTWIQSTNVPIDIEEERPIRLMLGTCPTKEDKEAFAIVSVPVSEIRDLDFANDASSMLASAVEKLNEGFISQNDRRFVIQLLEDLVFFVSDVPNNGQNVLDIMVTKPNRERQKLMREQNILKQVFGILKAPFREKGGEGPLVRLEELSDQKNAPYQHMFRLCYRVLRHSQEDYRKNQEHIAKQFGMMQSQIGYDILAEDTITALLHNNRKLLEKHITKTEVETFVSLVRKNREPRFLDYLSDLCVSNHIAIPVTQELICKCVLDPKNSDILIRTELRPVKEMAQSHEYLSIEYSEEEVWLTWTDKNNEHHEKSVRQLAQEARAGNAHDENVLSYYRYQLKLFARMCLDRQYLAIDEISQQLGVDLIFLCMADEMLPFDLRASFCHLMLHVHVDRDPQELVTPVKFARLWTEIPTAITIKDYDSNLNASRDDKKNKFANTMEFVEDYLNNVVSEAVPFANEEKNKLTFEVVSLAHNLIYFGFYSFSELLRLTRTLLGIIDCVQGPPAMLQAYEDPGGKNVRRSIQGVGHMMSTMVLSRKQSVFSAPSLSAGASAAEPLDRSKFEENEDIVVMETKLKILEILQFILNVRLDYRISYLLSVFKKEFVEVFPMQDSGADGTAPAFDSTTANMNLDRIGEQAEAMFGVGKTSSMLEVDDEGGRMFLRVLIHLTMHDYAPLVSGALQLLFKHFSQRQEAMHTFKQVQLLISAQDVENYKVIKSELDRLRTMVEKSELWVDKKGSGKGEEVEAGAAKDKKERPTDEEGFLHPPGEKSSENYQIVKGILERLNKMCGVGEQMRKKQQRLLKNMDAHKVMLDLLQIPYDKGDAKMMEILRYTHQFLQKFCAGNPGNQALLHKHLHLFLTPGLLEAETMQHIFLNNYQLCSEISEPVLQHFVHLLATHGRHVQYLDFLHTVIKAEGKYVKKCQDMIMTELTNAGDDVVVFYNDKASLAHLLDMMKAARDGVEDHSPLMYHISLVDLLAACAEGKNVYTEIKCTSLLPLEDVVSVVTHEDCITEVKMAYVNFVNHCYVDTEVEMKEIYTSNHIWTLFENFTLDMARVCSKREKRVADPTLEKYVLSVVLDTINAFFSSPFSENSTSLQTHQTIVVQLLQSTTRLLECPWLQQQHKGSVEACIRTLAMVAKGRAILLPMDLDAHISSMLSSGASCAAAAQRNASSYKATTRAFPRVTPTANQWDYKNIIEKLQDIITALEERLKPLVQAELSVLVDVLHWPELLFLEGSEAYQRCESGGFLSKLIQHTKDLMESEEKLCIKVLRTLQQMLLKKTKYGDRGNQLRKMLLQNYLQNRKSTSRGDLPDPIGTGLDPDWSAIAATQCRLDKEGATKLVCDLITSTKNEKIFQESIGLAIHLLDGGNTEIQKSFHNLMMSDKKSERFFKVLHDRMKRAQQETKSTVAVNMNDLGSQPHEDREPVDPTTKGRVASFSIPGSSSRYSLGPSLRRGHEVSERVQSSEMGTSVLIMQPILRFLQLLCENHNRDLQNFLRCQNNKTNYNLVCETLQFLDIMCGSTTGGLGLLGLYINEDNVGLVIQTLETLTEYCQGPCHENQTCIVTHESNGIDIITALILNDISPLCKYRMDLVLQLKDNASKLLLALMESRHDSENAERILISLRPQELVDVIKKAYLQEEERENSEVSPREVGHNIYILALQLSRHNKQLQHLLKPVKRIQEEEAEGISSMLSLNNKQLSQMLKSSAPAQEEEEDPLAYYENHTSQIEIVRQDRSMEQIVFPVPGICQFLTEETKHRLFTTTEQDEQGSKVSDFFDQSSFLHNEMEWQRKLRSMPLIYWFSRRMTLWGSISFNLAVFINIIIAFFYPYMEGASTGVLDSPLISLLFWILICFSIAALFTKRYSIRPLIVALILRSIYYLGIGPTLNILGALNLTNKIVFVVSFVGNRGTFIRGYKAMVMDMEFLYHVGYILTSVLGLFAHELFYSILLFDLIYREETLFNVIKSVTRNGRSILLTALLALILVYLFSIVGFLFLKDDFILEVDRLPNNHSTASPLGMPHGAAAFVDTCSGDKMDCVSGLSVPEVLEEDRELDSTERACDTLLMCIVTVMNHGLRNGGGVGDILRKPSKDESLFPARVVYDLLFFFIVIIIVLNLIFGVIIDTFADLRSEKQKKEEILKTTCFICGLERDKFDNKTVSFEEHIKLEHNMWNYLYFIVLVRVKNKTDYTGPESYVAQMIKNKNLDWFPRMRAMSLVSNEGEGEQNEIRILQDKLNSTMKLVSHLTAQLNELKEQMTEQRKRRQRLGFVDVQNCISR

SEQ ID NO: 49806 - protein, 441 aa, Homo sapiens
MCVCQTMEVGQYGKNASRAGDRGVLLEPFIHQVGGHSSMMRYDDHTVCKPLISREQRFYESLPPEMKEFTPEYKGVVSVCFEGDSDGYINLVAYPYVESETVEQDDTTEREQPRRKHSRRSLHRSGSGSDHKEEKASLSLETSESSQEAKSPKVELHSHSEVPFQMLDGNSGLSSEKISHNPWSLRCHKQQLSRMRSESKDRKLYKFLLLENVVHHFKYPCVLDLKMGTRQHGDDASAEKAARQMRKCEQSTSATLGVRVCGMQVYQLDTGHYLCRNKYYGRGLSIEGFRNALYQYLHNGLDLRRDLFEPILSKLRGLKAVLERQASYRFYSSSLLVIYDGKECRAESCLDRRSEMRLKHLDMVLPEVASSCGPSTSPSNTSPEAGPSSQPKVDVRMIDFAHSTFKGFRDDPTVHDGPDRGYVFGLENLISIMEQMRDENQ

SEQ ID NO: 49807 - protein, 276 aa, Homo sapiens
MLDGNSGLSSEKISHNPWSLRCHKQQLSRMRSESKDRKLYKFLLLENVVHHFKYPCVLDLKMGTRQHGDDASAEKAARQMRKCEQSTSATLGVRVCGMQVYQLDTGHYLCRNKYYGRGLSIEGFRNALYQYLHNGLDLRRDLFEPILSKLRGLKAVLERQASYRFYSSSLLVIYDGKECRAESCLDRRSEMRLKHLDMVLPEVASSCGPSTSPSNTSPEAGPSSQPKVDVRMIDFAHSTFKGFRDDPTVHDGPDRGYVFGLENLISIMEQMRDENQ

SEQ ID NO: 49808 - protein, 276 aa, Homo sapiens; identical to SEQ ID NO: 49807

SEQ ID NO: 49809 - protein, 426 aa, Homo sapiens
MSPAFRAMDVEPRAKGVLLEPFVHQVGGHSCVLRFNETTLCKPLVPREHQFYETLPAEMRKFTPQYKGVVSVRFEEDEDRNLCLIAYPLKGDHGIVDIVDNSDCEPKSKLLRWTTNKKHHVLETEKTPKDWVRQHRKEEKMKSHKLEEEFEWLKKSEVLYYTVEKKGNISSQLKHYNPWSMKCHQQQLQRMKENAKHRNQYKFILLENLTSRYEVPCVLDLKMGTRQHGDDASEEKAANQIRKCQQSTSAVIGVRVCGMQVYQAGSGQLMFMNKYHGRKLSVQGFKEALFQFFHNGRYLRRELLGPVLKKLTELKAVLERQESYRFYSSSLLVIYDGKERPEVVLDSDAEDLEDLSEESADESAGAYAYKPIGASSVDVRMIDFAHTTCRLYGEDTVVHEGQDAGYIFGLQSLIDIVTEISEESGE

SEQ ID NO: 49810 - protein, 97 aa, Homo sapiens
MSPAFRAMDVEPRAKGVLLEPFVHQVGGHSCVLRFNETTLCKPLVPREHQFYETLPAEMRKFTPQYKGQSQRPLVSWPSLPHFFPWSFPLWPQGSVA

SEQ ID NO: 49811 - protein, 97 aa, Homo sapiens; identical to SEQ ID NO: 49810

SEQ ID NO: 49812 - protein, 185 aa, Homo sapiens
MSLNLPEASLLSRASWPEQAKEPRREGHTDKQQTEDVLAAGLRCLPHLPAICARRMSPAFRAMDVEPRAKGVLLEPFVHQVGGHSCVLRFNETTLCKPLVPREHQFYETLPAEMRKFTPQYKGKSQLLEGLPHWRGDVRDRGHGRPWQPSLEPSLPPTLCFPSLSSFSSSWPSAQHLTPSVFNPW

SEQ ID NO: 49813 - protein, 87 aa, Homo sapiens
MSPAFRAMDVEPRAKGVLLEPFVHQVGGHSCVLRFNETTLCKPLVPREHQFYETLPAEMRKFTPQYKGDISSHQHGGVFVGEWGSLL

SEQ ID NO: 49814 - protein, 188 aa, Homo sapiens
MNLCQSPFQEGCQSLLASWPEQAKEPRREGHTDKQQTEDVLAAGLRCLPHLPAICARRMSPAFRAMDVEPRAKGVLLEPFVHQVGGHSCVLRFNETTLCKPLVPREHQFYETLPAEMRKFTPQYKGKSQLLEGLPHWRGDVRDRGHGRPWQPSLEPSLPPTLCFPSLSSFSSSWPSAQHLTPSVFNPW

SEQ ID NO: 49815 - protein, 410 aa, Homo sapiens
MVVQNSADAGDMRAGVQLEPFLHQVGGHMSVMKYDEHTVCKPLVSREQRFYESLPLAMKRFTPQYKGTVTVHLWKDSTGHLSLVANPVKESQEPFKVSTESAAVAIWQTLQQTTGSNGSDCTLAQWPHAQLARSPKESPAKALLRSEPHLNTPAFSLVEDTNGNQVERKSFNPWGLQCHQAHLTRLCSEYPENKRHRFLLLENVVSQYTHPCVLDLKMGTRQHGDDASEEKKARHMRKCAQSTSACLGVRICGMQVYQTDKKYFLCKDKYYGRKLSVEGFRQALYQFLHNGSHLRRELLEPILHQLRALLSVIRSQSSYRFYSSSLLVIYDGQEPPERAPGSPHPHEAPQAAHGSSPGGLTKVDIRMIDFAHTTYKGYWNEHTTYDGPDPGYIFGLENLIRILQDIQEGE

SEQ ID NO: 49816 - protein, 410 aa, Homo sapiens; identical to SEQ ID NO: 49815

SEQ ID NO: 49817 - protein, 359 aa, Homo sapiens
MAPMGIRLSPLGVAVFCLLGLGVLYHLYSGFLAGRFSLFGLGGEPGGGAAGPAAAADGGTVDLREMLAVSVLAAVRGGDEVRRVRESNVLHEKSKGKTREGAEDKMTSGDVLSNRKMFYLLKTAFPSVQINTEEHVDAADQEVILWDHKIPEDILKEVTTPKEVPAESVTVWIDPLDATQEYTEDLRKYVTTMVCVAVNGKPMLGVIHKPFSEYTAWAMVDGGSNVKARSSYNEKTPRIVVSRSHSGMVKQVALQTFGNQTTIIPAGGAGYKVLALLDVPDKSQEKADLYIHVTYIKKWDICAGNAILKALGGHMTTLSGEEISYTGSDGIEGGLLASIRMNHQALVRKLPDLEKTGHK

SEQ ID NO: 49818 - protein, 416 aa, Homo sapiens
MATEPPSPLRVEAPGPPEMRTSPAIESTPEGTPQPAGGRLRFLNGCVPLSHQVAGHMYGKDKVGILQHPDGTVLKQLQPPPRGPRELEFYNMVYAADCFDGVLLELRKYLPKYYGIWSPPTAPNDLYLKLEDVTHKFNKPCIMDVKIGQKSYDPFASSEKIQQQVSKYPLMEEIGFLVLGMRVYHVHSDSYETENQHYGRSLTKETIKDGVSRFFHNGYCLRKDAVAASIQKIEKILQWFENQKQLNFYASSLLFVYEGSSQPTTTKLNDRTLAEKFLSKGQLSDTEVLEYNNNFHVLSSTANGKIESSVGKSLSKMYARHRKIYTKKHHSQTSLKVENLEQDNGWKSMSQEHLNGNVLSQLEKVFYHLPTGCQEIAEVEVRMIDFAHVFPSNTIDEGYVYGLKHLISVLRSILDN

SEQ ID NO: 49819 - protein, 1258 aa, Homo sapiens
MASACGAPGPGGALGSQAPSWYHRDLSRAAAEELLARAGRDGSFLVRDSESVAGAFALCVLYQKHVHTYRILPDGEDFLAVQTSQGVPVRRFQTLGELIGLYAQPNQGLVCALLLPVEGEREPDPPDDRDASDGEDEKPPLPPRSGSTSISAPTGPSSPLPAPETPTAPAAESAPNGLSTVSHDYLKGSYGLDLEAVRGGASHLPHLTRTLATSCRRLHSEVDKVLSGLEILSKVFDQQSSPMVTRLLQQQNLPQTGEQELESLVLKLSVLKDFLSGIQKKALKALQDMSSTAPPAPQPSTRKAKTIPVQAFEVKLDVTLGDLTKIGKSQKFTLSVDVEGGRLVLLRRQRDSQEDWTTFTHDRIRQLIKSQRVQNKLGVVFEKEKDRTQRKDFIFVSARKREAFCQLLQLMKNKHSKQDEPDMISVFIGTWNMGSVPPPKNVTSWFTSKGLGKTLDEVTVTIPHDIYVFGTQENSVGDREWLDLLRGGLKELTDLDYRPIAMQSLWNIKVAVLVKPEHENRISHVSTSSVKTGIANTLGNKGAVGVSFMFNGTSFGFVNCHLTSGNEKTARRNQNYLDILRLLSLGDRQLNAFDISLRFTHLFWFGDLNYRLDMDIQEILNYISRKEFEPLLRVDQLNLEREKHKVFLRFSEEEISFPPTYRYERGSRDTYAWHKQKPTGVRTNVPSWCDRILWKSYPETHIICNSYGCTDDIVTSDHSPVFGTFEVGVTSQFISKKGLSKTSDQAYIEFESIEAIVKTASRTKFFIEFYSTCLEEYKKSFENDAQSSDNINFLKVQWSSRQLPTLKPILADIEYLQDQHLLLTVKSMDGYESYGECVVALKSMIGSTAQQFLTFLSHRGEETGNIRGSMKVRVPTERLGTRERLYEWISIDKDEAGAKSKAPSVSRGSQEPRSGSRKPAFTEASCPLSRLFEEPEKPPPTGRPPAPPRAAPREEPLTPRLKPEGAPEPEGVAAPPPKNSFNNPAYYVLEGVPHQLLPPEPPSPARAPVPSATKNKVAITVPAPQLGHHRHPRVGEGSSSDEESGGTLPPPDFPPPPLPDSAIFLPPSLDPLPGPVVRGRGGAEARGPPPPKAHPRPPLPPGPSPASTFLGEVASGDDRSCSVLQMAKTLSEVDYAPAGPARSALLPGPLELQPPRGLPSDYGRPLSFPPPRIRESIQEDLAEEAPCLQGGRASGLGEAGMSAWLRAIGLERYEEGLVHNGWDDLEFLSDITEEDLEEAGVQDPAHKRLLLDTLQLSK

SEQ ID NO: 49820 - protein, 34 aa, Homo sapiens
MVTRLLQQQNLPQTGEQELESLVLKLSVLKDFLS

SEQ ID NO: 49821 - protein, 1016 aa, Homo sapiens
MVTRLLQQQNLPQTGEQELESLVLKLSVLKDFLSGIQKKALKALQDMSSTAPPAPQPSTRKAKTIPVQAFEVKLDVTLGDLTKIGKSQKFTLSVDVEGGRLVLLRRQRDSQEDWTTFTHDRIRQLIKSQRVQNKLGVVFEKEKDRTQRKDFIFVSARKREAFCQLLQLMKNKHSKQDEPDMISVFIGTWNMGSVPPPKNVTSWFTSKGLGKTLDEVTVTIPHDIYVFGTQENSVGDREWLDLLRGGLKELTDLDYRPIAMQSLWNIKVAVLVKPEHENRISHVSTSSVKTGIANTLGNKGAVGVSFMFNGTSFGFVNCHLTSGNEKTARRNQNYLDILRLLSLGDRQLNAFDISLRFTHLFWFGDLNYRLDMDIQEILNYISRKEFEPLLRVDQLNLEREKHKVFLRFSEEEISFPPTYRYERGSRDTYAWHKQKPTGVRTNVPSWCDRILWKSYPETHIICNSYGCTDDIVTSDHSPVFGTFEVGVTSQFISKKGLSKTSDQAYIEFESIEAIVKTASRTKFFIEFYSTCLEEYKKSFENDAQSSDNINFLKVQWSSRQLPTLKPILADIEYLQDQHLLLTVKSMDGYESYGECVVALKSMIGSTAQQFLTFLSHRGEETGNIRGSMKVRVPTERLGTRERLYEWISIDKDEAGAKSKAPSVSRGSQEPRSGSRKPAFTEASCPLSRLFEEPEKPPPTGRPPAPPRAAPREEPLTPRLKPEGAPEPEGVAAPPPKNSFNNPAYYVLEGVPHQLLPPEPPSPARAPVPSATKNKVAITVPAPQLGHHRHPRVGEGSSSDEESGGTLPPPDFPPPPLPDSAIFLPPSLDPLPGPVVRGRGGAEARGPPPPKAHPRPPLPPGPSPASTFLGEVASGDDRSCSVLQMAKTLSEVDYAPAGPARSALLPGPLELQPPRGLPSDYGRPLSFPPPRIRESIQEDLAEEAPCLQGGRASGLGEAGMSAWLRAIGLERYEEGLVHNGWDDLEFLSDITEEDLEEAGVQDPAHKRLLLDTLQLSK

SEQ ID NO: 49822 - protein, 22 aa, Homo sapiens
MASACGAPGPGGALGSQAPSWY

SEQ ID NO: 49823 - protein, 1016 aa, Homo sapiens; identical to SEQ ID NO: 49821

SEQ ID NO: 49824 - protein, 18 aa, Homo sapiens
MASACGAPGPGGALGSQA

SEQ ID NO: 49825 - protein, 157 aa, Homo sapiens
MVTRLLQQQNLPQTGEQELESLVLKLSVLKDFLSGIQKKALKALQDMSSTAPPAPQPSTRKAKTIPVQAFEVKLDVTLGDLTKIGKSQKFTLSVDVEGGRLVLLRRQRDSQEDWTTFTHDRIRQLIKSQRVQNKLGVVFEKEKDRTQRKDFIFVSAR

SEQ ID NO: 49826 - protein, 399 aa, Homo sapiens
MSDILRELLCVSEKAANIARACRQQEALFQLLIEEKKEGEKNKKFAVDFKTLADVLVQEVIKQNMENKFPGLEKNIFGEESNEFTNDWGEKITLRLCSTEEETAELLSKVLNGNKVASEALARVVHQDVAFTDPTLDSTEINVPQDILGIWVDPIDSTYQYIKGSADIKSNQGIFPCGLQCVTILIGVYDIQTGVPLMGVINQPFVSRDPNTLRWKGQCYWGLSYMGTNMHSLQLTISRRNGSETHTGNTGSEAAFSPSFSAVISTSEKETIKAALSRVCGDRIFGAAGAGYKSLCVVQGLVDIYIFSEDTTFKWDSCAAHAILRAMGGGIVDLKECLERNPETGLDLPQLVYHVENEGAAGVDRWANKGGLIAYRSRKRLETFLSLLVQNLAPAETHT

SEQ ID NO: 49827 - protein, 399 aa, Homo sapiens; identical to SEQ ID NO: 49826

SEQ ID NO: 49828 - protein, 155 aa, Homo sapiens
MSDILRELLCVSEKAANIARACRQQEALFQLLIEEKKEGEKNKKFAVDFKTLADVLVQEVIKQNMENKFPGLEKNIFGEESNEFTNDWGEKITLRLCSTEEETAELLSKVLNGNKVASEALARVVHQDVAFTDPTLDSTEINVPQDILGIWVDPI

SEQ ID NO: 49829 - protein, 88 aa, Homo sapiens
MSDILRELLCVSEKAANIARACRQQEALFQLLIEEKKEGEKNKKFAVDFKTLADVLVQEVIKQNMENKFPGLEKNIFGEESNEFTNDW

SEQ ID NO: 49830 - protein, 212 aa, Homo sapiens
MSDILRELLCVSEKAANIARACRQQEALFQLLIEEKKEGEKNKKFAVDFKTLADVLVQEVIKQNMENKFPGLEKNIFGEESNEFTNDWGEKITLRLCSTEEETAELLSKVLNGNKVASEALARVVHQDVAFTDPTLDSTEINVPQDILGIWVDPIDSTYQYIKGSADIKSNQGIFPCGLQCVTILIGVYDIQTGVPLMGVINQPFVSRDPNT

SEQ ID NO: 49831 - protein, 9 aa, Homo sapiens
MSDILRELL

SEQ ID NO: 49832 - protein, 213 aa, Homo sapiens
MSDILRELLCVSEKAANIARACRQQEALFQLLIEEKKEGEKNKKFAVDFKTLADVLVQEVIKQNMENKFPGLEKNIFGEESNEFTNDWGEKITLRLCSTEEETAELLSKVLNGNKVASEALARVVHQDVAFTDPTLDSTEINVPQDILGIWVDPIDSTYQYIKGSADIKSNQGIFPCGLQCVTILIGVYDIQTGVPLMGVINQPFVSRDPNTL

SEQ ID NO: 49833 - protein, 190 aa, Homo sapiens
MSDILRELLCVSEKAANIARACRQQEALFQLLIEEKKEGEKNKKFAVDFKTLADVLVQEVIKQNMENKFPGLEKNIFGEESNEFTNDWGEKITLRLCSTEEETAELLSKVLNGNKVASEALARVVHQDVAFTDPTLDSTEINVPQDILGIWVDPIDSTYQYIKGSADIKSNQGIFPCGLQCVTILIGVYD

SEQ ID NO: 49834 - protein, 30 aa, Homo sapiens
MSDILRELLCVSEKAANIARACRQQEALFQ

SEQ ID NO: 49835 - protein, 68 aa, Homo sapiens
MSDILRELLCVSEKAANIARACRQQEALFQLLIEEKKEGEKNKKFAVDFKTLADVLVQEVIKQNMENK

SEQ ID NO: 49836 - protein, 143 aa, Homo sapiens
MSDILRELLCVSEKAANIARACRQQEALFQLLIEEKKEGEKNKKFAVDFKTLADVLVQEVIKQNMENKFPGLEKNIFGEESNEFTNDWGEKITLRLCSTEEETAELLSKVLNGNKVASEALARVVHQDVAFTDPTLDSTEINV

SEQ ID NO: 49837 - protein, 399 aa, Homo sapiens; identical to SEQ ID NO: 49826

SEQ ID NO: 49838 - protein, 977 aa, Homo sapiens
MTAREHSPRHGARARAMQRASTIDVAADMLGLSLAGNIQDPDEPILEFSLACSELHTPSLDRKPNSFVAVSVTTPPQAFWTKHAQTEIIEGTNNPIFLSSIAFFQDSLINQMTQVKLSVYDVKDRSQGTMYLLGSGTFIVKDLLQDRHHRLHLTLRSAESDRVGNITVIGWQMEEKSDQRPPVTRSVDTVNGRMVLPVDESLTEALGIRSKYASLRKDTLLKSVFGGAICRMYRFPTTDGNHLRILEQMAESVLSLHVPRQFVKLLLEEDAARVCELEELGELSPCWESLRRQIVTQYQTIILTYQENLTDLHQYRGPSFKASSLKADKKLEFVPTNLHIQRMRVQDDGGSDQNYDIVTIGAPAAHCQGFKSGGLRKKLHKFEETKKHFEECCTSSGCQSIIYIPQDVVRAKEIIAQINTLKTQVSYYAERLSRAAKDRSATGLERTLAILADKTRQLVTVCDCKLLANSIHGLNAARPDYIASKASPTSTEEEQVMLRNDQDTLMARWTGRNSRSSLQVDWHEEEWEKVWLNVDKSLECIIQRVDKLLQKERLHGEGCEDVFPCAGSCTSKKGNPDSHAYWIRPEDPFCDVPSSPCPSTMPSTACHPHLTTHCSPPPEESSPGEWSEALYPLLTTLTDCVAMMSDKAKKAMVFLLMQDSAPTIATYLSLQYRRDVVFCQTLTALICGFIIKLRNCLHDDGFLRQLYTIGLLAQFESLLSTYGEELAMLEDMSLGIMDLRNVTFKVTQATSSASADMLPVITGNRDGFNVRVPLPGPLFDALPREIQSGMLLRVQPVLFNVGINEQQTLAERFGDTSLQEVINVESLVRLNSYFEQFKEVLPEDCLPRSRSQTCLPELLRFLGQNVHARKNKNVDILWQAAEICRRLNGVRFTSCKSAKDRTAMSVTLEQCLILQHEHGMAPQVFTQALECMRSEGCRRENTMKNVGSRKYAFNSLQLKAFPKHYRPPEGTYGKVET

SEQ ID NO: 49839 - protein, 938 aa, Homo sapiens
MTAREHSPRHGARARAMQRASTIDVAADMLGLSLAGNIQDPDEPILEFSLACSELHTPSLDRKPNSFVAVSVTTPPQAFWTKHAQTEIIEGTNNPIFLSSIAFFQDSLINQMTQVKLSVYDVKDRSQGTMYLLGSGTFIVKDLLQDRHHRLHLTLRSAESDRVGNITVIGWQMEEKSDQRPPVTRSVDTVNGRMVLPVDESLTEALGIRSKYASLRKDTLLKSVFGGAICRMYRFPTTDGNHLRILEQMAESVLSLHVPRQFVKLLLEEDAARVCELEELGELSPCWESLRRQIVTQYQTIILTYQENLTDLHQYRGPSFKASSLKADKKLEFVPTNLHIQRMRVQDDGGSDQNYDIVTIGAPAAHCQGFKSGGLRKKLHKFEETKKHFEECCTSSGCQSIIYIPQDVVRAKEIIAQINTLKTQVSYYAERLSRAAKDRSATGLERTLAILADKTRQLVTVCDCKLLANSIHGLNAARPDYIASKASPTSTEEEQVMLRNDQDTLMARWTGRNSRSSLQVDWHEEEWEKVWLNVDKSLECIIQRVDKLLQKERLHGEGCEDVFPCAGSCTSKKDCSPPPEESSPGEWSEALYPLLTTLTDCVAMMSDKAKKAMVFLLMQDSAPTIATYLSLQYRRDVVFCQTLTALICGFIIKLRNCLHDDGFLRQLYTIGLLAQFESLLSTYGEELAMLEDMSLGIMDLRNVTFKVTQATSSASADMLPVITGNRDGFNVRVPLPGPLFDALPREIQSGMLLRVQPVLFNVGINEQQTLAERFGDTSLQEVINVESLVRLNSYFEQFKEVLPEDCLPRSRSQTCLPELLRFLGQNVHARKNKNVDILWQAAEICRRLNGVRFTSCKSAKDRTAMSVTLEQCLILQHEHGMAPQVFTQALECMRSEGCRRENTMKNVGSRKYAFNSLQLKAFPKHYRPPEGTYGKVET

SEQ ID NO: 49840 - protein, 954 aa, Homo sapiens
MTAREHSPRHGARARAMQRASTIDVAADMLGLSLAGNIQDPDEPILEFSLACSELHTPSLDRKPNSFVAVSVTTPPQAFWTKHAQTEIIEGTNNPIFLSSIAFFQDSLINQMTQVKLSVYDVKDRSQGTMYLLGSGTFIVKDLLQDRHHRLHLTLRSAESDRVGNITVIGWQMEEKSDQRPPVTRSVDTVNGRMVLPVDESLTEALGIRSKYASLRKDTLLKSVFGGAICRMYRFPTTDGNHLRILEQMAESVLSLHVPRQFVKLLLEEDAARVCELEELGELSPCWESLRRQIVTQYQTIILTYQENLTDLHQYRGPSFKASSLKADKKLEFVPTNLHIQRMRVQDDGGSDQNYDIVTIGAPAAHCQGFKSGGLRKKLHKFEETKKHFEECCTSSGCQSIIYIPQDVVRAKEIIAQINTLKTQVSYYAERLSRAAKDRSATGLERTLAILADKTRQLVTVCDCKLLANSIHGLNAARPDYIASKASPTSTEEEQVMLRNDQDTLMARWTGRNSRSSLQVDWHEEEWEKVWLNVDKSLECIIQRVDKLLQKERLHGEGCEDVFPCAGSCTSKKDCSPPPEESSPGEWSEALYPLLTTLTDCVAMMSDKAKKAMVFLLMQDSAPTIATYLSLQYRRDVVFCQTLTALICGFIIKLRNCLHDDGFLRQLYTIGLLAQFESLLSTYGEELAMLEDMSLGIMDLRNVTFKVTQATSSASADMLPVITGNRDGFNVRVPLPGPLFDALPREIQSGMLLRVQPVLFNVGINEQQTLAERFGDTSLQEVINVESLVRLNSYFEQFKEVLPEDCLPRSRSQTCLPELLRFLGQNVHARKNKNVDILWQAAEICRRLNGVRFTSCKSAKDRTAMSVTLEQCLILQHEHGMAPQVFTQALECMRSIGTREVVTQKNLSGLVPIRDLRLDPSLLCSIPLLALSPNLLIVWLFLSIAYLVTKLRCK

SEQ ID NO: 49841 - protein, 972 aa, Homo sapiens
MTAREHSPRHGARARAMQRASTIDVAADMLGLSLAGNIQDPDEPILEFSLACSELHTPSLDRKPNSFVAVSVTTPPQAFWTKHAQTEIIEGTNNPIFLSSIAFFQDSLINQMTQVKLSVYDVKDRSQGTMYLLGSGTFIVKDLLQDRHHRLHLTLRSAESDRVGNITVIGWQMEEKSDQRPPVTRSVDTVNGRMVLPVDESLTEALGIRSKYASLRKDTLLKSVFGGAICRMYRFPTTDGNHLRILEQMAESVLSLHVPRQFVKLLLEEDAARVCELEELGELSPCWESLRRQIVTQYQTIILTYQENLTDLHQYRGPSFKASSLKADKKLEFVPTNLHIQRMRVQDDGGSDQNYDIVTIGAPAAHCQGFKSGGLRKKLHKFEETKKHTSSGCQSIIYIPQDVVRAKEIIAQINTLKTQVSYYAERLSRAAKDRSATGLERTLAILADKTRQLVTVCDCKLLANSIHGLNAARPDYIASKASPTSTEEEQVMLRNDQDTLMARWTGRNSRSSLQVDWHEEEWEKVWLNVDKSLECIIQRVDKLLQKERLHGEGCEDVFPCAGSCTSKKGNPDSHAYWIRPEDPFCDVPSSPCPSTMPSTACHPHLTTHCSPPPEESSPGEWSEALYPLLTTLTDCVAMMSDKAKKAMVFLLMQDSAPTIATYLSLQYRRDVVFCQTLTALICGFIIKLRNCLHDDGFLRQLYTIGLLAQFESLLSTYGEELAMLEDMSLGIMDLRNVTFKVTQATSSASADMLPVITGNRDGFNVRVPLPGPLFDALPREIQSGMLLRVQPVLFNVGINEQQTLAERFGDTSLQEVINVESLVRLNSYFEQFKEVLPEDCLPRSRSQTCLPELLRFLGQNVHARKNKNVDILWQAAEICRRLNGVRFTSCKSAKDRTAMSVTLEQCLILQHEHGMAPQVFTQALECMRSEGCRRENTMKNVGSRKYAFNSLQLKAFPKHYRPPEGTYGKVET

SEQ ID NO: 49842 - protein, 977 aa, Homo sapiens; identical to SEQ ID NO: 49838

SEQ ID NO: 49843 - protein, 938 aa, Homo sapiens
MTAREHSPRHGARARAMQRASTIDVAADMLGLSLAGNIQDPDEPILEFSLACSELHTPSLDRKPNSFVAVSVTTPPQAFWTKHAQTEIIEGTNNPIFLSSIAFFQDSLINQMTQVKLSVYDVKDRSQGTMYLLGSGTFIVKDLLQDRHHRLHLTLRSAESDRVGNITVIGWQMEEKSDQRPPVTRSVDTVNGRMVLPVDESLTEALGIRSKYASLRKDTLLKSVFGGAICRMYRFPTTDGNHLRILEQMAESVLSLHVPRQFVKLLLEEDAARVCELEELGELSPCWESLRRQIVTQYQTIILTYQENLTDLHQYRGPSFKASSLKADKKLEFVPTNLHIQRMRVQDDGGSDQNYDIVTIGAPAAHCQGFKSGGLRKKLHKFEETKKQQEESRTSSGCQSIIYIPQDVVRAKEIIAQINTLKTQVSYYAERLSRAAKDRSATGLERTLAILADKTRQLVTVCDCKLLANSIHGLNAARPDYIASKASPTSTEEEQVMLRNDQDTLMARWTGRNSRSSLQVDWHEEEWEKVWLNVDKSLECIIQRVDKLLQKERLHGEGCEDVFPCAGSCTSKKDCSPPPEESSPGEWSEALYPLLTTLTDCVAMMSDKAKKAMVFLLMQDSAPTIATYLSLQYRRDVVFCQTLTALICGFIIKLRNCLHDDGFLRQLYTIGLLAQFESLLSTYGEELAMLEDMSLGIMDLRNVTFKVTQATSSASADMLPVITGNRDGFNVRVPLPGPLFDALPREIQSGMLLRVQPVLFNVGINEQQTLAERFGDTSLQEVINVESLVRLNSYFEQFKEVLPEDCLPRSRSQTCLPELLRFLGQNVHARKNKNVDILWQAAEICRRLNGVRFTSCKSAKDRTAMSVTLEQCLILQHEHGMAPQVFTQALECMRSEGCRRENTMKNVGSRKYAFNSLQLKAFPKHYRPPEGTYGKVET

SEQ ID NO: 49844 - protein, 1006 aa, Homo sapiens
MEGQSSRGSRRPGTRAGLGSLPMPQGVAQTGAPSKVDSSFQLPAKKNAALGPSEPRLALAPVGPRAAMSASSEGPRLALASPRPILAPLCTPEGQKTATAHRSSSLAPTSVGQLVMSASAGPKPPPATTGSVLAPTSLGLVMPASAGPRSPPVTLGPNLAPTSRDQKQEPPASVGPKPTLAASGLSLALASEEQPPELPSTPSPVPSPVLSPTQEQALAPASTASGAASVGQTSARKRDAPAPRPLPASEGHLQPPAQTSGPTGSPPCIQTSPDPRLSPSFRARPEALHSSPEDPVLPRPPQTLPLDVGQGPSEPGTHSPGLLSPTFRPGAPSGQTVPPPLPKPPRSPSRSPSHSPNRSPCVPPAPDMALPRLGTQSTGPGRCLSPNLQAQEAPAPVTTSSSTSTLSSSPWSAQPTWKSDPGFRITVVTWNVGTAMPPDDVTSLLHLGGGDDSDGADMIAIGLQEVNSMLNKRLKDALFTDQWSELFMDALGPFNFVLVSSVRMQGVILLLFAKYYHLPFLRDVQTDCTRTGLGGYWGNKGGVSVRLAAFGHMLCFLNCHLPAHMDKAEQRKDNFQTILSLQQFQGPGAQGILDHDLVFWFGDLNFRIESYDLHFVKFAIDSDQLHQLWEKDQLNMAKNTWPILKGFQEGPLNFAPTFKFDVGTNKYDTSAKKRKPAWTDRILWKVKAPGGGPSPSGRKSHRLQVTQHSYRSHMEYTVSDHKPVAAQFLLQFAFRDDMPLVRLEVADEWVRPEQAVVRYRMETVFARSSWDWIGLYRVGFRHCKDYVAYVWAKHEDVDGNTYQVTFSEESLPKGHGDFILGYYSHNHSILIGITEPFQISLPSSELASSSTDSSGTSSEGEDDSTLELLAPKSRSPSPGKSKRHRSRSPGLARFPGLALRPSSRERRGASRSPSPQSRRLSRVAPDRSSNGSSRGSSEEGPSGLPGPWAFPPAVPRSLGLLPALRLETVDPGGGGSWGPDREALAPNSLSPSPQGHRGLEEGGLGP

SEQ ID NO: 49845 - protein, 639 aa, Homo sapiens
MALPRLGTQSTGPGRCLSPNLQAQEAPAPVTTSSSTSTLSSSPWSAQPTWKSDPGFRITVVTWNVGTAMPPDDVTSLLHLGGGDDSDGADMIAIGLQEVNSMLNKRLKDALFTDQWSELFMDALGPFNFVLVSSVRMQGVILLLFAKYYHLPFLRDVQTDCTRTGLGGYWGNKGGVSVRLAAFGHMLCFLNCHLPAHMDKAEQRKDNFQTILSLQQFQGPGAQGILDHDLVFWFGDLNFRIESYDLHFVKFAIDSDQLHQLWEKDQLNMAKNTWPILKGFQEGPLNFAPTFKFDVGTNKYDTSAKKRKPAWTDRILWKVKAPGGGPSPSGRKSHRLQVTQHSYRSHMEYTVSDHKPVAAQFLLQFAFRDDMPLVRLEVADEWVRPEQAVVRYRMETVFARSSWDWIGLYRVGFRHCKDYVAYVWAKHEDVDGNTYQVTFSEESLPKGHGDFILGYYSHNHSILIGITEPFQISLPSSELASSSTDSSGTSSEGEDDSTLELLAPKSRSPSPGKSKRHRSRSPGLARFPGLALRPSSRERRGASRSPSPQSRRLSRVAPDRSSNGSSRGSSEEGPSGLPGPWAFPPAVPRSLGLLPALRLETVDPGGGGSWGPDREALAPNSLSPSPQGHRGLEEGGLGP

SEQ ID NO: 49846 - protein, 638 aa, Homo sapiens
MEGQSSRGSRRPGTRAGLGSLPMPQGVAQTGAPSKVDSSFQLPAKKNAALGPSEPRITVVTWNVGTAMPPDDVTSLLHLGGGDDSDGADMIAIGLQEVNSMLNKRLKDALFTDQWSELFMDALGPFNFVLVSSVRMQGVILLLFAKYYHLPFLRDVQTDCTRTGLGGYWGNKGGVSVRLAAFGHMLCFLNCHLPAHMDKAEQRKDNFQTILSLQQFQGPGAQGILDHDLVFWFGDLNFRIESYDLHFVKFAIDSDQLHQLWEKDQLNMAKNTWPILKGFQEGPLNFAPTFKFDVGTNKYDTSAKKRKPAWTDRILWKVKAPGGGPSPSGRKSHRLQVTQHSYRSHMEYTVSDHKPVAAQFLLQFAFRDDMPLVRLEVADEWVRPEQAVVRYRMETVFARSSWDWIGLYRVGFRHCKDYVAYVWAKHEDVDGNTYQVTFSEESLPKGHGDFILGYYSHNHSILIGITEPFQISLPSSELASSSTDSSGTSSEGEDDSTLELLAPKSRSPSPGKSKRHRSRSPGLARFPGLALRPSSRERRGASRSPSPQSRRLSRVAPDRSSNGSSRGSSEEGPSGLPGPWAFPPAVPRSLGLLPALRLETVDPGGGGSWGPDREALAPNSLSPSPQGHRGLEEGGLGP

SEQ ID NO: 49847 - protein, 639 aa, Homo sapiens; identical to SEQ ID NO: 49845

SEQ ID NO: 49848 - protein, 939 aa, Homo sapiens
MSASSEGPRLALASPRPILAPLCTPEGQKTATAHRSSSLAPTSVGQLVMSASAGPKPPPATTGSVLAPTSLGLVMPASAGPRSPPVTLGPNLAPTSRDQKQEPPASVGPKPTLAASGLSLALASEEQPPELPSTPSPVPSPVLSPTQEQALAPASTASGAASVGQTSARKRDAPAPRPLPASEGHLQPPAQTSGPTGSPPCIQTSPDPRLSPSFRARPEALHSSPEDPVLPRPPQTLPLDVGQGPSEPGTHSPGLLSPTFRPGAPSGQTVPPPLPKPPRSPSRSPSHSPNRSPCVPPAPDMALPRLGTQSTGPGRCLSPNLQAQEAPAPVTTSSSTSTLSSSPWSAQPTWKSDPGFRITVVTWNVGTAMPPDDVTSLLHLGGGDDSDGADMIAIGLQEVNSMLNKRLKDALFTDQWSELFMDALGPFNFVLVSSVRMQGVILLLFAKYYHLPFLRDVQTDCTRTGLGGYWGNKGGVSVRLAAFGHMLCFLNCHLPAHMDKAEQRKDNFQTILSLQQFQGPGAQGILDHDLVFWFGDLNFRIESYDLHFVKFAIDSDQLHQLWEKDQLNMAKNTWPILKGFQEGPLNFAPTFKFDVGTNKYDTSAKKRKPAWTDRILWKVKAPGGGPSPSGRKSHRLQVTQHSYRSHMEYTVSDHKPVAAQFLLQFAFRDDMPLVRLEVADEWVRPEQAVVRYRMETVFARSSWDWIGLYRVGFRHCKDYVAYVWAKHEDVDGNTYQVTFSEESLPKGHGDFILGYYSHNHSILIGITEPFQISLPSSELASSSTDSSGTSSEGEDDSTLELLAPKSRSPSPGKSKRHRSRSPGLARFPGLALRPSSRERRGASRSPSPQSRRLSRVAPDRSSNGSSRGSSEEGPSGLPGPWAFPPAVPRSLGLLPALRLETVDPGGGGSWGPDREALAPNSLSPSPQGHRGLEEGGLGP

SEQ ID NO: 49849 - protein, 1177 aa, Homo sapiens
MVPCWNHGNITRSKAEELLSRTGKDGSFLVRASESISRAYALCVLYRNCVYTYRILPNEDDKFTVQASEGVSMRFFTKLDQLIEFYKKENMGLVTHLQYPVPLEEEDTGDDPEEDTVESVVSPPELPPRNIPLTASSCEAKEVPFSNENPRATETSRPSLSETLFQRLQSMDTSGLPEEHLKAIQDYLSTQLAQDSEFVKTGSSSLPHLKKLTTLLCKELYGQMLRTVPGIGKVKEEDHVPGEANPINMVSKLSQLTSLLSSIEDKVKALLHEGPESPHRPSLIPPVTFEVKAESLGIPQKMQLKVDVESGKLIIKKSKDGSEDKFYSHKKILQLIKSQKFLNKLVILVETEKEKILRKEYVFADSKKREGFCQLLQQMKNKHSEQPEPDMITIFIGTWNMGNAPPPKKITSWFLSKGQGKTRDDSADYIPHDIYVIGTQEDPLSEKEWLEILKHSLQEITSVTFKTVAIHTLWNIRIVVLAKPEHENRISHICTDNVKTGIANTLGNKGAVGVSFMFNGTSLGFVNSHLTSGSEKKLRRNQNYMNILRFLALGDKKLSPFNITHRFTHLFWFGDLNYRVDLPTWEAETIIQKIKQQQYADLLSHDQLLTERREQKVFLHFEEEEITFAPTYRFERLTRDKYAYTKQKATGMKYNLPSWCDRVLWKSYPLVHVVCQSYGSTSDIMTSDHSPVFATFEAGVTSQFVSKNGPGTVDSQGQIEFLRCYATLKTKSQTKFYLEFHSSCLESFVKSQEGENEEGSEGELVVKFGETLPKLKPIISDPEYLLDQHILISIKSSDSDESYGEGCIALRLEATETQLPIYTPLTHHGELTGHFQGEIKLQTSQGKTREKLYDFVKTERDESSGPKTLKSLTSHDPMKQWEVTSRAPPCSGSSITEIINPNYMGVGPFGPPMPLHVKQTLSPDQQPTAWSYDQPPKDSPLGPCRGESPPTPPGQPPISPKKFLPSTANRGLPPRTQESRPSDLGKNAGDTLPQEDLPLTKPEMFENPLYGSLSSFPKPAPRKDQESPKMPRKEPPPCPEPGILSPSIVLTKAQEADRGEGPGKQVPAPRLRSFTCSSSAEGRAAGGDKSQGKPKTPVSSQAPVPAKRPIKPSRSEINQQTPPTPTPRPPLPVKSPAVLHLQHSKGRDYRDNTELPHHGKHRPEEGPPGPLGRTAMQ

SEQ ID NO: 49850 - protein, 810 aa, Homo sapiens
KREGFCQLLQQMKNKHSEQPEPDMITIFIGTWNMGNAPPPKKITSWFLSKGQGKTRDDSADYIPHDIYVIGTQEDPLSEKEWLEILKHSLQEITSVTFKTVAIHTLWNIRIVVLAKPEHENRISHICTDNVKTGIANTLGNKGAVGVSFMFNGTSLGFVNSHLTSGSEKKLRRNQNYMNILRFLALGDKKLSPFNITHRFTHLFWFGDLNYRVDLPTWEAETIIQKIKQQQYADLLSHDQLLTERREQKVFLHFEEEEITFAPTYRFERLTRDKYAYTKQKATGMKYNLPSWCDRVLWKSYPLVHVVCQSYGSTSDIMTSDHSPVFATFEAGVTSQFVSKNGPGTVDSQGQIEFLRCYATLKTKSQTKFYLEFHSSCLESFVKSQEGENEEGSEGELVVKFGETLPKLKPIISDPEYLLDQHILISIKSSDSDESYGEGCIALRLEATETQLPIYTPLTHHGELTGHFQGEIKLQTSQGKTREKLYDFVKTERDESSGPKTLKSLTSHDPMKQWEVTSRAPPCSGSSITEIINPNYMGVGPFGPPMPLHVKQTLSPDQQPTAWSYDQPPKDSPLGPCRGESPPTPPGQPPISPKKFLPSTANRGLPPRTQESRPSDLGKNAGDTLPQEDLPLTKPEMFENPLYGSLSSFPKPAPRKDQESPKMPRKEPPPCPEPGILSPSIVLTKAQEADRGEGPGKQVPAPRLRSFTCSSSAEGRAAGGDKSQGKPKTPVSSQAPVPAKRPIKPSRSEINQQTPPTPTPRPPLPVKSPAVLHLQHSKGRDYRDNTELPHHGKHRPEEGPPGPLGRTAMQ

SEQ ID NO: 49851 - protein, 221 aa, Homo sapiens
MVPCWNHGNITRSKAEELLSRTGKDGSFLVRASESISRAYALCVLYRNCVYTYRILPNEDDKFTVQASEGVSMRFFTKLDQLIEFYKKENMGLVTHLQYPVPLEEEDTGDDPEEDTESVVSPPELPPRNIPLTASSCEAKEVPFSNENPRATETSRPSLSETLFQRLQSMDTSGLPEEHLKAIQDYLSTQLAQDSEFVKTGSSSLPHLKKLTTLLCKELYG

SEQ ID NO: 49852 - protein, 810 aa, Homo sapiens; identical to SEQ ID NO: 49850

SEQ ID NO: 49853 - protein, 810 aa, Homo sapiens; identical to SEQ ID NO: 49850

SEQ ID NO: 49854 - protein, 941 aa, Homo sapiens
RPQVPGEANPINMVSKLSQLTSLLSSIEDKVKALLHEGPESPHRPSLIPPVTFEVKAESLGIPQKMQLKVDVESGKLIIKKSKDGSEDKFYSHKKILQLIKSQKFLNKLVILVETEKEKILRKEYVFADSKKREGFCQLLQQMKNKHSEQPEPDMITIFIGTWNMGNAPPPKKITSWFLSKGQGKTRDDSADYIPHDIYVIGTQEDPLSEKEWLEILKHSLQEITSVTFKTVAIHTLWNIRIVVLAKPEHENRISHICTDNVKTGIANTLGNKGAVGVSFMFNGTSLGFVNSHLTSGSEKKLRRNQNYMNILRFLALGDKKLSPFNITHRFTHLFWFGDLNYRVDLPTWEAETIIQKIKQQQYADLLSHDQLLTERREQKVFLHFEEEEITFAPTYRFERLTRDKYAYTKQKATGMKYNLPSWCDRVLWKSYPLVHVVCQSYGSTSDIMTSDHSPVFATFEAGVTSQFVSKNGPGTVDSQGQIEFLRCYATLKTKSQTKFYLEFHSSCLESFVKSQEGENEEGSEGELVVKFGETLPKLKPIISDPEYLLDQHILISIKSSDSDESYGEGCIALRLEATETQLPIYTPLTHHGELTGHFQGEIKLQTSQGKTREKLYDFVKTERDESSGPKTLKSLTSHDPMKQWEVTSRAPPCSGSSITEIINPNYMGVGPFGPPMPLHVKQTLSPDQQPTAWSYDQPPKDSPLGPCRGESPPTPPGQPPISPKKFLPSTANRGLPPRTQESRPSDLGKNAGDTLPQEDLPLTKPEMFENPLYGSLSSFPKPAPRKDQESPKMPRKEPPPCPEPGILSPSIVLTKAQEADRGEGPGKQVPAPRLRSFTCSSSAEGRAAGGDKSQGKPKTPVSSQAPVPAKRPIKPSRSEINQQTPPTPTPRPPLPVKSPAVLHLQHSKGRDYRDNTELPHHGKHRPEEGPPGPLGRTAMQ

SEQ ID NO: 49855 - protein, 222 aa, Homo sapiens [sequence omitted]

SEQ ID NO: 49856 - protein, 941 aa, Homo sapiens
PPQVPGEANPINMVSKLSQLTSLLSSIEDKVKALLHEGPESPHRPSLIPPVTFEVKAESLGIPQKMQLKVDVESGKLIIKKSKDGSEDKFYSHKKILQLIKSQKFLNKLVILVETEKEKILRKEYVFADSKKREGFCQLLQQMKNKHSEQPEPDMITIFIGTWNMGNAPPPKKITSWFLSKGQGKTRDDSADYIPHDIYVIGTQEDPLSEKEWLEILKHSLQEITSVTFKTVAIHTLWNIRIVVLAKPEHENRISHICTDNVKTGIANTLGNKGAVGVSFMFNGTSLGFVNSHLTSGSEKKLRRNQNYMNILRFLALGDKKLSPFNITHRFTHLFWFGDLNYRVDLPTWEAETIIQKIKQQQYADLLSHDQLLTERREQKVFLHFEEEEITFAPTYRFERLTRDKYAYTKQKATGMKYNLPSWCDRVLWKSYPLVHVVCQSYGSTSDIMTSDHSPVFATFEAGVTSQFVSKNGPGTVDSQGQIEFLRCYATLKTKSQTKFYLEFHSSCLESFVKSQEGENEEGSEGELVVKFGETLPKLKPIISDPEYLLDQHILISIKSSDSDESYGEGCIALRLEATETQLPIYTPLTHHGELTGHFQGEIKLQTSQGKTREKLYDFVKTERDESSGPKTLKSLTSHDPMKQWEVTSRAPPCSGSSITEIINPNYMGVGPFGPPMPLHVKQTLSPDQQPTAWSYDQPPKDSPLGPCRGESPPTPPGQPPISPKKFLPSTANRGLPPRTQESRPSDLGKNAGDTLPQEDLPLTKPEMFENPLYGSLSSFPKPAPRKDQESPKMPRKEPPPCPEPGILSPSIVLTKAQEADRGEGPGKQVPAPRLRSFTCSSSAEGRAAGGDKSQGKPKTPVSSQAPVPAKRPIKPSRSEINQQTPPTPTPRPPLPVKSPAVLHLQHSKGRDYRDNTELPHHGKHRPEEGPPGPLGRTAMQ

SEQ ID NO: 49857 - protein, 596 aa, Homo sapiens
MVPCWNHGNITRSKAEELLSRTGKDGSFLVRASESISRAYALCVLYRNCVYTYRILPNEDDKFTVQASEGVSMRFFTKLDQLIEFYKKENMGLVTHLQYPVPLEEEDTGDDPEEDTVESVVSPPELPPRNIPLTASSCEAKEVPFSNENPRATETSRPSLSETLFQRLQSMDTSGLPEEHLKAIQDYLSTQLAQDSEFVKTGSSSLPHLKKLTTLLCKELYGYCLEVLLSYPLSLLSQVPGEANPINMVSKLSQLTSLLSSIEDKVKALLHEGPESPHRPSLIPPVTFEVKAESLGIPQKMQLKVDVESGKLIIKKSKDGSEDKFYSHKKILQLIKSQKFLNKLVILVETEKEKILRKEYVFADSKKREGFCQLLQQMKNKHSEQPEPDMITIFIGTWNMGNAPPPKKITSWFLSKGQGKTRDDSADYIPHDIYVIGTQEDPLSEKEWLEILKHSLQEITSVTFKTVAIHTLWNIRIVVLAKPEHENRISHICTDNVKTGIANTLGNKGAVGVSFMFNGTSLGFVNSHLTSGSEKKLRRNQNYMNILRFLALGDKKLSPFNITHRFTHLFWFGDLNYRVDLPTWEAETIIQKIKQQ

SEQ ID NO: 49858 - protein, 278 aa, Homo sapiens
  VARIANT 1: note = MOD_RES - Any amino acid
XQKNWLREFYQVVHTHKPHFMALHCQEFGGKNYEASMSHVDKFVKELLSSDAMKEYNRARVYLDENYKSQEHFTALGSFYFLHESLKNIYQFDFKAKKYRKVAGKEIYSDTLESTPMLEKEKFPQDYFPECKWSRKGFIRTRWCIADCAFDLVNIHLFHDASNLVAWETSPSVYSGIRHKALGYVLDRIIDQRFEKVSYFVFGDFNFRLDSKSVVELLEFDKELSVFKDRLYELDISFPPSYPYSEDARQGEQYMNTRCPAWCDRILMSPSAKELVLR

SEQ ID NO: 49859 - protein, 387 aa, Homo sapiens
MAGKAAAPGTAVLLVTANVGSLFDDPENLQKNWLREFYQVVHTHKPHFMALHCQEFGGKNYEASMSHVDKFVKELLSSDAMKEYNRARVYLDENYKSQEHFTALGSFYFLHESLKNIYQFDFKAKKYRKVAGKEIYSDTLESTPMLEKEKFPQDYFPECKWSRKGFIRTRWCIADCAFDLVNIHLFHDASNLVAWETSPSVYSGIRHKALGYVLDRIIDQRFEKVSYFVFGDFNFRLDSKSVVETLCTKATMQTVRAADTNEVVKLIFRESDNDRKVMLQLEKKLFDYFNQEVFRDNNGTALLEFDKELSVFKDRLYELDISFPPSYPYSEDARQGEQYMNTRCPAWCDRILMSPSAKELVLRVSVCCPSPGHRGMWSAGSGLAQPW

SEQ ID NO: 49860 - protein, 412 aa, Homo sapiens
MAGKAAAPGTAVLLVTANVGSLFDDPENLQKNWLREFYQVVHTHKPHFMALHCQEFGGKNYEASMSHVDKFVKELLSSDAMKEYNRARVYLDENYKSQEHFTALGSFYFLHESLKNIYQFDFKAKKYRKVAGKEIYSDTLESTPMLEKEKFPQDYFPECKWSRKGFIRTRWCIADCAFDLVNIHLFHDASNLVAWETSPSVYSGIRHKALGYVLDRIIDQRFEKVSYFVFGDFNFRLDSKSVVETLCTKATMQTVRAADTNEVVKLIFRESDNDRKVMLQLEKKLFDYFNQEVFRDNNGTALLEFDKELSVFKDRLYELDISFPPSYPYSEDARQGEQYMNTRCPAWCDRILMSPSAKELVLRSESEEKVVTYDHIGPNVCMGDHKPVFLAFRIMPGAGKPHAHVHKCCVVQ

SEQ ID NO: 49861 - protein, 185 aa, Homo sapiens
MAGKAAAPGTAVLLVTANVGSLFDDPENLQKNWLREFYQVVHTHKPHFMALHCQEFGGKNYEASMSHVDKFVKELLSSDAMKEYNRARVYLDENYKSQEHFTALGSFYFLHESLKNIYQFDFKAKKYRKVAGKEIYSDTLESTPMLEKEKFPQDYFPERHVPHTSLEALLILHEDPQLPDPHLPL

SEQ ID NO: 49862 - protein, 355 aa, Homo sapiens
MAGKAAAPGTAVLLVTANVGSLFDDPENLQKNWLREFYQVVHTHKPHFMALHCQEFGGKNYEASMSHVDKFVKELLSSDAMKEYNRARVYLDENYKSQEHFTALGSFYFLHESLKNIYQFDFKAKKYRKVAGKEIYSDTLESTPMLEKEKFPQDYFPECKWSRKGFIRTRWCIADCAFDLVNIHLFHDASNLVAWETSPSVYSGIRHKALGYVLDRIIDQRFEKVSYFVFGDFNFRLDSKSVVELLEFDKELSVFKDRLYELDISFPPSYPYSEDARQGEQYMNTRCPAWCDRILMSPSAKELVLRSESEEKVVTYDHIGPNVCMGDHKPVFLAFRIMPGAGKPHAHVHKCCVVQ

SEQ ID NO: 49863 - protein, 138 aa, Homo sapiens
VTANVGSLFDDPENLQKNWLREFYQALGSFYFLHESLKNIYQFDFKAKKYRKVAGKEIYSDTLESTPMLEKEKFPQDYFPECKWSRKGFIRTRWCIADCAFDLVNIHLFHDASNLVAWETSPSVYSGIRHKALGYVLD

SEQ ID NO: 49864 - protein, 329 aa, Homo sapiens
MKEYNRARVYLDENYKSQEHFTALGSFYFLHESLKNIYQFDFKAKKYRKVAGKEIYSDTLESTPMLEKEKFPLLPRVQMVKKRLHPDEVIADCAFDLVNIHLFHDASNLVAWETSPSVYSGIRHKALGYVLDRIIDQRFEKVSYFVFGDFNFRLDSKSVVETLCTKATMQTVRAADTNEVVKLIFRESDNDRKVMLQLEKKLFDYFNQEVFRDNNGTALLEFDKELSVFKDRLYELDISFPPSYPYSEDARQGEQYMNTRCPAWCDRILMSPSAKELVLRSESEEKVVTYDHIGPNVCMGDHKPVFLAFRIMPGAGKPHAHVHKCCVVQ

SEQ ID NO: 49865 - protein, 104 aa, Homo sapiens
LDISFPPSYPYSEDARQGEQYMNTRCPAWCDRILMSPSAKELVLRSESEEKVVTYDHIGPNVCMGDHKPVFLAFRIMPGAGKRCQRHERTLREPPCSRGPNTHS

SEQ ID NO: 49866 - protein, 181 aa, Homo sapiens
AAAPGTAVLLVTANVGSLFDDPENLQKNWLREFYQVVHTHKPHFMALHCQEFGGKNYEASMSHVDKFVKELLSSDAMKEYNRARVYLDENYKSQEHFTALGSFYFLHESLKNIYQFDFKAKKYRKVAGKEIYSDTLESTPMLEKEKFPQDYFPERHVPHTSLEALLILHEDPQLPDPHLPL

SEQ ID NO: 49867 - protein, 152 aa, Homo sapiens
MAGKAAAPGTAVLLVTANVGSLFDDPENLQKNWLREFYQALGSFYFLHESLKNIYQFDFKAKKYRKVAGKEIYSDTLESTPMLEKEKFPQDYFPECKWSRKGFIRTRWCIADCAFDLVNIHLFHDASNLVAWETSPSVYSGIRHKALGYVLD

SEQ ID NO: 49868 - protein, 644 aa, Homo sapiens
MPSKAENLRPSEPAPQPPEGRTLQGQLPGAPPAQRAGSPPDAPGSESPALACSTPATPSGEDPPARAAPIAPRPPARPRLERALSLDDKGWRRRRFRGSQEDLEARNGTSPSRGSVQSEGPGAPAHSCSPPCLSTSLQEIPKSRGVLSSERGSPSSGGNPLSGVASSSPNLPHRDAAVAGSSPRLPSLLPPRPPPALSLDIASDSLRTANKVDSDLADYKLRAQPLLVRAHSSLGPGRPRSPLACDDCSLRSAKSSFSLLAPIRSKDVRSRSYLEGSLLASGALLGADELARYFPDRNVALFVATWNMQGQKELPPSLDEFLLPAEADYAQDLYVIGVQEGCSDRREWETRLQETLGPHYVLLSSAAHGVLYMSLFIRRDLIWFCSEVECSTVTTRIVSQIKTKGALGISFTFFGTSFLFITSHFTSGDGKVAERLLDYTRTVQALVLPRNVPDTNPYRSSAADVTTRFDEVFWFGDFNFRLSGGRTVVDALLCQGLVVDVPALLQHDQLIREMRKGSIFKGFQEPDIHFLPSYKFDIGKDTYDSTSKQRTPSYTDRVLYRSRHKGDICPVSYSSCPGIKTSDHRPVYGLFRVKVRPGRDNIPLAAGKFDRELYLLGIKRRISKEIQRQQALQSQNSSTICSVS

SEQ ID NO: 49869 - protein, 319 aa, Homo sapiens
MDQSVAIQETLAEGEYCVIAVQGVLCEGDSRQSRLLGLVRYRLEHGGQEHALFLYTHRRMAITGDDVSLDQIVPVSRDFTLEEVSPDGELYILGSDVTVQLDTAELSLVFQLPFGSQTRMFLHEVARACPGFDSATRDPEFLWLSRYRCAELELEMPTPRGCNSALVTWPGYATIGGGRYPSRKKRWGLEEARPQGAGSVLFWGGAMEKTGFRLMERAHGGGFVWGRSARDGRRDEELEEAGREMSAAAGSRERNTAGSAGGGKLGWGAGPGAAVRPALGWAGSAVWPVDARGEDQSPGGPLEAGTLGQKFCDVLLRRA

SEQ ID NO: 49870 - protein, 993 aa, Homo sapiens
MDQSVAIQETLAEGEYCVIAVQGVLCEGDSRQSRLLGLVRYRLEHGGQEHALFLYTHRRMAITGDDVSLDQIVPVSRDFTLEEVSPDGELYILGSDVTVQLDTAELSLVFQLPFGSQTRMFLHEVARACPGFDSATRDPEFLWLSRYRCAELELEMPTPRGCNSALVTWPGYATIGGGRYPSRKKRWGLEEARPQGAGSVLFWGGAMEKTGFRLMERAHGGGFVWGRSARDGRRDEELEEAGREMSAAAGSRERNTAGGSNFDGLRPNGKGVPMDQSSRGQDKPESLQPRQNKSKSEITDMVRSSTITVSDKAHILSMQKFGLRDTIVKSHLLQKEEDYTYIQNFRFFAGTYNVNGQSPKECLRLWLSNGIQAPDVYCVGFQELDLSKEAFFFHDTPKEEEWFKAVSEGLHPDAKYAKVKLIRLVGIMLLLYVKQEHAAYISEVEAETVGTGIMGRMGNKGGVAIRFQFHNTSICVVNSHLAAHIEEYERRNQDYKDICSRMQFCQPDPSLPPLTISNHDVILWLGDLNYRIEELDVEKVKKLIEEKDFQMLYAYDQLKIQVAAKTVFEGFTEGELTFQPTYKYDTGSDDWDTSEKCRAPAWCDRILWKGKNITQLSYQSHMALKTSDHKPVSSVFDIGVRVVNDELYRKTLEEIVRSLDKMENANIPSVSLSKREFCFQNVKYMQLKVESFTIHNGQVPCHFEFINKPDEESYCKQWLNANPSRGFLLPDSDVEIDLELFVNKMTATKLNSGEDKIEDILVLHLDRGKDYFLSVSGNYLPSCFGSPIHTLCYMREPILDLPLETISELTLMPVWTGDDGSQLDSPMEIPKELWMMVDYLYRNAVQQEDLFQQPGLRSEFEHIRDCLDTGMIDNLSASNHSVAEALLLFLESLPEPVICYSTYHNCLECSGNYTASKQVISTLPIFHKNVFHYLMAFLRELLKNSAKNHLDENILASIFGSLLLRNPAGHQKLDMTEKKKAQEFIHQFLCNPL

SEQ ID NO: 49871 - protein, 913 aa, Homo sapiens
MDQSVAIQETLAEGEYCVIAVQGVLCEGDSRQSRLLGLVRYRLEHGGQEHALFLYTHRRMAITGDDVSLDQIVPVSRDFTLEEVSPDGELYILGSDVTVQLDTAELSLVFQLPFGSQTRMFLHEVARACPGFDSATRDPEFLWLSRYRCAELELEMPTPRGCNSALVTWPGYATIGGGGSNFDGLRPNGKGVPMDQSSRGQDKPESLQPRQNKSKSEITDMVRSSTITVSDKAHILSMQKFGLRDTIVKSHLLQKEEDYTYIQNFRFFAGTYNVNGQSPKECLRLWLSNGIQAPDVYCVGFQELDLSKEAFFFHDTPKEEEWFKAVSEGLHPDAKYAKVKLIRLVGIMLLLYVKQEHAAYISEVEAETVGTGIMGRMGNKGGVAIRFQFHNTSICVVNSHLAAHIEEYERRNQDYKDICSRMQFCQPDPSLPPLTISNHDVILWLGDLNYRIEELDVEKVKKLIEEKDFQMLYAYDQLKIQVAAKTVFEGFTEGELTFQPTYKYDTGSDDWDTSEKCRAPAWCDRILWKGKNITQLSYQSHMALKTSDHKPVSSVFDIGVRVVNDELYRKTLEEIVRSLDKMENANIPSVSLSKREFCFQNVKYMQLKVESFTIHNGQVPCHFEFINKPDEESYCKQWLNANPSRGFLLPDSDVEIDLELFVNKMTATKLNSGEDKIEDILVLHLDRGKDYFLSVSGNYLPSCFGSPIHTLCYMREPILDLPLETISELTLMPVWTGDDGSQLDSPMEIPKELWMMVDYLYRNAVQQEDLFQQPGLRSEFEHIRDCLDTGMIDNLSASNHSVAEALLLFLESLPEPVICYSTYHNCLECSGNYTASKQVISTLPIFHKNVFHYLMAFLRELLKNSAKNHLDENILASIFGSLLLRNPAGHQKLDMTEKKKAQEFIHQFLCNPL

SEQ ID NO: 49872 - protein, 993 aa, Homo sapiens; identical to SEQ ID NO: 49870

SEQ ID NO: 49873 - protein, 749 aa, Homo sapiens
MSAAAGSRERNTAGGSNFDGLRPNGKGVPMDQSSRGQDKPESLQPRQNKSKSEITDMVRSSTITVSDKAHILSMQKFGLRDTIVKSHLLQKEEDYTYIQNFRFFAGTYNVNGQSPKECLRLWLSNGIQAPDVYCVGFQELDLSKEAFFFHDTPKEEEWFKAVSEGLHPDAKYAKVKLIRLVGIMLLLYVKQEHAAYISEVEAETVGTGIMGRMGNKGGVAIRFQFHNTSICVVNSHLAAHIEEYERRNQDYKDICSRMQFCQPDPSLPPLTISNHDVILWLGDLNYRIEELDVEKVKKLIEEKDFQMLYAYDQLKIQVAAKTVFEGFTEGELTFQPTYKYDTGSDDWDTSEKCRAPAWCDRILWKGKNITQLSYQSHMALKTSDHKPVSSVFDIGVRVVNDELYRKTLEEIVRSLDKMENANIPSVSLSKREFCFQNVKYMQLKVESFTIHNGQVPCHFEFINKPDEESYCKQWLNANPSRGFLLPDSDVEIDLELFVNKMTATKLNSGEDKIEDILVLHLDRGKDYFLSVSGNYLPSCFGSPIHTLCYMREPILDLPLETISELTLMPVWTGDDGSQLDSPMEIPKELWMMVDYLYRNAVQQEDLFQQPGLRSEFEHIRDCLDTGMIDNLSASNHSVAEALLLFLESLPEPVICYSTYHNCLECSGNYTASKQVISTLPIFHKNVFHYLMAFLRELLKNSAKNHLDENILASIFGSLLLRNPAGHQKLDMTEKKKAQEFIHQFLCNPL

SEQ ID NO: 49874 - protein, 828 aa, Homo sapiens
MDQSVAIQETLAEGEYCVIAVQGVLCEGDSRQSRLLGLVRYRLEHGGQEHALFLYTHRRMAITGDDVSLDQIVPVSRDFTLEEVSPDGELYILGSDVTVQLDTAELSLVFQLPFGSQTRMFLHEVARACPGFDSATRDPEFLWLSRYRCAELELEMPTPRGCNSALVTWPGYATIGGGRYPSRKKRWGLEEARPQGAGSVLFWGGAMEKTGFRLMERAHGGGFVWGRSARDGRRDEELEEAGREMSAAAGSRERNTAGGSNFDGLRPNGKGVPMDQSSRGQDKPESLQPRQNKSKSEITDMVRSSTITVSDKAHILSMQKFGLRDTIVKSHLLQKEEDYTYIQNFRFFAGTYNVNGQSPKECLRLWLSNGIQAPDVYCVGFQELDLSKEAFFFHDTPKEEEWFKAVSEGLHPDAKYAKVKLIRLVGIMLLLYVKQEHAAYISEVEAETVGTGIMGRMGNKGGVAIRFQFHNTSICVVNSHLAAHIEEYERRNQDYKDICSRMQFCQPDPSLPPLTISNHDVILWLGDLNYRIEELDVEKVKKLIEEKDFQMLYAYDQLKIQVAAKTVFEGFTEGELTFQPTYKYDTGSDDWDTSEKCRAPAWCDRILWKGKNITQLSYQSHMALKTSDHKPVSSVFDIGVRVVNDELYRKTLEEIVRSLDKMENANIPSVSLSKREFCFQNVKYMQLKVESFTIHNGQVPCHFEFINKPDEESYCKQWLNANPSRGFLLPDSDVEIDLELFVNKMTATKLNSGEDKIEDILVLHLDRGKDYFLSVSGNYLPSCFGSPIHTLCYMREPILDLPLETISELLAYLAAYCFETQLVTKSLI

SEQ ID NO: 49875 - protein, 175 aa, Homo sapiens
MQKFGLRDTIVKSHLLQKEEDYTYIQNFRFFAGTYNVNGQSPKECLRLWLSNGIQAPDVYCVGFQELDLSKEAFFFHDTPKEEEWFKAVSEGLHPDAKYAKVKLIRLVGIMLLLYVKQEHAAYISEVEAETVGTGIMGRMCDLVAGGPQLQDRRAGCGKSEKAHRREGLSNAVCI

SEQ ID NO: 49876 - protein, 277 aa, Homo sapiens
MADPWQECMDYAVTLARQAGEVVCEAIKNEMNVMLKSSPVDLVTATDQKVEKMLISSIKEKYPSHSFIGEESVAAGEKSILTDNPTWIIDPIDGTTNFVHRFPFVAVSIGFAVNKKIEFGVVYSCVEGKMYTARKGKGAFCNGQKLQVSQQEDITKSLLVTELGSSRTPETVRMVLSNMEKLFCIPVHGIRSVGTAAVNMCLVATGGADAYYEMGIHCWDVAGAGIIVTEAGGVLMDVTGGPFDLMSRRVIAANNRILAERIAKEIQVIPLQRDDED

SEQ ID NO: 49877 - protein, 198 aa, Homo sapiens
MADPWQECMDYAVTLARQAGEVVCEAIKNEMNVMLKSSPVDLVTATDQKVEKMLISSIKEKYPSHSFIGEESVAAGEKSILTDNPTWIIDPIDGTTNFVHRFPFVAVSIGFAVNKKIEFGVVYSCVEGKMYTARKGKGAFCNGQKLQVSQQEGSGVLEQQLLICALWQLAEQMHIMKWEFTAGMLQELALLLLKLVAC

SEQ ID NO: 49878 - protein, 336 aa, Homo sapiens
MGQRPGPVLPAVAVLGQVAKRKVAWLLRWKAVTRTETAGNSSGVYGFGKMKIFVKYFQKMADPWQECMDYAVTLARQAGEVVCEAIKNEMNVMLKSSPVDLVTATDQKVEKMLISSIKEKYPSHSFIGEESVAAGEKSILTDNPTWIIDPIDGTTNFVHRFPFVAVSIGFAVNKKIEFGVVYSCVEGKMYTARKGKGAFCNGQKLQVSQQEDITKSLLVTELGSSRTPETVRMVLSNMEKLFCIPVHGIRSVGTAAVNMCLVATGGADAYYEMGIHCWDVAGAGIIVTEAGGVLMDVTGGPFDLMSRRVIAANNRILAERIAKEIQVIPLQRDDED

SEQ ID NO: 49879 - protein, 153 aa, Homo sapiens
MADPWQECMDYAVTLARQAGEVVCEAIKNEMNVMLKSSPVDLVTATDQKVEKMLISSIKEKYPSHRFPFVAVSIGFAVNKKIEFGVVYSCVEGKMYTARKGKGAFCNGQKLQVSQQEDITKSLLVTELGSSRTPETVRMVLSNMEKLFCIPVH

SEQ ID NO: 49880 - protein, 211 aa, Homo sapiens
MGQRPGPVLPAVAVLGQVAKRKVAWLLRWKAVTRTETAGNSSGVYGFGKMKIFVKYFQKMADPWQECMDYAVTLARQAGEVVCEAIKNEMNVMLKSSPVDLVTATDQKVEKMLISSIKEKYPSHSFIGEESVAAGEKSILTDNPTWIIDPIDGTTNFVHRFPFVAVSIGFAVNKKIEFGVVYSCVEGKMYTARKGKGAFCNGQKLQVSQQE

SEQ ID NO: 49881 - protein, 288 aa, Homo sapiens
MKPSGEDQAALAAGPWEECFQAAVQLALRAGQIIRKALTEEKRVSTKTSAADLVTETDHLVEDLIISELRERFPSHRFIAEEAAASGAKCVLTHSPTWIIDPIDGTCNFVHRFPTVAVSIGFAVRQELEFGVIYHCTEERLYTGRRGRGAFCNGQRLRVSGETDLSKALVLTEIGPKRDPATLKLFLSNMERLLHAKAHGVRVIGSSTLALCHLASGAADAYYQFGLHCWDLAAATVIIREAGGIVIDTSGGPLDLMACRVVAASTREMAMLIAQALQTINYGRDDEK

SEQ ID NO: 49882 - protein, 85 aa, Homo sapiens
MKPSGEDQAALAAGPWEECFQAAVQLALRAGQIIRKALTEEKRVSTKTSAADLVTETDHLVEDLIISELRERFPSHRSPFSLVHM

SEQ ID NO: 49883 - protein, 356 aa, Homo sapiens
MLEQIRRDIRDFRSSAGLDKVIVLWTANTERFCEVIPGLNDTAENLLRTIELGLEVSPSTLFAVASILEGCAFLNGSPQNTLVPGALELAWQHRVFVGGDDFKSGQTKVKSVLVDFLIGSGLKTMSIVSYNHLGNNDGENLSAPLQFRSKEVSKSNVVDDMVQSNPVLYTPGEEPDHCVVIKYVPYVGDSKRALDEYTSELMLGGTNTLVLHNTCEDSLLAAPIMLDLALLTELCQRVSFCTDMDPEPQTFHPVLSLLSFLFKAPLVPPGSPVVNALFRQRSCIENILRACVGLPPQNHMLLEHKMERPGPSLKRVGPVAATYPMLNKKGPVPAATNGCTGDANGHLQEEPPMPTT

SEQ ID NO: 49884 - protein, 558 aa, Homo sapiens
MEAAAQFFVESPDVVYGPEAIEAQYEYRTTRVSREGGVLKVHPTSTRFTFRTARQVPRLGVMLVGWGGNNGSTLTAAVLANRLRLSWPTRSGRKEANYYGSLTQAGTVSLGLDAEGQEVFVPFSAVLPMVAPNDLVFDGWDISSLNLAEAMRRAKVLDWGLQEQLWPHMEALRPRPSVYIPEFIAANQSARADNLIPGSRAQQLEQIRRDIRDFRSSAGLDKVIVLWTANTERFCEVIPGLNDTAENLLRTIELGLEVSPSTLFAVASILEGCAFLNGSPQNTLVPGALELAWQHRVFVGGDDFKSGQTKVKSVLVDFLIGSGLKTMSIVSYNHLGNNDGENLSAPLQFRSKEVSKSNVVDDMVQSNPVLYTPGEEPDHCVVIKYVPYVGDSKRALDEYTSELMLGGTNTLVLHNTCEDSLLAAPIMLDLALLTELCQRVSFCTDMDPEPQTFHPVLSLLSFLFKAPLVPPGSPVVNALFRQRSCIENILRACVGLPPQNHMLLEHKMERPGPSLKRVGPVAATYPMLNKKGPVPAATNGCTGDANGHLQEEPPMPTT

SEQ ID NO: 49885 - protein, 504 aa, Homo sapiens
MEAAAQFFVESPDVVYGPEAIEAQYEYRTTRVSREGGVLKEANYYGSLTQAGTVSLGLDAEGQEVFVPFSAVLPMVAPNDLVFDGWDISSLNLAEAMRRAKVLDWGLQEQLWPHMEALRPRPSVYIPEFIAANQSARADNLIPGSRAQQLEQIRRDIRDFRSSAGLDKVIVLWTANTERFCEVIPGLNDTAENLLRTIELGLEVSPSTLFAVASILEGCAFLNGSPQNTLVPGALELAWQHRVFVGGDDFKSGQTKVKSVLVDFLIGSGLKTMSIVSYNHLGNNDGENLSAPLQFRSKEVSKSNVVDDMVQSNPVLYTPGEEPDHCVVIKYVPYVGDSKRALDEYTSELMLGGTNTLVLHNTCEDSLLAAPIMLDLALLTELCQRVSFCTDMDPEPQTFHPVLSLLSFLFKAPLVPPGSPVVNALFRQRSCIENILRACVGLPPQNHMLLEHKMERPGPSLKRVGPVAATYPMLNKKGPVPAATNGCTGDANGHLQEEPPMPTT

SEQ ID NO: 49886 - protein, 408 aa, Homo sapiens
MRRAKVLDWGLQEQLWPHMEALRPRPSVYIPEFIAANQSARADNLIPGSRAQQLEQIRRDIRDFRSSAGLDKVIVLWTANTERFCEVIPGLNDTAENLLRTIELGLEVSPSTLFAVASILEGCAFLNGSPQNTLVPGALELAWQHRVFVGGDDFKSGQTKVKSVLVDFLIGSGLKTMSIVSYNHLGNNDGENLSAPLQFRSKEVSKSNVVDDMVQSNPVLYTPGEEPDHCVVIKYVPYVGDSKRALDEYTSELMLGGTNTLVLHNTCEDSLLAAPIMLDLALLTELCQRVSFCTDMDPEPQTFHPVLSLLSFLFKAPLVPPGSPVVNALFRQRSCIENILRACVGLPPQNHMLLEHKMERPGPSLKRVGPVAATYPMLNKKGPVPAATNGCTGDANGHLQEEPPMPTT

SEQ ID NO: 49887 - protein, 461 aa, Homo sapiens
MTLPGGPTGMARPGGARPCSPGLERAPRRSVGELRLLFEARCAAVAAAAAAGEPRARGAKRRGGQVPNGLPRAPPAPVIPQLTVTAEEPDVPPTSPGPPERERDCLPAAGSSHLQQPRRLSTSSVSSTGSSSLLEDSEDDLLSDSESRSRGNVQLEAGEDVGQKNHWQKIRTMVNLPVISPFKKRYAWVQLAGHTGSFKAAGTSGLILKRCSEPERYCLARLMADALRGCVPAFHGVVERDGESYLQLQDLLDGFDGPCVLDCKMGVRTYLEEELTKARERPKLRKDMYKKMLAVDPEAPTEEEHAQRAVTKPRYMQWREGISSSTTLGFRIEGIKKADGSCSTDFKTTRSREQVLRVFEEFVQGDEEVLRRYLNRLQQIRDTLEVSEFFRRHEVIGSSLLFVHDHCHRAGVWLIDFGKTTPLPDGQILDHRRPWEEGNREDGYLLGLDNLIGILASLAER

SEQ ID NO: 49888 - protein, 946 aa, Homo sapiens
MAVYCYALNSLVIMNSANEMKSGGGPGPSGSETPPPPRRAVLSPGSVFSPGRGASFLFPPAESLSPEEPRSPGGWRSGRRRLNSSSGSGSGSSGSSVSSPSWAGRLRGDRQQVVAAGTLSPPGPEEAKRKLRILQRELQNVQVNQKVGMFEAHIQAQSSAIQAPRSPRLGRARSPSPCPFRSSSQPPGRVLVQGARSEERRTKSWGEQCPETSGTDSGRKGGPSLCSSQVKKGMPPLPGRAAPTGSEAQGPSAFVRMEKGIPASPRCGSPTAMEIDKRGSPTPGTRSCLAPSLGLFGASLTMATEVAARVTSTGPHRPQDLALTEPSGRARELEDLQPPEALVERQGQFLGSETSPAPERGGPRDGEPPGKMGKGYLPCGMPGSGEPEVGKRPEETTVSVQSAESSDSLSWSRLPRALASVGPEEARSGAPVGGGRWQLSDRVEGGSPTLGLLGGSPSAQPGTGNVEAGIPSGRMLEPLPCWDAAKDLKEPQCPPGDRVGVQPGNSRVWQGTMEKAGLAWTRGTGVQSEGTWESQRQDSDALPSPELLPQDPDKPFLRKACSPSNIPAVIITDMGTQEDGALEETQGSPRGNLPLRKLSSSSASSTGFSSSYEDSEEDISSDPERTLDPNSAFLHTLDQQKPRVSKSWRKIKNMVHWSPFVMSFKKKYPWIQLAGHAGSFKAAANGRILKKHCESEQRCLDRLMVDVLRPFVPAYHGDVVKDGERYNQMDDLLADFDSPCVMDCKMGIRTYLEEELTKARKKPSLRKDMYQKMIEVDPEAPTEEEKAQRAVTKPRYMQWRETISSTATLGFRIEGIKKEDGTVNRDFKKTKTREQVTEAFREFTKGNHNILIAYRDRLKAIRTTLEVSPFFKCHEVIGSSLLFIHDKKEQAKVWMIDFGKTTPLPEGQTLQHDVPWQEGNREDGYLSGLNNLVDILTEMSQDAPLA

SEQ ID NO: 49889 - protein, 644 aa, Homo sapiens
MAVYCYALNSLVIMNSANEMKSGGGPGPSGSETPPPPRRAVLSPGSVFSPGRGASFLFPPAESLSPEEPRSPGGWRSGRRRLNSSSGSGSGSSGSSVSSPSWAGRLRGDRQQVVAAGTLSPPGPEEAKRKLRILQRELQNVQVNQKVGMFEAHIQAQSSAIQAPRSPRLGRARSPSPCPFRSSSQPPGRVLVQGARSEERRTKSWGEQCPETSGTDSGRKGGPSLCSSQVKKGMPPLPGRAAPTGSEAQGPSAFVRMEKGIPASPRCGSPTAMEIDKRGSPTPGTRSCLAPSLGLFGASLTMATEVAARVTSTGPHRPQDLALTEPSGRARELEDLQPPEALVERQGQFLGSETSPAPERGGPRDGEPPGKMGKGYLPCGMPGSGEPEVGKRPEETTVSVQSAESSDSLSWSRLPRALASVGPEEARSGAPVGGGRWQLSDRVEGGSPTLGLLGGSPSAQPGTGNVEAGIPSGRMLEPLPCWDAAKDLKEPQCPPGDRVGVQPGNSRVWQGTMEKAGLAWTRGTGVQSEGTWESQRQDSDALPSPELLPQDPDKPFLRKACSPSNIPAVIITDMGTQEDGALEETQGSPRGNLPLRKLSSSSASSTGFSSSYEDSEEDISSDPERTLDPNSAFLHTLDQQKPRV

SEQ ID NO: 49890 - protein, 946 aa, Homo sapiens; identical to SEQ ID NO: 49888

SEQ ID NO: 49891 - protein, 683 aa, Homo sapiens
MRRCPCRGSLNEAEAGALPAAARMGLEAPRGGRRRQPGQQRPGPGAGAPAGRPEGGGPWARTEGSSLHSEPERAGLGPAPGTESPQAEFWTDGQTEPAAAGLGVETERPKQKTEPDRSSLRTHLEWSWSELETTCLWTETGTDGLWTDPHRSDLQFQPEEASPWTQPGVHGPWTELETHGSQTQPERVKSWADNLWTHQNSSSLQTHPEGACPSKEPSADGSWKELYTDGSRTQQDIEGPWTEPYTDGSQKKQDTEAARKQPGTGGFQIQQDTDGSWTQPSTDGSQTAPGTDCLLGEPEDGPLEEPEPGELLTHLYSHLKCSPLCPVPRLIITPETPEPEAQPVGPPSRVEGGSGGFSSASSFDESEDDVVAGGGGASDPEDRSGSKPWKKLKTVLKYSPFVVSFRKHYPWVQLSGHAGNFQAGEDGRILKRFCQCEQRSLEQLMKDPLRPFVPAYYGMVLQDGQTFNQMEDLLADFEGPSIMDCKMGSRTYLEEELVKARERPRPRKDMYEKMVAVDPGAPTPEEHAQGAVTKPRYMQWRETMSSTSTLGFRIEGIKKADGTCNTNFKKTQALEQVTKVLEDFVDGDHVILQKYVACLEELREALEISPFFKTHEVVGSSLLFVHDHTGLAKVWMIDFGKTVALPDHQTLSHRLPWAEGNREDGYLWGLDNMICLLQGLAQS

SEQ ID NO: 49892 - protein, 579 aa, Homo sapiens
MRRPPGNGEAASEGPGGWGLWGVQESRRLCCAGHDRCKQALLQIGINMMALPGGRHLDSVTLPGQRLHLMQVDSVQRWMEDLKLMTECECMCVLQAKPISLEEDAQGDLILAGGPGPGDPLQLLLKRGWVISTELRRIGQKLAQDRWARVHSMSVRLTCHARSMVSEYSAVSRNSLKEMGEIEKLLMEKCSELSAVTERCLQVENEHVLKSMKACVSETLSMLGQHFGQLLELALTREVQALVRKIDASDNIYTTESTTGNLFSLTQEGAPLCRIIAKEGGVVALFKVCRQDSFRCLYPQALRTLASICCVEEGVHQLEKVDGVLCLADILTDNSHSEATRAEAAAVVAQVTSPHLPVTQHLSSFLESMEEIVTALVKLCQEASSGEVFLLASAALANITFFDTMACEMLLQLNAIRVLLEACSDKQRVDTPYTRDQIVTILANMSVLEQCASDIIQENGVQLIMGMLSEKPRSGTPAEVAACERVQQKAAVTLARLSRDPDVAREAVRLSCMSRLIELCRSPSERNSSDAVLVACLAALRRLAGVCPEGLQDSDFQQLVQPRLVDSFLLCSNMEESFV

SEQ ID NO: 49893 - protein, 532 aa, Homo sapiens
MMALPGGRHLDSVTLPGQRLHLMQVDSVQRWMEDLKLMTECECMCVLQAKPISLEEDAQGDLILAGGPGPGDPLQLLLKRGWVISTELRRIGQKLAQDRWARVHSMSVRLTCHARSMVSEYSAVSRNSLKEMGEIEKLLMEKCSELSAVTERCLQVENEHVLKSMKACVSETLSMLGQHFGQLLELALTREVQALVRKIDASDNIYTTESTTGNLFSLTQEGAPLCRIIAKEGGVVALFKVCRQDSFRCLYPQALRTLASICCVEEGVHQLEKVDGVLCLADILTDNSHSEATRAEAAAVVAQVTSPHLPVTQHLSSFLESMEEIVTALVKLCQEASSGEVFLLASAALANITFFDTMACEMLLQLNAIRVLLEACSDKQRVDTPYTRDQIVTILANMSVLEQCASDIIQENGVQLIMGMLSEKPRSGTPAEVAACERVQQKAAVTLARLSRDPDVAREAVRLSCMSRLIELCRSPSERNSSDAVLVACLAALRRLAGVCPEGLQDSDFQQLVQPRLVDSFLLCSNMEESFV

SEQ ID NO: 49894 - protein, 308 aa, Homo sapiens
MMALPGGRHLDSVTLPGQRLHLMQVDSVQRWMEDLKLMTECECMCVLQAKPISLEEDAQGDLILAGGPGPGDPLQLLLKRGWVISTELRRIGQKLAQDRWARVHSMSVRLTCHARSMVSEYSAVSRNSLKEMGEIEKLLMEKCSELSAVTERCLQVENEHVLKSMKACVSETLSMLGQHFGQLLELALTREVQVESHSVTRLECSGAISAQCNLRLLGSSDSPASASQALVRKIDASDNIYTTESTTGNLFSLTQEGAPLCRIIAKEGGVVALFKVCRQDSFRCLYPQALRTLASICCVEEGVHQLEK

SEQ ID NO: 49895 - protein, 490 aa, Homo sapiens
MMALPGGRHLDSVTLPGQRLHLMQVDSVQRWMEDLKLMTECECMCVLQAKPISLEEDAQGDLILAGGPGPGDPLQLLLKRGWVISTELRRIGQKLAQDRWARVHSMSVRLTCHARSMVSEYSAVSRNSLKEMGEIEKLLMEKCSELSAVTERCLQVENEHVLKSMKACVSETLSMLGQHFGQLLELALTREVQALVRKIDASDNIYTTESTTGNLFSLTQEGAPLCRIIAKVDGVLCLADILTDNSHSEATRAEAAAVVAQVTSPHLPVTQHLSSFLESMEEIVTALVKLCQEASSGEVFLLASAALANITFFDTMACEMLLQLNAIRVLLEACSDKQRVDTPYTRDQIVTILANMSVLEQCASDIIQENGVQLIMGMLSEKPRSGTPAEVAACERVQQKAAVTLARLSRDPDVAREAVRLSCMSRLIELCRSPSERNSSDAVLVACLAALRRLAGVCPEGLQDSDFQQLVQPRLVDSFLLCSNMEESFV

SEQ ID NO: 49896 - protein, 490 aa, Homo sapiens; identical to SEQ ID NO: 49895

SEQ ID NO: 49897 - protein, 532 aa, Homo sapiens; identical to SEQ ID NO: 49893

SEQ ID NO: 49898 - protein, 277 aa, Homo sapiens
MPRLHDHFWSCSCAHSARRRGPPRASAAGLAAKVGEMINVSVSGPSLLAAHGAPDADPAPRGRSAAMSGPEPGSPYPNTWHHRLLQRSLVLFSVGVVLALVLNLLQIQRNVTLFPEEVIATIFSSAWWVPPCCGTAAAVVGLLYPCIDSHLGEPHKFKREWASVMRCIAVFVGINHASAKLDFANNVQLSLTLAALSLGLWWTFDRSRSGLGLGITIAFLATLITQFLVYNGVYQYTSPDFLYIRSWLPCIFFSGGVTVGNIGRQLAMGVPEKPHSD

SEQ ID NO: 49899 - protein, 178 aa, Homo sapiens
MPRLHDHFWSCSCAHSARRRGPPRASAKLDFANNVQLSLTLAALSLGLWWTFDRSRSGLGLGITIAFLATLITQFLVYNGVYQYTSPDFLYIRSWLPCIFFSGGVTVGNIGRQLAMLIPFCEELNLKTTWLFHKTRSNYRVFLKSPIVIESSKPPILRARKILEENLTVDYDKDYLFS

SEQ ID NO: 49900 - protein, 123 aa, Homo sapiens
MPRLHDHFWSCSCAHSARRRGPPRASAAGLAAKVGEMINVSVSGPSLLAAHGAPDADPAPRGRSAAMSGPEPGSPYPNTWHHRLLQRSLVLFSVGVVLALVLNLLQIQRNVTLFPEEVIATIF

SEQ ID NO: 49901 - protein, 164 aa, Homo sapiens
MPRLHDHFWSCSCAHSARRRGPPRASAAGLAAKVGEMINVSVSGPSLLAAHGAPDADPAPRGRSAAMSGPEPGSPYPNTWHHRLLQRSLVLFSVGVVLALVLNLLQIQRNVTLFPEEVIATIFSSAWWVPPCCGTAAGIHPQISSIFVLGSLVYFSQEASRWGT

SEQ ID NO: 49902 - protein, 225 aa, Homo sapiens
MAEGETESPGPKKCGPYISSVTSQSVNLMIRGVVLFFIGVFLALVLNLLQIQRNVTLFPPDVIASIFSSAWWVPPCCGTASAVIGLLYPCIDRHLGEPHKFKREWSSVMRCVAVFVGINHASAKVDFDNNIQLSLTLAALSIGLWWTFDRSRSGFGLGVGIAFLATVVTQLLVYNGVYQYTSPDFLYVRSWLPCIFFAGGITMGNIGRQLAMYECKVIAEKSHQE

SEQ ID NO: 49903 - protein, 1382 aa, Homo sapiens
MATGGRRGAAAAPLLVAVAALLLGAAGHLYPGEVCPGMDIRNNLTRLHELENCSVIEGHLQILLMFKTRPEDFRDLSFPKLIMITDYLLLFRVYGLESLKDLFPNLTVIRGSRLFFNYALVIFEMVHLKELGLYNLMNITRGSVRIEKNNELCYLATIDWSRILDSVEDNYIVLNKDDNEECGDICPGTAKGKTNCPATVINGQFVERCWTHSHCQKVCPTICKSHGCTAEGLCCHSECLGNCSQPDDPTKCVACRNFYLDGRCVETCPPPYYHFQDWRCVNFSFCQDLHHKCKNSRRQGCHQYVIHNNKCIPECPSGYTMNSSNLLCTPCLGPCPKVCHLLEGEKTIDSVTSAQELRGCTVINGSLIINIRGGNNLAAELEANLGLIEEISGYLKIRRSYALVSLSFFRKLRLIRGETLEIGNYSFYALDNQNLRQLWDWSKHNLTITQGKLFFHYNPKLCLSEIHKMEEVSGTKGRQERNDIALKTNGDQASCENELLKFSYIRTSFDKILLRWEPYWPPDFRDLLGFMLFYKEAPYQNVTEFDGQDACGSNSWTVVDIDPPLRSNDPKSQNHPGWLMRGLKPWTQYAIFVKTLVTFSDERRTYGAKSDIIYVQTDATNPSVPLDPISVSNSSSQIILKWKPPSDPNGNITHYLVFWERQAEDSELFELDYCLKGLKLPSRTWSPPFESEDSQKHNQSEYEDSAGECCSCPKTDSQILKELEESSFRKTFEDYLHNVVFVPRKTSSGTGAEDPRPSRKRRSLGDVGNVTVAVPTVAAFPNTSSTSVPTSPEEHRPFEKVVNKESLVISGLRHFTGYRIELQACNQDTPEERCSVAAYVSARTMPEAKADDIVGPVTHEIFENNVVHLMWQEPKEPNGLIVLYEVSYRRYGDEELHLCVSRKHFALERGCRLRGLSPGNYSVRIRATSLAGNGSWTEPTYFYVTDYLDVPSNIAKIIIGPLIFVFLFSVVIGSIYLFLRKRQPDGPLGPLYASSNPEYLSASDVFPCSVYVPDEWEVSREKITLLRELGQGSFGMVYEGNARDIIKGEAETRVAVKTVNESASLRERIEFLNEASVMKGFTCHHVVRLLGVVSKGQPTLVVMELMAHGDLKSYLRSLRPEAENNPGRPPPTLQEMIQMAAEIADGMAYLNAKKFVHRDLAARNCMVAHDFTVKIGDFGMTRDIYETDYYRKGGKGLLPVRWMAPESLKDGVFTTSSDMWSFGVVLWEITSLAEQPYQGLSNEQVLKFVMDGGYLDQPDNCPERVTDLMRMCWQFNPKMRPTFLEIVNLLKDDLHPSFPEVSFFHSEENKAPESEELEMEFEDMENVPLDRSSHCQREEAGGRDGGSSLGFKRSYEEHIPYTHMNGGKKNGRILTLPRSNPS

SEQ ID NO: 49904 - protein, 1370 aa, Homo sapiens
MATGGRRGAAAAPLLVAVAALLLGAAGHLYPGEVCPGMDIRNNLTRLHELENCSVIEGHLQILLMFKTRPEDFRDLSFPKLIMITDYLLLFRVYGLESLKDLFPNLTVIRGSRLFFNYALVIFEMVHLKELGLYNLMNITRGSVRIEKNNELCYLATIDWSRILDSVEDNYIVLNKDDNEECGDICPGTAKGKTNCPATVINGQFVERCWTHSHCQKVCPTICKSHGCTAEGLCCHSECLGNCSQPDDPTKCVACRNFYLDGRCVETCPPPYYHFQDWRCVNFSFCQDLHHKCKNSRRQGCHQYVIHNNKCIPECPSGYTMNSSNLLCTPCLGPCPKVCHLLEGEKTIDSVTSAQELRGCTVINGSLIINIRGGNNLAAELEANLGLIEEISGYLKIRRSYALVSLSFFRKLRLIRGETLEIGNYSFYALDNQNLRQLWDWSKHNLTITQGKLFFHYNPKLCLSEIHKMEEVSGTKGRQERNDIALKTNGDQASCENELLKFSYIRTSFDKILLRWEPYWPPDFRDLLGFMLFYKEAPYQNVTEFDGQDACGSNSWTVVDIDPPLRSNDPKSQNHPGWLMRGLKPWTQYAIFVKTLVTFSDERRTYGAKSDIIYVQTDATNPSVPLDPISVSNSSSQIILKWKPPSDPNGNITHYLVFWERQAEDSELFELDYCLKGLKLPSRTWSPPFESEDSQKHNQSEYEDSAGECCSCPKTDSQILKELEESSFRKTFEDYLHNVVFVPRPSRKRRSLGDVGNVTVAVPTVAAFPNTSSTSVPTSPEEHRPFEKVVNKESLVISGLRHFTGYRIELQACNQDTPEERCSVAAYVSARTMPEAKADDIVGPVTHEIFENNVVHLMWQEPKEPNGLIVLYEVSYRRYGDEELHLCVSRKHFALERGCRLRGLSPGNYSVRIRATSLAGNGSWTEPTYFYVTDYLDVPSNIAKIIIGPLIFVFLFSVVIGSIYLFLRKRQPDGPLGPLYASSNPEYLSASDVFPCSVYVPDEWEVSREKITLLRELGQGSFGMVYEGNARDIIKGEAETRVAVKTVNESASLRERIEFLNEASVMKGFTCHHVVRLLGVVSKGQPTLVVMELMAHGDLKSYLRSLRPEAENNPGRPPPTLQEMIQMAAEIADGMAYLNAKKFVHRDLAARNCMVAHDFTVKIGDFGMTRDIYETDYYRKGGKGLLPVRWMAPESLKDGVFTTSSDMWSFGVVLWEITSLAEQPYQGLSNEQVLKFVMDGGYLDQPDNCPERVTDLMRMCWQFNPKMRPTFLEIVNLLKDDLHPSFPEVSFFHSEENKAPESEELEMEFEDMENVPLDRSSHCQREEAGGRDGGSSLGFKRSYEEHIPYTHMNGGKKNGRILTLPRSNPS

SEQ ID NO: 49905 - protein, 83 aa, Homo sapiens
PYQNVTEFDGQDACGSNSWTVVDIDPPLRSNDPKSQNHPGWLMRGLKPWTQYAIFVKTLVTFSDERRTYGAKSDIIYVQTDAT

SEQ ID NO: 49906 - protein, 1338 aa, Homo sapiens
MASPPRHGPPGPASGDGPNLNNNNNNNNHSVRKCGYLRKQKHGHKRFFVLRGPGAGGDEATAGGGSAPQPPRLEYYESEKKWRSKAGAPKRVIALDCCLNINKRADAKHKYLIALYTKDEYFAVAAENEQEQEGWYRALTDLVSEGRAAAGDAPPAAAPAASCSASLPGALGGSAGAAGAEDSYGLVAPATAAYREVWQVNLKPKGLGQSKNLTGVYRLCLSARTIGFVKLNCEQPSVTLQLMNIRRCGHSDSFFFIEVGRSAVTGPGELWMQADDSVVAQNIHETILEAMKALKELFEFRPRSKSQSSGSSATHPISVPGARRHHHLVNLPPSQTGLVRRSRTDSLAATPPAAKCSSCRVRTASEGDGGAAAGAAAAGARPVSVAGSPLSPGPVRAPLSRSHTLSGGCGGRGSKVALLPAGGALQHSRSMSMPVAHSPPAATSPGSLSSSSGHGSGSYPPPPGPHPPLPHPLHHGPGQRPSSGSASASGSPSDPGFMSLDEYGSSPGDLRAFCSHRSNTPESIAETPPARDGGGGGEFYGYMTMDRPLSHCGRSYRRVSGDAAQDLDRGLRKRTYSLTTPARQRPVPQPSSASLDEYTLMRATFSGSAGRLCPSCPASSPKVAYHPYPEDYGDIEIGSHRSSSSNLGADDGYMPMTPGAALAGSGSGSCRSDDYMPMSPASVSAPKQILQPRAAAAAAAAVPSAGPAGPAPTSAAGRTFPASGGGYKASSPAESSPEDSGYMRMWCGSKLSMEHADGKLLPNGDYLNVSPSDAVTTGTPPDFFSAALHPGGEPLRGVPGCCYSSLPRSYKAPYTCGGDSDQYVLMSSPVGRILEEERLEPQATPGPSQAASAFGAGPTQPPHPVVPSPVRPSGGRPEGFLGQRGRAVRPTRLSLEGLPSLPSMHEYPLPPEPKSPGEYINIDFGEPGARLSPPAPPLLASAASSSSLLSASSPASSLGSGTPGTSSDSRQRSPLSDYMNLDFSSPKSPKPGAPSGHPVGSLDGLLSPEASSPYPPLPPRPSASPSSSLQPPPPPPAPGELYRLPPASAVATAQGPGAASSLSSDTGDNGDYTEMAFGVAATPPQPIAAPPKPEAARVASPTSGVKRLSLMEQVSGVEAFLQASQPPDPHRGAKVIRADPQGGRRRHSSETFSSTTTVTPVSPSFAHNPKRHNSASVENVSLRKSSEGGVGVGPGGGDEPPTSPRQLQPAPPLAPQGRPWTPGQPGGLVGCPGSGGSPMRRETSAGFQNGLNYIAIDVREEPGLPPQPQPPPPPLPQPGDKSSWGRTRSLGGLISAVGVGSTGGGCGGPGPGALPPANTYASIDFLSHHLKEATIVKE

SEQ ID NO: 49907 - protein, 1297 aa, Homo sapiens
MAVPSLWPWGACLPVIFLSLGFGLDTVEVCPSLDIRSEVAELRQLENCSVVEGHLQILLMFTATGEDFRGLSFPRLTQVTDYLLLFRVYGLESLRDLFPNLAVIRGTRLFLGYALVIFEMPHLRDVALPALGAVLRGAVRVEKNQELCHLSTIDWGLLQPAPGANHIVGNKLGEECADVCPGVLGAAGEPCAKTTFSGHTDYRCWTSSHCQRVCPCPHGMACTARGECCHTECLGGCSQPEDPRACVACRHLYFQGACLWACPPGTYQYESWRCVTAERCASLHSVPGRASTFGIHQGSCLAQCPSGFTRNSSSIFCHKCEGLCPKECKVGTKTIDSIQAAQDLVGCTHVEGSLILNLRQGYNLEPQLQHSLGLVETITGFLKIKHSFALVSLGFFKNLKLIRGDAMVDGNYTLYVLDNQNLQQLGSWVAAGLTIPVGKIYFAFNPRLCLEHIYRLEEVTGTRGRQNKAEINPRTNGDRAACQTRTLRFVSNVTEADRILLRWERYEPLEARDLLSFIVYYKESPFQNATEHVGPDACGTQSWNLLDVELPLSRTQEPGVTLASLKPWTQYAVFVRAITLTTEEDSPHQGAQSPIVYLRTLPAAPTVPQDVISTSNSSSHLLVRWKPPTQRNGNLTYYLVLWQRLAEDGDLYLNDYCHRGLRLPTSNNDPRFDGEDGDPEAEMESDCCPCQHPPPGQVLPPLEAQEASFQKKFENFLHNAITIPISPWKVTSINKSPQRDSGRHRRAAGPLRLGGNSSDFEIQEDKVPRERAVLSGLRHFTEYRIDIHACNHAAHTVGCSAATFVFARTMPHREADGIPGKVAWEASSKNSVLLRWLEPPDPNGLILKYEIKYRRLGEEATVLCVSRLRYAKFGGVHLALLPPGNYSARVRATSLAGNGSWTDSVAFYILGPEEEDAGGLHVLLTATPVGLTLLIVLAALGFFYGKKRNRTLYASVNPEYFSASDMYVPDEWEVPREQISIIRELGQGSFGMVYEGLARGLEAGEESTPVALKTVNELASPRECIEFLKEASVMKAFKCHHVVRLLGVVSQGQPTLVIMELMTRGDLKSHLRSLRPEAENNPGLPQPALGEMIQMAGEIADGMAYLAANKFVHRDLAARNCMVSQDFTVKIGDFGMTRDVYETDYYRKGGKGLLPVRWMAPESLKDGIFTTHSDVWSFGVVLWEIVTLAEQPYQGLSNEQVLKFVMDGGVLEELEGCPLQLQELMSRCWQPNPRLRPSFTHILDSIQEELRPSFRLLSFYYSPECRGARGSLPTTDAEPDSSPTPRDCSPQNGGPGH

SEQ ID NO: 49908 - protein, 1019 aa, Homo sapiens [sequence omitted]

SEQ ID NO: 49909 - protein, 464 aa, Homo sapiens
MSKLWFKQDDKFFLPKACLNFEFFSPFAYVDPLHCNMAYLYLELLKDSLNEYAYAAELAGLSYDLQNTIYGMYLSVKGYNDKQPILLKKIIEKMATFEIDEKRFEIIKEAYMRSLNNFRAEQPHQHAMYYLRLLMTEVAWTKDELKEALDDVTLPRLKAFIPQLLSRLHIEALLHGNITKQAALGIMQMVEDTLIEHAHTKPLLPSQLVRYREVQLPDRGWFVYQQRNEVHNNCGIEIYYQTDMQSTSENMFLELFCQIISEPCFNTLRTKEQLGYIVFSGPRRANGIQGLRFIIQSEKPPHYLESRVEAFLITMEKSIEDMTEEAFQKHIQALAIRRLDKPKKLSAECAKYWGEIISQQYNFDRDNTEVAYLKTLTKEDIIKFYKEMLAVDAPRRHKVSVHVLAREMDSCPVVGEFPCQNDINLSQAPALPQPEVIQNMTEFKRGLPLFPLVKPHINFMAAKL

SEQ ID NO: 49910 - protein, 257 aa, Homo sapiens
EFIIRGGRVPSHCLHFSRSFQKKTYSKMNNPAIKRIGNHITKSPEDKREYRGLELANGIKVLLISDPTTDKSSAALDVHIGSLSDPPNIAGLSHFCEHMLFLGTKKYPKENEYSQFLSEHAGSSNAFTSGEHTNYYFDVSHEHLEGALDRFAQFFLCPLFDESCKDREVNAVDSEHEKNVMNDAWRLFQLEKATGNPKHPFSKFGTGNKYTLETRPNQEGIDVRQELLKFHSAYYSSNLMAVCVLGRESLDDLTNLV

SEQ ID NO: 49911 - protein, 131 aa, Homo sapiens
MDPRLPAWALVLLGPALVFALGPAPTPEMREKLCGHHFVRALVRVCGGPRWSTEARRPATGGDRELLQWLERRHLLHGLVADSNLTLGPGLQPLPQTSHHHRHHRAAATNPARYCCLSGCTQQDLLTLCPY

SEQ ID NO: 49912 - protein, 157 aa, Homo sapiens
MDPRLPAWALVLLGPALVFALGPAPTPEMREKLCGHHFVRALVRVCGGPRWSTEARRPATGGDQRESHSVSQAGLKLLSSSNPPTLTFQSVGISDVSCYSGWRDDICSMGWWPTVISRWDLACSPCPRPLTITATTVQLPPTLHATAASVAVPNKTC

SEQ ID NO: 49913 - protein, 139 aa, Homo sapiens
MASLFRSYLPAIWLLLSQLLRESLAAELRGCGPRFGKHLLSYCPMPEKTFTTTPGGWLLESGRPKEMVSTSNNKDGQALGTTSEFIPNLSPELKKPLSEGQPSLKKIILSRKKRSGRHRFDPFCCEVICDDGTSVKLCT

SEQ ID NO: 49914 - protein, 135 aa, Homo sapiens
MKGSIFTLFLFSVLFAISEVRSKESVRLCGLEYIRTVIYICASSRWRRHQEGIPQAQQAETGNSFQLPHKREFSEENPAQNLPKVDASGEDRLWGGQMPTEELWKSKKHSVMSRQDLQTLCCTDGCSMTDLSALC

SEQ ID NO: 49915 - protein, 213 aa, Homo sapiens
MPRLLRLSLLWLGLLLVRFSRELSDISSARKLCGRYLVKEIEKLCGHANWSQFRFEEETPFSRLIAQASEKVEAYSPYQFESPQTASPARGRGTNPVSTSWEEAVNSWEMQSLPEYKDKKGYSPLGKTREFSSSHNINVYIHENAKFQKKRRNKIKTLSNLFWGHHPQRKRRGYSEKCCLTGCTKEELSIACLPYIDFKRLKEKRSSLVTKIY

SEQ ID NO: 49916 - protein, 577 aa, Homo sapiens
MNKLYIGNLNESVTPADLEKVFAEHKISYSGQFLVKSGYAFVDCPDEHWAMKAIETFSGKVELQGKRLEIEHSVPKKQRSRKIQIRNIPPQLRWEVLDSLLAQYGTVENCEQVNTESETAVVNVTYSNREQTRQAIMKLNGHQLENHALKVSYIPDEQIAQGPENGRRGGFGSRGQPRQGSPVAAGAPAKQQQVDIPLRLLVPTQYVGAIIGKEGATIRNITKQTQSKIDVHRKENAGAAEKAISVHSTPEGCSSACKMILEIMHKEAKDTKTADEVPLKILAHNNFVGRLIGKEGRNLKKVEQDTETKITISSLQDLTLYNPERTITVKGAIENCCRAEQEIMKKVREAYENDVAAMSLQSHLIPGLNLAAVGLFPASSSAVPPPPSSVTGAAPYSSFMQAPEQEMVQVFIPAQAVGAIIGKKGQHIKQLSRFASASIKIAPPETPDSKVRMVIITGPPEAQFKAQGRIYGKLKEENFFGPKEEVKLETHIRVPASAAGRVIGKGGKTVNELQNLTAAEVVVPRDQTPDENDQVIVKIIGHFYASQMAQRKIRDILAQVKQQHQKGQSNQAQARRK

SEQ ID NO: 49917 - protein, 438 aa, Homo sapiens
MNKLYIGNLNESVTPADLEKVFAEHKISYSGQFLVKSGYAFVDCPDEHWAMKAIETFSGKVELQGKRLEIEHSVPKKQRSRKIQIRNIPPQLRWEVLDSLLAQYGTVENCEQVNTESETAVVNVTYSNREQTRQADEVPLKILAHNNFVGRLIGKEGRNLKKVEQDTETKITISSLQDLTLYNPERTITVKGAIENCCRAEQEIMKKVREAYENDVAAMSLQSHLIPGLNLAAVGLFPASSSAVPPPPSSVTGAAPYSSFMQAPEQEMVQVFIPAQAVGAIIGKKGQHIKQLSRFASASIKIAPPETPDSKVRMVIITGPPEAQFKAQGRIYGKLKEENFFGPKEEVKLETHIRVPASAAGRVIGKGGKTVNELQNLTAAEVVVPRDQTPDENDQVIVKIIGHFYASQMAQRKIRDILAQVKQQHQKGQSNQAQARRK

SEQ ID NO: 49918 - protein, 556 aa, Homo sapiens
MMNKLYIGNLSPAVTADDLRQLFGDRKLPLAGQVLLKSGYAFVDYPDQNWAIRAIETLSGKVELHGKIMEVDYSVSKKLRSRKIQIRNIPPHLQWEVLDGLLAQYGTVENVEQVNTDTETAVVNVTYATREEAKIAMEKLSGHQFENYSFKISYIPDEEVSSPSPPQRAQRGDHSSREQGHAPGGTSQARQIDFPLRILVPTQFVGAIIGKEGLTIKNITKQTQSRVDIHRKENSGAAEKPVTIHATPEGTSEACRMILEIMQKEADETKLAEEIPLKILAHNGLVGRLIGKEGRNLKKIEHETGTKITISSLQDLSIYNPERTITVKGTVEACASAEIEIMKKLREAFENDMLAVNTHSGYFSSLYPHHQFGPFPHHHSYPEQEIVNLFIPTQAVGAIIGKKGAHIKQLARFAGASIKIAPAEGPDVSERMVIITGPPEAQFKAQGRIFGKLKEENFFNPKEEVKLEAHIRVPSSTAGRVIGKGGKTVNELQNLTSAEVIVPRDQTPDENEEVIVRIIGHFFASQTAQRKIREIVQQVKQQEQKYPQGVASQRSK

SEQ ID NO: 49919 - protein, 599 aa, Homo sapiens
MMNKLYIGNLSPAVTADDLRQLFGDRKLPLAGQVLLKSGYAFVDYPDQNWAIRAIETLSGKVELHGKIMEVDYSVSKKLRSRKIQIRNIPPHLQWEVLDGLLAQYGTVENVEQVNTDTETAVVNVTYATREEAKIAMEKLSGHQFENYSFKISYIPDEEVSSPSPPQRAQRGDHSSREQGHAPGGTSQARQIDFPLRILVPTQFVGAIIGKEGLTIKNITKQTQSRVDIHRKENSGAAEKPVTIHATPEGTSEACRMILEIMQKEADETKLAEEIPLKILAHNGLVGRLIGKEGRNLKKIEHETGTKITISSLQDLSIYNPERTITVKGTVEACASAEIEIMKKLREAFENDMLAVNQQANLIPGLNLSALGIFSTGLSVLSPPAGPRGAPPAAPYHPFTTHSGYFSSLYPHHQFGPFPHHHSYPEQEIVNLFIPTQAVGAIIGKKGAHIKQLARFAGASIKIAPAEGPDVSERMVIITGPPEAQFKAQGRIFGKLKEENFFNPKEEVKLEAHIRVPSSTAGRVIGKGGKTVNELQNLTSAEVIVPRDQTPDENEEVIVRIIGHFFASQTAQRKIREIVQQVKQQEQKYPQGVASQRSK

SEQ ID NO: 49920 - protein, 542 aa, Homo sapiens
MFSCPGHYHVDGFLNPGSRKIQIRNIPPHLQWEVLDGLLAQYGTVENVEQVFAFSLVNTDTETAVVNVTYATREEAKIAMEKLSGHQFENYSFKISYIPDEEVSSPSPPQRAQRGDHSSREQGHAPGGTSQARQIDFPLRILVPTQFVGAIIGKEGLTIKNITKQTQSRVDIHRKENSGAAEKPVTIHATPEGTSEACRMILEIMQKEADETKLAEEIPLKILAHNGLVGRLIGKEGRNLKKIEHETGTKITISSLQDLSIYNPERTITVKGTVEACASAEIEIMKKLREAFENDMLAVNQQANLIPGLNLSALGIFSTGLSVLSPPAGPRGAPPAAPYHPFTTHSGYFSSLYPHHQFGPFPHHHSYPEQEIVNLFIPTQAVGAIIGKKGAHIKQLARFAGASIKIAPAEGPDVSERMVIITGPPEAQFKAQGRIFGKLKEENFFNPKEEVKLEAHIRVPSSTAGRVIGKGGKTVNELQNLTSAEVIVPRDQTPDENEEVIVRIIGHFFASQTAQRKIREIVQQVKQQEQKYPQGVASQRSK

SEQ ID NO: 49921 - protein, 579 aa, Homo sapiens
MNKLYIGNLSENAAPSDLESIFKDAKIPVSGPFLVKTGYAFVDCPDESWALKAIEALSGKIELHGKPIEVEHSVPKRQRIRKLQIRNIPPHLQWEVLDSLLVQYGVVESCEQVNTDSETAVVNVTYSSKDQARQALDKLNGFQLENFTLKVAYIPDEMAAQQNPLQQPRGRRGLGQRGSSRQGSPGSVSKQKPCDLPLRLLVPTQFVGAIIGKEGATIRNITKQTQSKIDVHRKENAGAAEKSITILSTPEGTSAACKSILEIMHKEAQDIKFTEEIPLKILAHNNFVGRLIGKEGRNLKKIEQDTDTKITISPLQELTLYNPERTITVKGNVETCAKAEEEIMKKIRESYENDIASMNLQAHLIPGLNLNALGLFPPTSGMPPPTSGPPSAMTPPYPQFEQSETETVHLFIPALSVGAIIGKQGQHIKQLSRFAGASIKIAPAEAPDAKVRMVIITGPPEAQFKAQGRIYGKIKEENFVSPKEEVKLEAHIRVPSFAAGRVIGKGGKTVNELQNLSSAEVVVPRDQTPDENDQVVVKITGHFYACQVAQRKIQEILTQVKQHQQQKALQSGPPQSRRK

SEQ ID NO: 49922 - protein, 2491 aa, Homo sapiens
MGAAAGRSPHLGPAPARRPQRSLLLLQLLLLVAAPGSTQAQAAPFPELCSYTWEAVDTKNNVLYKINICGSVDIVQCGPSSAVCMHDLKTRTYHSVGDSVLRSATRSLLEFNTTVSCDQQGTNHRVQSSIAFLCGKTLGTPEFVTATECVHYFEWRTTAACKKDIFKANKEVPCYVFDEELRKHDLNPLIKLSGAYLVDDSDPDTSLFINVCRDIDTLRDPGSQLRACPPGTAACLVRGHQAFDVGQPRDGLKLVRKDRLVLSYVREEAGKLDFCDGHSPAVTITFVCPSERREGTIPKLTAKSNCRYEIEWITEYACHRDYLESKTCSLSGEQQDVSIDLTPLAQSGGSSYISDGKEYLFYLNVCGETEIQFCNKKQAAVCQVKKSDTSQVKAAGRYHNQTLRYSDGDLTLIYFGGDECSSGFQRMSVINFECNKTAGNDGKGTPVFTGEVDCTYFFTWDTEYACVKEKEDLLCGATDGKKRYDLSALVRHAEPEQNWEAVDGSQTETEKKHFFINICHRVLQEGKARGCPEDAAVCAVDKNGSKNLGKFISSPMKEKGNIQLSYSDGDDCGHGKKIKTNITLVCKPGDLESAPVLRTSGEGGCFYEFEWHTAAACVLSKTEGENCTVFDSQAGFSFDLSPLTKKNGAYKVETKKYDFYINVCGPVSVSPCQPDSGACQVAKSDEKTWNLGLSNAKLSYYDGMIQLNYRGGTPYNNERHTPRATLITFLCDRDAGVGFPEYQEEDNSTYNFRWYTSYACPEEPLECVVTDPSTLEQYDLSSLAKSEGGLGGNWYAMDNSGEHVTWRKYYINVCRPLNPVPGCNRYASACQMKYEKDQGSFTEVVSISNLGMAKTGPVVEDSGSLLLEYVNGSACTTSDGRQTTYTTRIHLVCSRGRLNSHPIFSLNWECVVSFLWNTEAACPIQTTTDTDQACSIRDPNSGFVFNLNPLNSSQGYNVSGIGKIFMFNVCGTMPVCGTILGKPASGCEAETQTEELKNWKPARPVGIEKSLQLSTEGFITLTYKGPLSAKGTADAFIVRFVCNDDVYSGPLKFLHQDIDSGQGIRNTYFEFETALACVPSPVDCQVTDLAGNEYDLTGLSTVRKPWTAVDTSVDGRKRTFYLSVCNPLPYIPGCQGSAVGSCLVSEGNSWNLGVVQMSPQAAANGSLSIMYVNGDKCGNQRFSTRITFECAQISGSPAFQLQDGCEYVFIWRTVEACPVVRVEGDNCEVKDPRHGNLYDLKPLGLNDTIVSAGEYTYYFRVCGKLSSDVCPTSDKSKVVSSCQEKREPQGFHKVAGLLTQKLTYENGLLKMNFTGGDTCHKVYQRSTAIFFYCDRGTQRPVFLKETSDCSYLFEWRTQYACPPFDLTECSFKDGAGNSFDLSSLSRYSDNWEAITGTGDPEHYLINVCKSLAPQAGTEPCPPEAAACLLGGSKPVNLGRVRDGPQWRDGIIVLKYVDGDLCPDGIRKKSTTIRFTCSESQVNSRPMFISAVEDCEYTFAWPTATACPMKSNEHDDCQVTNPSTGHLFDLSSLSGRAGFTAAYSEKGLVYMSICGENENCPPGVGACFGQTRISVGKANKRLRYVDQVLQLVYKDGSPCPSKSGLSYKSVISFVCRPEARPTNRPMLISLDKQTCTLFFSWHTPLACEQATECSVRNGSSIVDLSPLIHRTGGYEAYDESEDDASDTNPDFYINICQPLNPMHGVPCPAGAAVCKVPIDGPPIDIGRVAGPPILNPIANEIYLNFESSTPCLADKHFNYTSLIAFHCKRGVSMGTPKLLRTSECDFVFEWETPVVCPDEVRMDGCTLTDEQLLYSFNLSSLSTSTFKVTRDSRTYSVGVCTFAVGPEQGGCKDGGVCLLSGTKGASFGRLQSMKLDYRHQDEAVVLSYVNGDRCPPETDDGVPCVFPFIFNGKSYEECIIESRAKLWCSTTADYDRDHEWGFCRHSNSYRTSSIIFKCDEDEDIGRPQVFSEVRGCDVTFEWKTKVVCPPKKLECKFVQKHKTYDLRLLSSLTGSWSLVHNGVSYYINLCQKIYKGPLGCSERASICRRTTTGDVQVLGLVHTQKLGVIGDKVVVTYSKGYPCGGNKTASSVIELTCTKTVGRPAFKRFDIDSCTYYFSWDSRAACAVKPQEVQMVNGTITNPINGKSFSLGDIYFKLFRASGDMRTNGDNYLYEIQLSSITSSRNPACSGANICQVKPNDQHFSRKVGTSDKTKYYLQDGDLDVVFASSSKCGKDKTKSVSSTIFFHCDPLVEDGIPEFSHETADCQYLFSWYTSAVCPLGVGFDSENPGDDGQMHKGLSERSQAVGAVLSLLLVALTCCLLALLLYKKERRETVISKLTTCCRRSSNVSYKYSKVNKEEETDENETEWLMEEIQLPPPRQGKEGQENGHITTKSVKALSSLHGDDQDSEDEVLTIPEVKVHSGRGAGAESSHPVRNAQSNALQEREDDRVGLVRGEKARKGKSSSAQQKTVSSTKLVSFHDDSDEDLLHI

SEQ ID NO: 49923 - protein, 259 aa, Homo sapiens
MSEVPVARVWLVLLLLTVQVGVTAGAPWQCAPCSAEKLALCPPVSASCSEVTRSAGCGCCPMCALPLGAACGVATARCARGLSCRALPGEQQPLHALTRGQGACVQESDASAPHAAEAGSPESPESTEITEEELLDNFHLMAPSEEDHSILWDAISTYDGSKALHVTNIKKWKEPCRIELYRVVESLAKAQETSGEEISKFYLPNCNKNGFYHSRQCETSMDGEAGLCWCVYPWNGKRIPGSPEIRGDPNCQIYFNVQN

SEQ ID NO: 49924 - protein, 258 aa, Homo sapiens
MLPLCLVAALLLAAGPGPSLGDEAIHCPPCSEEKLARCRPPVGCEELVREPGCGCCATCALGLGMPCGVYTPRCGSGLRCYPPRGVEKPLHTLMHGQGVCMELAEIEAIQESLQPSDKDEGDHPNNSFSPCSAHDRRCLQKHFAKIRDRSTSGGKMKVNGAPREDARPVPQGSCQSELHRALERLAASQSRTHEDLYIIPIPNCDRNGNFHPKQCHPALDGQRGKCWCVDRKTGVKLPGGLEPKGELDCHQLADSFRE

SEQ ID NO: 49925 - protein, 158 aa, Homo sapiens
MELAEIEAIQESLQPSDKDEGDHPNNSFSPCSAHDRRCLQKHFAKIRDRSTSGGKMKVNGAPREDARPVPQGSCQSELHRALERLAASQSRTHEDLYIIPIPNCDRNGNFHPKQCHPALDGQRGKCWCVDRKTGVKLPGGLEPKGELDCHQLADSFRE

SEQ ID NO: 49926 - protein, 282 aa, Homo sapiens
MERPSLRALLLGAAGLLLLLLPLSSSSSSDTCGPCEPASCPPLPPLGCLLGETRDACGCCPMCARGEGEPCGGGGAGRGYCAPGMECVKSRKRRKGKAGAAAGGPGVSGVCVCKSRYPVCGSDGTTYPSGCQLRAASQRAESRGEKAITQVSKGTCEQGPSIVTPPKDIWNVTGAQVYLSCEVIGIPTPVLIWNKVKRGHYGVQRTELLPGDRDNLAIQTRGGPEKHEVTGWVLVSPLSKEDAGEYECHASNSQGQASASAKITVVDALHEIPVKKGEGAEL

SEQ ID NO: 49927 - protein, 279 aa, Homo sapiens
MERPSLRALLLGAAGLLLLLLPLSSSSSSDTCGPCEPASCPPLPPLGCLLGETRDACGCCPMCARGEGEPCGGGGAGRGYCAPGMECVKSRKRRKGKAGAAAGGPGVSGVCVCKSRYPVCGSDGTTYPSGCQLRAASQRAESRGEKAITQVSKGTCEQGPSIVTPPKDIWNVTGAQVYLSCEVIGIPTPVLIWNKVKRGHYGVQRTELLPGDRDNLAIQTRGGPEKHEVTGWVLVSPLSKEDAGEYECHASNSQGQASASAKITVVDALHEIPVKKGTQ

SEQ ID NO: 49928 - protein, 605 aa, Homo sapiens
MALRKGGLALALLLLSWVALGPRSLEGADPGTPGEAEGPACPAACVCSYDDDADELSVFCSSRNLTRLPDGVPGGTQALWLDGNNLSSVPPAAFQNLSSLGFLNLQGGQLGSLEPQALLGLENLCHLHLERNQLRSLALGTFAHTPALASLGLSNNRLSRLEDGLFEGLGSLWDLNLGWNSLAVLPDAAFRGLGSLRELVLAGNRLAYLQPALFSGLAELRELDLSRNALRAIKANVFVQLPRLQKLYLDRNLIAAVAPGAFLGLKALRWLDLSHNRVAGLLEDTFPGLLGLRVLRLSHNAIASLRPRTFKDLHFLEELQLGHNRIRQLAERSFEGLGQLEVLTLDHNQLQEVKAGAFLGLTNVAVMNLSGNCLRNLPEQVFRGLGKLHSLHLEGSCLGRIRPHTFTGLSGLRRLFLKDNGLVGIEEQSLWGLAELLELDLTSNQLTHLPHRLFQGLGKLEYLLLSRNRLAELPADALGPLQRAFWLDVSHNRLEALPNSLLAPLGRLRYLSLRNNSLRTFTPQPPGLERLWLEGNPWDCGCPLKALRDFALQNPSAVPRFVQAICEGDDCQPPAYTYNNITCASPPEVVGLDLRDLSEAHFAPC

SEQ ID NO: 49929 - protein, 643 aa, Homo sapiens
MALRKAGDLEPQFTPERRFRLCWYQAHSGRALLGPPPQASPPAGGLALALLLLSWVALGPRSLEGADPGTPGEAEGPACPAACVCSYDDDADELSVFCSSRNLTRLPDGVPGGTQALWLDGNNLSSVPPAAFQNLSSLGFLNLQGGQLGSLEPQALLGLENLCHLHLERNQLRSLALGTFAHTPALASLGLSNNRLSRLEDGLFEGLGSLWDLNLGWNSLAVLPDAAFRGLGSLRELVLAGNRLAYLQPALFSGLAELRELDLSRNALRAIKANVFVQLPRLQKLYLDRNLIAAVAPGAFLGLKALRWLDLSHNRVAGLLEDTFPGLLGLRVLRLSHNAIASLRPRTFKDLHFLEELQLGHNRIRQLAERSFEGLGQLEVLTLDHNQLQEVKAGAFLGLTNVAVMNLSGNCLRNLPEQVFRGLGKLHSLHLEGSCLGRIRPHTFTGLSGLRRLFLKDNGLVGIEEQSLWGLAELLELDLTSNQLTHLPHRLFQGLGKLEYLLLSRNRLAELPADALGPLQRAFWLDVSHNRLEALPNSLLAPLGRLRYLSLRNNSLRTFTPQPPGLERLWLEGNPWDCGCPLKALRDFALQNPSAVPRFVQAICEGDDCQPPAYTYNNITCASPPEVVGLDLRDLSEAHFAPC

SEQ ID NO: 49930 - protein, 510 aa, Homo sapiens
MPRGFLVKRSKKSTPVSYRVRGGEDGDRALLLSPSCGGARAEPPAPSPVPGPLPPPPPAERAHAALAAALACAPGPQPPPQGPRAAHFGNPEAAHPAPLYSPTRPVSREHEKHKYFERSFNLGSPVSAESFPTPAALLGGGGGGGASGAGGGGTCGGDPLLFAPAELKMGTAFSAGAEAARGPGPGPPLPPAAALRPPGKRPPPPTAAEPPAKAVKAPGAKKPKAIRKLHFEDEVTTSPVLGLKIKEGPVEAPRGRAGGAARPLGEFICQLCKEEYADPFALAQHKCSRIVRVEYRCPECAKVFSCPANLASHRRWHKPRPAPAAARAPEPEAAARAEAREAPGGGSDRDTPSPGGVSESGSEDGLYECHHCAKKFRRQAYLRKHLLAHHQALQAKGAPLAPPAEDLLALYPGPDEKAPQEAAGDGEGAGVLGLSASAECHLCPVCGESFASKGAQERHLRLLHAAQVFPCKYCPATFYSSPGLTRHINKCHPSENRQVILLQVPVRPAC

SEQ ID NO: 49931 - protein, 566 aa, Homo sapiens
MPRGFLVKRTKRTGGLYRVRLAERVFPLLGPQGAPPFLEEAPSASLPGAERATPPTREEPGKGLTAEAAREQSGSPCRAAGVSPGTGGREGAEWRAGGREGPGPSPSPSPSPAKPAGAELRRAFLERCLSSPVSAESFPGGAAAVAAFSCSVAPAAAPTPGEQFLLPLRAPFPEPALQPDPAPLSAALQSLKRAAGGERRGKAPTDCASGPAAAGIKKPKAMRKLSFADEVTTSPVLGLKIKEEEPGAPSRGLGGSRTPLGEFICQLCKEQYADPFALAQHRCSRIVRVEYRCPECDKVFSCPANLASHRRWHKPRPAAANAATVSSADGKPPSSSSSSSRDSGAIASFLAEGKENSRIERTADQHPQARDSSGADQHPDSAPRQGLQVLTHPEPPLPQGPYTEGVLGRRVPVPGSTSGGRGSEIFVCPYCHKKFRRQAYLRKHLSTHEAGSARALAPGFGSERGAPLAFACPLCGAHFPTADIREKHRLWHAVREELLLPALAGAPPETSGPSGPSDGSAQQIFSCKHCPSTFFSSPGLTRHINKCHPSESRQVLLLQMPLRPGC

SEQ ID NO: 49932 - protein, 263 aa, Homo sapiens
MVKIAFNTPTAVQKEEARQDVEALLSRTVRTQILTGKELRVATQEKEGSSGRCMLTLLGLSFILAGLIVGGACIYKYFMPKSTIYRGEMCFFDSEDPANSLRGGEPNFLPVTEEADIREDDNIAIIDVPVPSFSDSDPAAIIHDFEKGMTAYLDLLLGNCYLMPLNTSIVMPPKNLVELFGKLASGRYLPQTYVVREDLVAVEEIRDVSNLGIFIYQLCNNRKSFRLRRRDLLLGFNKRAIDKCWKIRHFPNEFIVETKICQE

SEQ ID NO: 49933 - protein, 219 aa, Homo sapiens
MVKIAFNTPTAVQKEEARQDVEALLSRTVRTQILTGKSTIYRGEMCFFDSEDPANSLRGGEPNFLPVTEEADIREDDNIAIIDVPVPSFSDSDPAAIIHDFEKGMTAYLDLLLGNCYLMPLNTSIVMPPKNLVELFGKLASGRYLPQTYVVREDLVAVEEIRDVSNLGIFIYQLCNNRKSFRLRRRDLLLGFNKRAIDKCWKIRHFPNEFIVETKICQE

SEQ ID NO: 49934 - protein, 266 aa, Homo sapiens
MVKVTFNSALAQKEAKKDEPKSGEEALIIPPDAVAVDCKDPDDVVPVGQRRAWCWCMCFGLAFMLAGVILGGAYLYKYFALQPDDVYYCGIKYIKDDVILNEPSADAPAALYQTIEENIKIFEEEEVEFISVPVPEFADSDPANIVHDFNKKLTAYLDLNLDKCYVIPLNTSIVMPPRNLLELLINIKAGTYLPQSYLIHEHMVITDRIENIDHLGFFIYRLCHDKETYKLQRRETIKGIQKREASNCFAIRHFENKFAVETLICS

SEQ ID NO: 49935 - protein, 230 aa, Homo sapiens
MVKISFQPAVAGIKGDKADKASASAPAPASATEILLTPAREEQPPQHRSKRGGSVGGVCYLSMGMVVLLMGLVFASVYIYRYFFLAQLARDNFFRCGVLYEDSLSSQVRTQMELEEDVKIYLDENYERINVPVPQFGGGDPADIIHDFQRRGTYLPQTYIIQEEMVVTEHVSDKEALGSFIYHLCNGKDTYRLRRRATRRRINKRGAKNCNAIRHFENTFVVETLICGVV

SEQ ID NO: 49936 - protein, 267 aa, Homo sapiens
MVKISFQPAVAGIKGDKADKASASAPAPASATEILLTPAREEQPPQHRSKRGGSVGGVCYLSMGMVVLLMGLVFASVYIYRYFFLAQLARDNFFRCGVLYEDSLSSQVRTQMELEEDVKIYLDENYERINVPVPQFGGGDPADIIHDFQRGLTAYHDISLDKCYVIELNTTIVLPPRNFWELLMNVKRGTYLPQTYIIQEEMVVTEHVSDKEALGSFIYHLCNGKDTYRLRRRATRRRINKRGAKNCNAIRHFENTFVVETLICGVV

SEQ ID NO: 49937 - protein, 220 aa, Homo sapiens
MVKISFQPAVAGIKGDKADKASASAPAPASATEILLTPARLARDNFFRCGVLYEDSLSSQVRTQMELEEDVKIYLDENYERINVPVPQFGGGDPADIIHDFQRGLTAYHDISLDKCYVIELNTTIVLPPRNFWELLMNVKRGTYLPQTYIIQEEMVVTEHVSDKEALGSFIYHLCNGKDTYRLRRRATRRRINKRGAKNCNAIRHFENTFVVETLICGVV

SEQ ID NO: 49938 - protein, 180 aa, Homo sapiens
MVKISFQPAVAGIKGDKADKASASAPAPASATEILLTPAREEQPPQHRSKRGGSVGGVCYLSMGMVVLLMGLVFASVYIYRYFFLAQLARDNFFRCGVLYEDSLSSQVRTQMELEEDVKIYLDENYERINVPVPQFGGGDPADIIHDFQRGLTAYHDISLDKCYVIELNTTIVLPPRNFW

SEQ ID NO: 49939 - protein, 612 aa, Homo sapiens
MAAAGRLPSSWALFSPLLAGLALLGVGPVPARALHNVTAELFGAEAWGTLAAFGDLNSDKQTDLFVLRERNDLIVFLADQNAPYFKPKVKVSFKNHSALITSVVPGDYDGDSQMDVLLTYLPKNYAKSELGAVIFWGQNQTLDPNNMTILNRTFQDEPLIMDFNGDLIPDIFGITNESNQPQILLGGNLSWHPALTTTSKMRIPHSHAFIDLTEDFTADLFLTTLNATTSTFQFEIWENLDGNFSVSTILEKPQNMMVVGQSAFADFDGDGHMDHLLPGCEDKNCQKSTIYLVRSGMKQWVPVLQDFSNKGTLWGFVPFVDEQQPTEIPIPITLHIGDYNMDGYPDALVILKNTSGSNQQAFLLENVPCNNASCEEARRMFKVYWELTDLNQIKDAMVATFFDIYEDGILDIVVLSKGYTKNDFAIHTLKNNFEADAYFVKVIVLSGLCSNDCPRKITPFGVNQPGPYIMYTTVDANGYLKNGSAGQLSQSAHLALQLPYNVLGLGRSANFLDHLYVGIPRPSGEKSIRKQEWTAIIPNSQLIVIPYPHNVPRSWSAKLYLTPSNIVLLTAIALIGVCVFILAIIGILHWQEKKADDREKRQEAHRFHFDAM

SEQ ID NO: 49940 - protein, 272 aa, Homo sapiens
MDGYPDALVILKNTSGSNQQAFLLENVPCNNASCEEARRMFKVYWELTDLNQIKDAMVATFFDIYEDGILDIVVLSKGYTKNDFAIHTLKNNFEADAYFVKVIVLSGLCSNDCPRKITPFGVNQPGPYIMYTTVDANGYLKNGSAGQLSQSAHLALQLPYNVLGLGRSANFLDHLYVGIPRPSGEKSIRKQEWTAIIPNSQLIVIPYPHNVPRSWSAKLYLTPSNIVLLTAIALIGVCVFILAIIGILHWQEKKADDREKRQEAHRFHFDAM

SEQ ID NO: 49941 - protein, 357 aa, Homo sapiens
MMVVGQSAFADFDGDGHMDHLLPGCEDKNCQKSTIYLVRSGMKQWVPVLQDFSNKGTLWGFVPFVDEQQPTEIPIPITLHIGDYNMDGYPDALVILKNTSGSNQQAFLLENVPCNNASCEEARRMFKVYWELTDLNQIKDAMVATFFDIYEDGILDIVVLSKGYTKNDFAIHTLKNNFEADAYFVKVIVLSGLCSNDCPRKITPFGVNQPGPYIMYTTVDANGYLKNGSAGQLSQSAHLALQLPYNVLGLGRSANFLDHLYVGIPRPSGEKSIRKQEWTAIIPNSQLIVIPYPHNVPRSWSAKLYLTPSNIVLLTAIALIGVCVFILAIIGILHWQEKKADDREKRQEAHRFHFDAM

SEQ ID NO: 49942 - protein, 464 aa, Homo sapiens
MDVLLTYLPKNYAKSELGAVIFWGQNQTLDPNNMTILNRTFQDEPLIMDFNGDLIPDIFGITNESNQPQILLGGNLSWHPALTTTSKMRIPHSHAFIDLTEDFTADLFLTTLNATTSTFQFEIWENLDGNFSVSTILEKPQNMMVVGQSAFADFDGDGHMDHLLPGCEDKNCQKSTIYLVRSGMKQWVPVLQDFSNKGTLWGFVPFVDEQQPTEIPIPITLHIGDYNMDGYPDALVILKNTSGSNQQAFLLENVPCNNASCEEARRMFKVYWELTDLNQIKDAMVATFFDIYEDGILDIVVLSKGYTKNDFAIHTLKNNFEADAYFVKVIVLSGLCSNDCPRKITPFGVNQPGPYIMYTTVDANGYLKNGSAGQLSQSAHLALQLPYNVLGLGRSANFLDHLYVGIPRPSGEKSIRKQEWTAIIPNSQLIVIPYPHNVPRSSHRCLCFHLGNNWHFTLAGKESR

SEQ ID NO: 49943 - protein, 347 aa, Homo sapiens
MSLLCRNKGCGQHFDPNTNLPDSCCHHPGVPIFHDALKGWSCCRKRTVDFSEFLNIKGCTMGPHCAEKLPEAPQPEGPATSSSLQEQKPLNVIPKSAETLRRERPKSELPLKLLPLNISQALEMALEQKELDQEPGAGLDSLIRTGSSCQNPGCDAVYQGPESDATPCTYHPGAPRFHEGMKSWSCCGIQTLDFGAFLAQPGCRVGRHDWGKQLPASCRHDWHQTDSLVVVTVYGQIPLPAFNWVKASQTELHVHIVFDGNRVFQAQMKLWGVINVEQSSVFLMPSRVEISLVKADPGSWAQLEHPDALAKKARAGVVLEMDEEESDDSDDDLSWTEEEEEEEAMGE

SEQ ID NO: 49944 - protein, 329 aa, Homo sapiens
MSTDSCCHHPGVPIFHDALKGWSCCRKRTVDFSEFLNIKGCTMGPHCAEKLPEAPQPEGPATSSSLQEQKPLNVIPKSAETLRRERPKSELPLKLLPLNISQALEMALEQKELDQEPGAGLDSLIRTGSSCQNPGCDAVYQGPESDATPCTYHPGAPRFHEGMKSWSCCGIQTLDFGAFLAQPGCRVGRHDWGKQLPASCRHDWHQTDSLVVVTVYGQIPLPAFNWVKASQTELHVHIVFDGNRVFQAQMKLWGVINVEQSSVFLMPSRVEISLVKADPGSWAQLEHPDALAKKARAGVVLEMDEEESDDSDDDLSWTEEEEEEEAMGE

SEQ ID NO: 49945 - protein, 200 aa, Homo sapiens
MFRKGKKRHSSSSSQSSEISTKSKSVDSSLGGLSRSSTVASLDTDSTKSSGQSNNNSDTCAEFRIKYVGAIEKLKLSEGKGLEGPLDLINYIDVAQQDGKLPFVPPEEEFIMGVSKYGIKVSTSDQYDVLHRHALYLIIRMVCYDDGLGAGKSLLALKTTDASNEEYSLWVYQCNSLEQAQAICKVLSTAFDSVLTSEKP

SEQ ID NO: 49946 - protein, 200 aa, Homo sapiens; identical to SEQ ID NO: 49945

SEQ ID NO: 49947 - protein, 84 aa, Homo sapiens
MFRKGKKRHSSSSSQSSEISTKSKSVDSSLGGLSRSSTVASLDTDSTKSSGQSNNNSDTCAEFRIKYVGAIEKLKLSEGKGLEG

SEQ ID NO: 49948 - protein, 96 aa, Homo sapiens
MFRKGKKRHSSSSSQSSEISTKSKSVDSSLGGLSRSSTVASLDTDSTKSSGQSNNNSDTCAEFRIKYVGAIEKLKLSEGKGLEGPLDLINYIDVAQ

SEQ ID NO: 49949 - protein, 86 aa, Homo sapiens
MFRKGKKRHSSSSSQSSEISTKSKSVDSSLGGLSRSSTVASLDTDSTKSSGQSNNNSDTCAEFRIKYVGAIEKLKLSEGKGLEGPL

SEQ ID NO: 49950 - protein, 136 aa, Homo sapiens
MFRKGKKRHSSSSSQSSEISTKSKSVDSSLGGLSRSSTVASLDTDSTKSSGQSNNNSDTCAEFRIKYVGAIEKLKLSEGKGLEGPLDLINYIDVAQQDGKLPFVPPEEEFIMGVSKYGIKVSTSDQYDVLHRHALY

SEQ ID NO: 49951 - protein, 114 aa, Homo sapiens
MFRKGKKRHSSSSSQSSEISTKSKSVDSSLGGLSRSSTVASLDTDSTKSSGQSNNNSDTCAEFRIKYVGAIEKLKLSEGKGLEGPLDLINYIDVAQQDGKLPFVPPEEEFIMGV

SEQ ID NO: 49952 - protein, 65 aa, Homo sapiens
MFRKGKKRHSSSSSQSSEISTKSKSVDSSLGGLSRSSTVASLDTDSTKSSGQSNNNSDTCAEFRI

SEQ ID NO: 49953 - protein, 150 aa, Homo sapiens
MFRKGKKRHSSSSSQSSEISTKSKSVDSSLGGLSRSSTVASLDTDSTKSSGQSNNNSDTCAEFRIKYVGAIEKLKLSEGKGLEGPLDLINYIDVAQQDGKLPFVPPEEEFIMGVSKYGIKVSTSDQYEQAQAICKVLSTAFDSVLTSEKP

SEQ ID NO: 49954 - protein, 177 aa, Homo sapiens
MPVKRSLKLDGLLEENSFDPSKITRKKSVITYSPTTGTCQMSLFASPTSSEEQKHRNGLSNEKRKKLNHPSLTESKESTTKDNDEFMMLLSKVEKLSEEIMEIMQNLSSIQALEGSRELENLIGISCASHFLKREMQKTKELMTKVNKQKLFEKSTGLPHKASRHLDSYEFLKAILN

SEQ ID NO: 49955 - protein, 170 aa, Homo sapiens
MPVKRSLKLDGLLEENSFDPSKITRKKSVITYSPTTGTCQMSLFASPTSSEEQKHRNGLSNEKRKKLNHPSLTESKESTTKDNDEFMMLLSKVEKLSEEIMEIMQNLSSIQALEGSRELENLIGISCASHFLKREMQKTKELMTKVNKQKLFEKSTGLPHKGQPQMSQPL

SEQ ID NO: 49956 - protein, 216 aa, Homo sapiens
MPFAPVAQARVQWHDFRSLQHLLPAFKRFSCLSLGSSWDYSVKRSLKLDGLLEENSFDPSKITRKKSVITYSPTTGTCQMSLFASPTSSEEQKHRNGLSNEKRKKLNHPSLTESKESTTKDNDEFMMLLSKVEKLSEEIMEIMQNLSSIQALEGSRELENLIGISCASHFLKREMQKTKELMTKVNKQKLFEKSTGLPHKASRHLDSYEFLKAILN

SEQ ID NO: 49957 - protein, 1179 aa, Homo sapiens
MAPRPRARPGVAVACCWLLTVVLRCCVSFNVDVKNSMTFSGPVEDMFGYTVQQYENEEGKWVLIGSPLVGQPKNRTGDVYKCPVGRGESLPCVKLDLPVNTSIPNVTEVKENMTFGSTLVTNPNGGFLACGPLYAYRCGHLHYTTGICSDVSPTFQVVNSIAPVQECSTQLDIVIVLDGSNSIYPWDSVTAFLNDLLERMDIGPKQTQVGIVQYGENVTHEFNLNKYSSTEEVLVAAKKIVQRGGRQTMTALGIDTARKEAFTEARGARRGVKKVMVIVTDGESHDNHRLKKVIQDCEDENIQRFSIAILGSYNRGNLSTEKFVEEIKSIASEPTEKHFFNVSDELALVTIVKTLGERIFALEATADQSAASFEMEMSQTGFSAHYSQDWVMLGAVGAYDWNGTVVMQKASQIIIPRNTTFNVESTKKNEPLASYLGYTVNSATASSGDVLYIAGQPRYNHTGQVIIYRMEDGNIKILQTLSGEQIGSYFGSILTTTDIDKDSNTDILLVGAPMYMGTEKEEQGKVYVYALNQTRFEYQMSLEPIKQTCCSSRQHNSCTTENKNEPCGARFGTAIAAVKDLNLDGFNDIVIGAPLEDDHGGAVYIYHGSGKTIRKEYAQRIPSGGDGKTLKFFGQSIHGEMDLNGDGLTDVTIGGLGGAALFWSRDVAVVKVTMNFEPNKVNIQKKNCHMEGKETVCINATVCFDVKLKSKEDTIYEADLQYRVTLDSLRQISRSFFSGTQERKVQRNITVRKSECTKHSFYMLDKHDFQDSVRITLDFNLTDPENGPVLDDSLPNSVHEYIPFAKDCGNKEKCISDLSLHVATTEKDLLIVRSQNDKFNVSLTVKNTKDSAYNTRTIVHYSPNLVFSGIEAIQKDSCESNHNITCKVGYPFLRRGEMVTFKILFQFNTSYLMENVTIYLSATSDSEEPPETLSDNVVNISIPVKYEVGLQFYSSASEYHISIAANETVPEVINSTEDIGNEINIFYLIRKSGSFPMPELKLSISFPNMTSNGYPVLYPTGLSSSENANCRPHIFEDPFSINSGKKMTTSTDHLKRGTILDCNTCKFATITCNLTSSDISQVNVSLILWKPTFIKSYFSSLNLTIRGELRSENASLVLSSSNQKRELAIQISKDGLPGRVPLWVILLSAFAGLLLLMLLILALWKIGFFKRPLKKKMEK

SEQ ID NO: 49958 - protein, 1188 aa, Homo sapiens
MDLPRGLVVAWALSLWPGFTDTFNMDTRKPRVIPGSRTAFFGYTVQQHDISGNKWLVVGAPLETNGYQKTGDVYKCPVIHGNCTKLNLGRVTLSNVSERKDNMRLGLSLATNPKDNSFLACSPLWSHECGSSYYTTGMCSRVNSNFRFSKTVAPALQRCQTYMDIVIVLDGSNSIYPWVEVQHFLINILKKFYIGPGQIQVGVVQYGEDVVHEFHLNDYRSVKDVVEAASHIEQRGGTETRTAFGIEFARSEAFQKGGRKGAKKVMIVITDGESHDSPDLEKVIQQSERDNVTRYAVAVLGYYNRRGINPETFLNEIKYIASDPDDKHFFNVTDEAALKDIVDALGDRIFSLEGTNKNETSFGLEMSQTGFSSHVVEDGVLLGAVGAYDWNGAVLKETSAGKVIPLRESYLKEFPEELKNHGAYLGYTVTSVVSSRQGRVYVAGAPRFNHTGKVILFTMHNNRSLTIHQAMRGQQIGSYFGSEITSVDIDGDGVTDVLLVGAPMYFNEGRERGKVYVYELRQNLFVYNGTLKDSHSYQNARFGSSIASVRDLNQDSYNDVVVGAPLEDNHAGAIYIFHGFRGSILKTPKQRITASELATGLQYFGCSIHGQLDLNEDGLIDLAVGALGNAVILWSRPVVQINASLHFEPSKINIFHRDCKRSGRDATCLAAFLCFTPIFLAPHFQTTTVGIRYNATMDERRYTPRAHLDEGGDRFTNRAVLLSSGQELCERINFHVLDTADYVKPVTFSVEYSLEDPDHGPMLDDGWPTTLRVSVPFWNGCNEDEHCVPDLVLDARSDLPTAMEYCQRVLRKPAQDCSAYTLSFDTTVFIIESTRQRVAVEATLENRGENAYSTVLNISQSANLQFASLIQKEDSDGSIECVNEERRLQKQVCNVSYPFFRAKAKVAFRLDFEFSKSIFLHHLEIELAAGSDSNERDSTKEDNVAPLRFHLKYEADVLFTRSSSLSHYEVKPNSSLERYDGIGPPFSCIFRIQNLGLFPIHGMMMKITIPIATRSGNRLLKLRDFLTDEANTSCNIWGNSTEYRPTPVEEDLRRAPQLNHSNSDVVSINCNIRLVPNQEINFHLLGNLWLRSLKALKYKSMKIMVNAALQRQFHSPFIFREEDPSRQIVFEISKQEDWQVPIWIIVGSTLGGLLLLALLVLALWKLGFFRSARRRREPGLDPTPKVLE

SEQ ID NO: 49959 - protein, 1189 aa, Homo sapiens
MDLPRGLVVAWALSLWPGFTDTFNMDTRKPRVIPGSRTAFFGYTVQQHDISGNKWLVVGAPLETNGYQKTGDVYKCPVIHGNCTKLNLGRVTLSNVSERKDNMRLGLSLATNPKDNSFLACSPLWSHECGSSYYTTGMCSRVNSNFRFSKTVAPALQRCQTYMDIVIVLDGSNSIYPWVEVQHFLINILKKFYIGPGQIQVGVVQYGEDVVHEFHLNDYRSVKDVVEAASHIEQRGGTETRTAFGIEFARSEAFQKGGRKGAKKVMIVITDGESHDSPDLEKVIQQSERDNVTRYAVAVLGYYNRRGINPETFLNEIKYIASDPDDKHFFNVTDEAALKDIVDALGDRIFSLEGTNKNETSFGLEMSQTGFSSHVVEDGVLLGAVGAYDWNGAVLKETSAGKVIPLRESYLKEFPEELKNHGAYLGYTVTSVVSSRQGRVYVAGAPRFNHTGKVILFTMHNNRSLTIHQAMRGQQIGSYFGSEITSVDIDGDGVTDVLLVGAPMYFNEGRERGKVYVYELRQNLFVYNGTLKDSHSYQNARFGSSIASVRDLNQDSYNDVVVGAPLEDNHAGAIYIFHGFRGSILKTPKQRITASELATGLQYFGCSIHGQLDLNEDGLIDLAVGALGNAVILWSRPVVQINASLHFEPSKINIFHRDCKRSGRDATCLAAFLCFTPIFLAPHFQTTTVGIRYNATMDERRYTPRAHLDEGGDRFTNRAVLLSSGQELCERINFHVLDTADYVKPVTFSVEYSLEDPDHGPMLDDGWPTTLRVSVPFWNGCNEDEHCVPDLVLDARSDLPTAMEYCQRVLRKPAQDCSAYTLSFDTTVFIIESTRQRVAVEATLENRGENAYSTVLNISQSANLQFASLIQKEDSDGSIECVNEERRLQKQVCNVSYPFFRAKAKVAFRLDFEFSKSIFLHHLEIELAAGSDSNERDSTKEDNVAPLRFHLKYEADVLFTRSSSLSHYEVKPNSSLERYDGIGPPFSCIFRIQNLGLFPIHGMMMKITIPIATRSGNRLLKLRDFLTDEVANTSCNIWGNSTEYRPTPVEEDLRRAPQLNHSNSDVVSINCNIRLVPNQEINFHLLGNLWLRSLKALKYKSMKIMVNAALQRQFHSPFIFREEDPSRQIVFEISKQEDWQVPIWIIVGSTLGGLLLLALLVLALWKLGFFRSARRRREPGLDPTPKVLE

SEQ ID NO: 49960 - protein, 823 aa, Homo sapiens
MSQTGFSSHVVEDGVLLGAVGAYDWNGAVLKETSAGKVIPLRESYLKEFPEELKNHGAYLGYTVTSVVSSRQGRVYVAGAPRFNHTGKVILFTMHNNRSLTIHQAMRGQQIGSYFGSEITSVDIDGDGVTDVLLVGAPMYFNEGRERGKVYVYELRQNLFVYNGTLKDSHSYQNARFGSSIASVRDLNQDSYNDVVVGAPLEDNHAGAIYIFHGFRGSILKTPKQRITASELATGLQYFGCSIHGQLDLNEDGLIDLAVGALGNAVILWSRPVVQINASLHFEPSKINIFHRDCKRSGRDATCLAAFLCFTPIFLAPHFQTTTVGIRYNATMDERRYTPRAHLDEGGDRFTNRAVLLSSGQELCERINFHVLDTADYVKPVTFSVEYSLEDPDHGPMLDDGWPTTLRVSVPFWNGCNEDEHCVPDLVLDARSDLPTAMEYCQRVLRKPAQDCSAYTLSFDTTVFIIESTRQRVAVEATLENRGENAYSTVLNISQSANLQFASLIQKEDSDGSIECVNEERRLQKQVCNVSYPFFRAKAKVAFRLDFEFSKSIFLHHLEIELAAGSDSNERDSTKEDNVAPLRFHLKYEADVLFTRSSSLSHYEVKPNSSLERYDGIGPPFSCIFRIQNLGLFPIHGMMMKITIPIATRSGNRLLKLRDFLTDEANTSCNIWGNSTEYRPTPVEEDLRRAPQLNHSNSDVVSINCNIRLVPNQEINFHLLGNLWLRSLKALKYKSMKIMVNAALQRQFHSPFIFREEDPSRQIVFEISKQEDWQVPIWIIVGSTLGGLLLLALLVLALWKLGFFRSARRRREPGLDPTPKVLE

SEQ ID NO: 49961 - protein, 650 aa, Homo sapiens
MDLPRGLVVAWALSLWPGFTDTFNMDTRKPRVIPGSRTAFFGYTVQQHDISGNKWLVVGAPLETNGYQKTGDVYKCPVIHGNCTKLNLGRVTLSNVSERKDNMRLGLSLATNPKDNSFLACSPLWSHECGSSYYTTGMCSRVNSNFRFSKTVAPALQRCQTYMDIVIVLDGSNSIYPWVEVQHFLINILKKFYIGPGQIQVGVVQYGEDVVHEFHLNDYRSVKDVVEAASHIEQRGGTETRTAFGIEFARSEAFQKGGRKGAKKVMIVITDGESHDSPDLEKVIQQSERDNVTRYAVAVLGYYNRRGINPETFLNEIKYIASDPDDKHFFNVTDEAALKDIVDALGDRIFSLEGTNKNETSFGLEMSQTGFSSHVVEDGVLLGAVGAYDWNGAVLKETSAGKVIPLRESYLKEFPEELKNHGAYLGYTVTSVVSSRQGRVYVAGAPRFNHTGKVILFTMHNNRSLTIHQAMRGQQIGSYFGSEITSVDIDGDGVTDVLLVGAPMYFNEGRERGKVYVYELRQNLFVYNGTLKDSHSYQNARFGSSIASVRDLNQDSYNDVVVGAPLEDNHAGAIYIFHGFRGSILKTPKQRITASELATGLQYFGCSIHGQLDLNEDGLIDLAVGALGNAVILWTPPPKCWSEAPEETLS

SEQ ID NO: 49962 - protein, 1181 aa, Homo sapiens
MGPERTGAAPLPLLLVLALSQGILNCCLAYNVGLPEAKIFSGPSSEQFGYAVQQFINPKGNWLLVGSPWSGFPENRMGDVYKCPVDLSTATCEKLNLQTSTSIPNVTEMKTNMSLGLILTRNMGTGGFLTCGPLWAQQCGNQYYTTGVCSDISPDFQLSASFSPATQPCPSLIDVVVVCDESNSIYPWDAVKNFLEKFVQGLDIGPTKTQVGLIQYANNPRVVFNLNTYKTKEEMIVATSQTSQYGGDLTNTFGAIQYARKYAYSAASGGRRSATKVMVVVTDGESHDGSMLKAVIDQCNHDNILRFGIAVLGYLNRNALDTKNLIKEIKAIASIPTERYFFNVSDEAALLEKAGTLGEQIFSIEGTVQGGDNFQMEMSQVGFSADYSSQNDILMLGAVGAFGWSGTIVQKTSHGHLIFPKQAFDQILQDRNHSSYLGYSVAAISTGESTHFVAGAPRANYTGQIVLYSVNENGNITVIQAHRGDQIGSYFGSVLCSVDVDKDTITDVLLVGAPMYMSDLKKEEGRVYLFTIKEGILGQHQFLEGPEGIENTRFGSAIAALSDINMDGFNDVIVGSPLENQNSGAVYIYNGHQGTIRTKYSQKILGSDGAFRSHLQYFGRSLDGYGDLNGDSITDVSIGAFGQVVQLWSQSIADVAIEASFTPEKITLVNKNAQIILKLCFSAKFRPTKQNNQVAIVYNITLDADGFSSRVTSRGLFKENNERCLQKNMVVNQAQSCPEHIIYIQEPSDVVNSLDLRVDISLENPGTSPALEAYSETAKVFSIPFHKDCGEDGLCISDLVLDVRQIPAAQEQPFIVSNQNKRLTFSVTLKNKRESAYNTGIVVDFSENLFFASFSLPVDGTEVTCQVAASQKSVACDVGYPALKREQQVTFTINFDFNLQNLQNQASLSFQALSESQEENKADNLVNLKIPLLYDAEIHLTRSTNINFYEISSDGNVPSIVHSFEDVGPKFIFSLKVTTGSVPVSMATVIIHIPQYTKEKNPLMYLTGVQTDKAGDISCNADINPLKIGQTSSSVSFKSENFRHTKELNCRTASCSNVTCWLKDVHMKGEYFVNVTTRIWNGTFASSTFQTVQLTAAAEINTYNPEIYVIEDNTVTIPLMIMKPDEKAEVPTGVIIGSIIAGILLLLALVAILWKLGFFKRKYEKMTKNPDEIDETTELSS

SEQ ID NO: 49963 - protein, 815 aa, Homo sapiens
MGPERTGAAPLPLLLVLALSQGILNCCLAYNVGLPEAKIFSGPSSEQFGYAVQQFINPKGNWLLVGSPWSGFPENRMGDVYKCPVDLSTATCEKLNLQTSTSIPNVTEMKTNMSLGLILTRNMGTGGFLTCGPLWAQQCGNQYYTTGVCSDISPDFQLSASFSPATQPCPSLIDVVVVCDESNSIYPWDAVKNFLEKFVQGLDIGPTKTQVGLIQYANNPRVVFNLNTYKTKEEMIVATSQTSQYGGDLTNTFGAIQYARKYAYSAASGGRRSATKVMVVVTDGESHDGSMLKAVIDQCNHDNILRFGIAVLGYLNRNALDTKNLIKEIKAIASIPTERYFFNVSDEAALLEKAGTLGEQIFSIEGTVQGGDNFQMEMSQVGFSADYSSQNDILMLGAVGAFGWSGTIVQKTSHGHLIFPKQAFDQILQDRNHSSYLGYSVAAISTGESTHFVAGAPRANYTGQIVLYSVNENGNITVIQAHRGDQIGSYFGSVLCSVDVDKDTITDVLLVGAPMYMSDLKKEEGRVYLFTIKEGILGQHQFLEGPEGIENTRFGSAIAALSDINMDGFNDVIVGSPLENQNSGAVYIYNGHQGTIRTKYSQKILGSDGAFRSHLQYFGRSLDGYGDLNGDSITDVSIGAFGQVVQLWSQSIADVAIEASFTPEKITLVNKNAQIILKLCFSAKFRPTKQNNQVAIVYNITLDADGFSSRVTSRGLFKENNERCLQKNMVVNQAQSCPEHIIYIQEPSDVVNSLDLRVDISLENPGTSPALEAYSETAKVFSIPFHKDCGEDGLCISDLVLDVRQIPAAQLMGQK

SEQ ID NO: 49964 - protein, 641 aa, Homo sapiens
MGPERTGAAPLPLLLVLALSQGILNCCLAYNVGLPEAKIFSGPSSEQFGYAVQQFINPKGNWLLVGSPWSGFPENRMGDVYKCPVDLSTATCEKLNLQTSTSIPNVTEMKTNMSLGLILTRNMGTGGFLTCGPLWAQQCGNQYYTTGVCSDISPDFQLSASFSPATQPCPSLIDVVVVCDESNSIYPWDAVKNFLEKFVQGLDIGPTKTQVGLIQYANNPRVVFNLNTYKTKEEMIVATSQTSQYGGDLTNTFGAIQYARKYAYSAASGGRRSATKVMVVVTDGESHDGSMLKAVIDQCNHDNILRFGIAVLGYLNRNALDTKNLIKEIKAIASIPTERYFFNVSDEAALLEKAGTLGEQIFSIEGTVQGGDNFQMEMSQVGFSADYSSQNDILMLGAVGAFGWSGTIVQKTSHGHLIFPKQAFDQILQDRNHSSYLGYSVAAISTGESTHFVAGAPRANYTGQIVLYSVNENGNITVIQAHRGDQIGSYFGSVLCSVDVDKDTITDVLLVGAPMYMSDLKKEEGRVYLFTIKEGILGQHQFLEGPEGIENTRFGSAIAALSDINMDGFNDVIVGSPLENQNSGAVYIYNGHQGTIRTKYSQLLCTIISCQTCSFRKSWDPMEPLGAISSTLGGPWMAMEI

SEQ ID NO: 49965 - protein, 942 aa, Homo sapiens
MGPERTGAAPLPLLLVLALSQGILNCCLAYNVGLPEAKIFSGPSSEQFGYAVQQFINPKGNWLLVGSPWSGFPENRMGDVYKCPVDLSTATCEKLNLQTSTSIPNVTEMKTNMSLGLILTRNMGTGGFLTCGPLWAQQCGNQYYTTGVCSDISPDFQLSASFSPATQPCPSLIDVVVVCDESNSIYPWDAVKNFLEKFVQGLDIGPTKTQVGLIQYANNPRVVFNLNTYKTKEEMIVATSQTSQYGGDLTNTFGAIQYARKYAYSAASGGRRSATKVMVVVTDGESHDGSMLKAVIDQCNHDNILRFGIAVLGYLNRNALDTKNLIKEIKAIASIPTERYFFNVSDEAALLEKAGTLGEQIFSIEGTVQGGDNFQMEMSQVGFSADYSSQNDILMLGAVGAFGWSGTIVQKTSHGHLIFPKQAFDQILQDRNHSSYLGYSVAAISTGESTHFVAGAPRANYTGQIVLYSVNENGNITVIQAHRGDQIGSYFGSVLCSVDVDKDTITDVLLVGAPMYMSDLKKEEGRVYLFTIKEGILGQHQFLEGPEGIENTRFGSAIAALSDINMDGFNDVIVGSPLENQNSGAVYIYNGHQGTIRTKYSQKILGSDGAFRSHLQYFGRSLDGYGDLNGDSITDVSIGAFGQVVQLWSQSIADVAIEASFTPEKITLVNKNAQIILKLCFSAKFRPTKQNNQVAIVYNITLDADGFSSRVTSRGLFKENNERCLQKNMVVNQAQSCPEHIIYIQEPSDVVNSLDLRVDISLENPGTSPALEAYSETAKVFSIPFHKDCGEDGLCISDLVLDVRQIPAAQEQPFIVSNQNKRLTFSVTLKNKRESAYNTGIVVDFSENLFFASFSLPVDGTEVTCQVAASQKSVACDVGYPALKREQQVTFTINFDFNLQNLQNQASLSFQALSESQEENKADNLVNLKIPLLYDAEIHLTR

SEQ ID NO: 49966 - protein, 1039 aa, Homo sapiens
MARALCPLQALWLLEWVLLLLGPCAAPPAWALNLDPVQLTFYAGPNGSQFGFSLDFHKDSHGRVAIVVGAPRTLGPSQEETGGVFLCPWRAEGGQCPSLLFDLRDETRNVGSQTLQTFKARQGLGASVVSWSDVIVACAPWQHWNVLEKTEEAEKTPVGSCFLAQPESGRRAEYSPCRGNTLSRIYVENDFSWDKRYCEAGFSSVVTQAGELVLGAPGGYYFLGLLAQAPVADIFSSYRPGILLWHVSSQSLSFDSSNPEYFDGYWGYSVAVGEFDGDLNTTEYVVGAPTWSWTLGAVEILDSYYQRLHRLRGEQMASYFGHSVAVTDVNGDGRHDLLVGAPLYMESRADRKLAEVGRVYLFLQPRGPHALGAPSLLLTGTQLYGRFGSAIAPLGDLDRDGYNDIAVAAPYGGPSGRGQVLVFLGQSEGLRSRPSQVLDSPFPTGSAFGFSLRGAVDIDDNGYPDLIVGAYGANQVAVYRAQPVVKASVQLLVQDSLNPAVKSCVLPQTKTPVSCFNIQMCVGATGHNIPQKLSLNAELQLDRQKPRQGRRVLLLGSQQAGTTLNLDLGGKHSPICHTTMAFLRDEADFRDKLSPIVLSLNVSLPPTEAGMAPAVVLHGDTHVQEQTRIVLDCGEDDVCVPQLQLTASVTGSPLLVGADNVLELQMDAANEGEGAYEAELAVHLPQGAHYMRALSNVEGFERLICNQKKENETRVVLCELGNPMKKNAQIGIAMLVSVGNLEEAGESVSFQLQIRSKNSQNPNSKIVLLDVPVRAEAQVELRGNSFPASLVVAAEEGEREQNSLDSWGPKVEHTYELHNNGPGTVNGLHLSIHLPGQSQPSDLLYILDIQPQGGLQCFPQPPVNPLKVDWGLPIPSPSPIHPAHHKRDRRQIFLPEPEQPSRLQDPVLVSCDSAPCTVVQCDLQEMARGQRAMVTVLAFLWLPSLYQRPLDQFVLQSHAWFNVSSLPYAVPPLSLPRGEAQVWTQLLRALEERAIPIWWVLVGVLGGLLLLTILVLAMWKVGFFKRNRPPLEEDDEEGE

SEQ ID NO: 49967 - protein, 1005 aa, Homo sapiens
MARALCPLQALWLLEWVLLLLGPCAAPPAWALNLDPVQLTFYAGPNGSQFGFSLDFHKDSHGRVAIVVGAPRTLGPSQEETGGVFLCPWRAEGGQCPSLLFDLRDETRNVGSQTLQTFKARQGLGASVVSWSDVIVACAPWQHWNVLEKTEEAEKTPVGSCFLAQPESGRRAEYSPCRGNTLSRIYVENDFSWDKRYCEAGFSSVVTQAGELVLGAPGGYYFLGLLAQAPVADIFSSYRPGILLWHVSSQSLSFDSSNPEYFDGYWGYSVAVGEFDGDLNTTEYVVGAPTWSWTLGAVEILDSYYQRLHRLRGEQMASYFGHSVAVTDVNGDGRHDLLVGAPLYMESRADRKLAEVGRVYLFLQPRGPHALGAPSLLLTGTQLYGRFGSAIAPLGDLDRDGYNDIAVAAPYGGPSGRGQVLVFLGQSEGLRSRPSQVLDSPFPTGSAFGFSLRGAVDIDDNGYPDLIVGAYGANQVAVYRAQPVVKASVQLLVQDSLNPAVKSCVLPQTKTPVSCFNIQMCVGATGHNIPQKLSLNAELQLDRQKPRQGRRVLLLGSQQAGTTLNLDLGGKHSPICHTTMAFLRDEADFRDKLSPIVLSLNVSLPPTEAGMAPAVVLHGDTHVQEQTRIVLDCGEDDVCVPQLQLTASVTGSPLLVGADNVLELQMDAANEGEGAYEAELAVHLPQGAHYMRALSNVEGFERLICNQKKENETRVVLCELGNPMKKNAQIGIAMLVSVGNLEEAGESVSFQLQIRSKNSQNPNSKIVLLDVPVRAEAQVELRGNSFPASLVVAAEEGEREQNSLDSWGPKVEHTYELHNNGPGTVNGLHLSIHLPGQSQPSDLLYILDIQPQGGLQCFPQPPVNPLKVDWGLPIPSPSPIHPAHHKRDRRQIFLPEPEQPSRLQDPVLVSCDSAPCTVVQCDLQEMARGQRAMVTVLAFLWLPSLYQVWTQLLRALEERAIPIWWVLVGVLGGLLLLTILVLAMWKVGFFKRNRPPLEEDDEEGE

SEQ ID NO: 49968 - protein, 219 aa, Homo sapiens
MASYFGHSVAVTDVNGDGRHDLLVGAPLYMESRADRKLAEVGRVYLFLQPRGPHALGAPSLLLTGTQLYGRFGSAIAPLGDLDRDGYNDIAVAAPYGGPSGRGQVLVFLGQSEGLRSRPSQVLDSPFPTGSAFGFSLRGAVDIDDNGYPGALDCLQLEMPKKGPWTFAGSAKRHGQGLMPGLVSHYGLPEGLGETSSGGGGVGNPWEDEMRIPCPNRQF

SEQ ID NO: 49969 - protein, 1066 aa, Homo sapiens
MGPGPSRAPRAPRLMLCALALMVAAGGCVVSAFNLDTRFLVVKEAGNPGSLFGYSVALHRQTERQQRYLLLAGAPRELAVPDGYTNRTGAVYLCPLTAHKDDCERMNITVKNDPGHHIIEDMWLGVTVASQGPAGRVLVCAHRYTQVLWSGSEDQRRMVGKCYVRGNDLELDSSDDWQTYHNEMCNSNTDYLETGMCQLGTSGGFTQNTVYFGAPGAYNWKGNSYMIQRKEWDLSEYSYKDPEDQGNLYIGYTMQVGSFILHPKNITIVTGAPRHRHMGAVFLLSQEAGGDLRRRQVLEGSQVGAYFGSAIALADLNNDGWQDLLVGAPYYFERKEEVGGAIYVFMNQAGTSFPAHPSLLLHGPSGSAFGLSVASIGDINQDGFQDIAVGAPFEGLGKVYIYHSSSKGLLRQPQQVIHGEKLGLPGLATFGYSLSGQMDVDENFYPDLLVGSLSDHIVLLRARPVINIVHKTLVPRPAVLDPALCTATSCVQVELCFAYNQSAGNPNYRRNITLAYTLEADRDRRPPRLRFAGSESAVFHGFFSMPEMRCQKLELLLMDNLRDKLRPIIISMNYSLPLRMPDRPRLGLRSLDAYPILNQAQALENHTEVQFQKECGPDNKCESNLQMRAAFVSEQQQKLSRLQYSRDVRKLLLSINVTNTRTSERSGEDAHEALLTLVVPPALLLSSVRPPGACQANETIFCELGNPFKRNQRMELLIAFEVIGVTLHTRDLQVQLQLSTSSHQDNLWPMILTLLVDYTLQTSLSMVNHRLQSFFGGTVMGESGMKTVEDVGSPLKYEFQVGPMGEGLVGLGTLVLGLEWPYEVSNGKWLLYPTEITVHGNGSWPCRPPGDLINPLNLTLSDPGDRPSSPQRRRRQLDPGGGQGPPPVTLAAAKKAKSETVLTCATGRAHCVWLECPIPDAPVVTNVTVKARVWNSTFIEDYRDFDRVRVNGWATLFLRTSIPTINMENKTTWFSVDIDSELVEELPAEIELWLVLVAVGAGLLLLGLIILLLWKCDFFKRTRYYQIMPKYHAVRIREEERYPPPGSTLPTKKHWVTSWQTRDQYY

SEQ ID NO: 49970 - protein, 1051 aa, Homo sapiens
MGPGPSRAPRAPRLMLCALALMVAAGGCVVSAFNLDTRFLVVKEAGNPGSLFGYSVALHRQTERQQRYLLLAGAPRELAVPDGYTNRTGAVYLCPLTAHKDDCERMNITVKNDPGHHIIEDMWLGVTVASQGPAGRVLVCAHRYTQVLWSGSEDQRRMVGKCYVRGNDLELDSSDDWQTYHNEMCNSNTDYLETGMCQLGTSGGFTQNTVYFGAPGAYNWKGNSYMIQRKEWDLSEYSYKDPEDQGNLYIGYTMQVGSFILHPKNITIVTGAPRHRHMGAVFLLSQEAGGDLRRRQVLEGSQVGAYFGSAIALADLNNDGWQDLLVGAPYYFERKEEVGGAIYVFMNQAGTSFPAHPSLLLHGPSGSAFGLSVASIGDINQDGFQDIAVGAPFEGLGKVYIYHSSSKGLLRQPQQVIHGEKLGLPGLATFGYSLSGQMDVDENFYPDLLVGSLSDHIVLLRARPVINIVHKTLVPRPAVLDPALCTATSCVQVELCFAYNQSAGNPNYRRNITLAYTLEADRDRRPPRLRFAGSESAVFHGFFSMPEMRCQKLELLLMDNLRDKLRPIIISMNYSLPLRMPDRPRLGLRSLDAYPILNQAQALENHTEVQFQKECGPDNKCESNLQMRAAFVSEQQQKLSRLQYSRDVRKLLLSINVTNTRTSERSGEDAHEALLTLVVPPALLLSSVRPPGACQANETIFCELGNPFKRNQRMELLIAFEVIGVTLHTRDLQVQLQLSTSSHQDNLWPMILTLLVDYTLQTSLSMVNHRLQSFFGGTVMGESGMKTVEDVGSPLKYEFQVGPMGEGLVGLGTLVLGLEWPYEVSNGKWLLYPTEITVHGNGSWPCRPPGDLINPLNLTLSDPGDRPSSPQRRRRQLDPGGGQGPPPVTLAAAKKAKSETVLTCATGRAHCVWLECPIPDAPVVTNVTVKARVWNSTFIEDYRDFDRVRVNGWATLFLRTSIPTINMENKTTWFSVDIDSELVEELPAEIELWLVLVAVGAGLLLLGLIILLLWKCGFFKRARTRALYEAKRQKAEMKSQPSETERLTDDY

SEQ ID NO: 49971 - protein, 1037 aa, Homo sapiens
MLCALALMVAAGGCVVSAFNLDTRFLVVKEAGNPGSLFGYSVALHRQTERQQRYLLLAGAPRELAVPDGYTNRTGAVYLCPLTAHKDDCERMNITVKNDPGHHIIEDMWLGVTVASQGPAGRVLVCAHRYTQVLWSGSEDQRRMVGKCYVRGNDLELDSSDDWQTYHNEMCNSNTDYLETGMCQLGTSGGFTQNTVYFGAPGAYNWKGNSYMIQRKEWDLSEYSYKDPEDQGNLYIGYTMQVGSFILHPKNITIVTGAPRHRHMGAVFLLSQEAGGDLRRRQVLEGSQVGAYFGSAIALADLNNDGWQDLLVGAPYYFERKEEVGGAIYVFMNQAGTSFPAHPSLLLHGPSGSAFGLSVASIGDINQDGFQDIAVGAPFEGLGKVYIYHSSSKGLLRQPQQVIHGEKLGLPGLATFGYSLSGQMDVDENFYPDLLVGSLSDHIVLLRARPVINIVHKTLVPRPAVLDPALCTATSCVQVELCFAYNQSAGNPNYRRNITLAYTLEADRDRRPPRLRFAGSESAVFHGFFSMPEMRCQKLELLLMDNLRDKLRPIIISMNYSLPLRMPDRPRLGLRSLDAYPILNQAQALENHTEVQFQKECGPDNKCESNLQMRAAFVSEQQQKLSRLQYSRDVRKLLLSINVTNTRTSERSGEDAHEALLTLVVPPALLLSSVRPPGACQANETIFCELGNPFKRNQRMELLIAFEVIGVTLHTRDLQVQLQLSTSSHQDNLWPMILTLLVDYTLQTSLSMVNHRLQSFFGGTVMGESGMKTVEDVGSPLKYEFQVGPMGEGLVGLGTLVLGLEWPYEVSNGKWLLYPTEITVHGNGSWPCRPPGDLINPLNLTLSDPGDRPSSPQRRRRQLDPGGGQGPPPVTLAAAKKAKSETVLTCATGRAHCVWLECPIPDAPVVTNVTVKARVWNSTFIEDYRDFDRVRVNGWATLFLRTSIPTINMENKTTWFSVDIDSELVEELPAEIELWLVLVAVGAGLLLLGLIILLLWKCGFFKRARTRALYEAKRQKAEMKSQPSETERLTDDY

SEQ ID NO: 49972 - protein, 294 aa, Homo sapiens
MIQRKEWDLSEYSYKDPEDQGNLYIGYTMQVGSFILHPKNITIVTGAPRHRHMGAVFLLSQEAGGDLRRRQVLEGSQVGAYFGSAIALADLNNDGWQDLLVGAPYYFERKEEVGGAIYVFMNQAGTSFPAHPSLLLHGPSGSAFGLSVASIGDINQDGFQDIAVGAPFEGLGKVYIYHSSSKGLLRQPQQVIHGEKLGLPGLATFGYSLSGQMDVDENFYPDLLVGSLSDHIVLLRARPVINIVHKTLVPRPAVLDPALCTATSCVQVELCFAYNQSAGNPNYRRNISECWGAA

SEQ ID NO: 49973 - protein, 1035 aa, Homo sapiens
MGGPAAPRGAGRLRALLLALVVAGIPAGAYNLDPQRPVHFQGPADSFFGYAVLEHFHDNTRWVLVGAPKADSKYSPSVKSPGAVFKCRVHTNPDRRCTELDMARGKNRGTSCGKTCREDRDDEWMGVSLARQPKADGRVLACAHRWKNIYYEADHILPHGFCYIIPSNLQAKGRTLIPCYEEYKKKYGEEHGSCQAGIAGFFTEELVVMGAPGSFYWAGTIKVLNLTDNTYLKLNDEVIMNRRYTYLGYAVTAGHFSHPSTIDVVGGAPQDKGIGKVYIFRADRRSGTLIKIFQASGKKMGSYFGSSLCAVDLNGDGLSDLLVGAPMFSEIRDEGQVTVYINRGNGALEEQLALTGDGAYNAHFGESIASLDDLDNDGFPDVAIGAPKEDDFAGAVYIYHGDAGGIVPQYSMKLSGQKINPVLRMFGQSISGGIDMDGNGYPDVTVGAFMSDSVVLLRARPVITVDVSIFLPGSINITAPQCHDGQQPVNCLNVTTCFSFHGKHVPGEIGLNYVLMADVAKKEKGQMPRVYFVLLGETMGQVTEKLQLTYMEETCRHYVAHVKRRVQDVISPIVFEAAYSLSEHVTGEEERELPPLTPVLRWKKGQKIAQKNQTVFERNCRSEDCAADLQLQGKLLLSSMDEKTLYLALGAVKNISLNISISNLGDDAYDANVSFNVSRELFFINMWQKEEMGISCELLESDFLKCSVGFPFMRSKSKYEFSVIFDTSHLSGEEEVLSFIVTAQSGNTERSESLHDNTLVLMVPLMHEVDTSITGIMSPTSFVYGESVDAANFIQLDDLECHFQPINITLQVYNTGPSTLPGSSVSISFPNRLSSGGAEMFHVQEMVVGQEKGNCSFQKNPTPCIIPQEQENIFHTIFAFFTKSGRKVLDCEKPGISCLTAHCNFSALAKEESRTIDIYMLLNTEILKKDSSSVIQFMSRAKVKVDPALRVVEIAHGNPEEVTVVFEALHNLEPRGYVVGWIIAISLLVGILIFLLLAVLLWKMGFFRRRYKEIIEAEKNRKENEDSWDWVQKNQ

SEQ ID NO: 49974 - protein, 231 aa, Homo sapiens [sequence omitted]

SEQ ID NO: 49975 - protein, 1161 aa, Homo sapiens
MTFGTVLLLSVLASYHGFNLDVEEPTIFQEDAGGFGQSVVQFGGSRLVVGAPLEVVAANQTGRLYDCAAATGMCQPIPLHIRPEAVNMSLGLTLAASTNGSRLLACGPTLHRVCGENSYSKGSCLLLGSRWEIIQTVPDATPECPHQEMDIVFLIDGSGSIDQNDFNQMKGFVQAVMGQFEGTDTLFALMQYSNLLKIHFTFTQFRTSPSQQSLVDPIVQLKGLTFTATGILTVVTQLFHHKNGARKSAKKILIVITDGQKYKDPLEYSDVIPQAEKAGIIRYAIGVGHAFQGPTARQELNTISSAPPQDHVFKVDNFAALGSIQKQLQEKIYAVEGTQSRASSSFQHEMSQEGFSTALTMDGLFLGAVGSFSWSGGAFLYPPNMSPTFINMSQENVDMRDSYLGYSTELALWKGVQNLVLGAPRYQHTGKAVIFTQVSRQWRKKAEVTGTQIGSYFGASLCSVDVDSDGSTDLILIGAPHYYEQTRGGQVSVCPLPRGRVQWQCDAVLRGEQGHPWGRFGAALTVLGDVNEDKLIDVAIGAPGEQENRGAVYLFHGASESGISPSHSQRIASSQLSPRLQYFGQALSGGQDLTQDGLMDLAVGARGQVLLLRSLPVLKVGVAMRFSPVEVAKAVYRCWEEKPSALEAGDATVCLTIQKSSLDQLGDIQSSVRFDLALDPGRLTSRAIFNETKNPTLTRRKTLGLGIHCETLKLLLPDCVEDVVSPIILHLNFSLVREPIPSPQNLRPVLAVGSQDLFTASLPFEKNCGQDGLCEGDLGVTLSFSGLQTLTVGSSLELNVIVTVWNAGEDSYGTVVSLYYPAGLSHRRVSGAQKQPHQSALRLACETVPTEDEGLRSSRCSVNHPIFHEGSNGTFIVTFDVSYKATLGDRMLMRASASSENNKASSSKATFQLELPVKYAVYTMISRQEESTKYFNFATSDEKKMKEAEHRYRVNNLSQRDLAISINFWVPVLLNGVAVWDVVMEAPSQSLPCVSERKPPQHSDFLTQISRSPMLDCSIADCLQFRCDVPSFSVQEELDFTLKGNLSFGWVRETLQKKVLVVSVAEITFDTSVYSQLPGQEAFMRAQMEMVLEEDEVYNAIPIIMGSSVGALLLLALITATLYKLGFFKRHYKEMLEDKPEDTATFSGDDFSCVAPNVPLS

SEQ ID NO: 49976 - protein, 1177 aa, Homo sapiens
CALSPTFHFPSTRCSGMTFGTVLLLSVLASYHGFNLDVEEPTIFQEDAGGFGQSVVQFGGSRLVVGAPLEVVAANQTGRLYDCAAATGMCQPIPLHIRPEAVNMSLGLTLAASTNGSRLLACGPTLHRVCGENSYSKGSCLLLGSRWEIIQTVPDATPECPHQEMDIVFLIDGSGSIDQNDFNQMKGFVQAVMGQFEGTDTLFALMQYSNLLKIHFTFTQFRTSPSQQSLVDPIVQLKGLTFTATGILTVVTQLFHHKNGARKSAKKILIVITDGQKYKDPLEYSDVIPQAEKAGIIRYAIGVGHAFQGPTARQELNTISSAPPQDHVFKVDNFAALGSIQKQLQEKIYAVEGTQSRASSSFQHEMSQEGFSTALTMDGLFLGAVGSFSWSGGAFLYPPNMSPTFINMSQENVDMRDSYLGYSTELALWKGVQNLVLGAPRYQHTGKAVIFTQVSRQWRKKAEVTGTQIGSYFGASLCSVDVDSDGSTDLILIGAPHYYEQTRGGQVSVCPLPRGRVQWQCDAVLRGEQGHPWGRFGAALTVLGDVNEDKLIDVAIGAPGEQENRGAVYLFHGASESGISPSHSQRIASSQLSPRLQYFGQALSGGQDLTQDGLMDLAVGARGQVLLLRSLPVLKVGVAMRFSPVEVAKAVYRCWEEKPSALEAGDATVCLTIQKSSLDQLGDIQSSVRFDLALDPGRLTSRAIFNETKNPTLTRRKTLGLGIHCETLKLLLPDCVEDVVSPIILHLNFSLVREPIPSPQNLRPVLAVGSQDLFTASLPFEKNCGQDGLCEGDLGVTLSFSGLQTLTVGSSLELNVIVTVWNAGEDSYGTVVSLYYPAGLSHRRVSGAQKQPHQSALRLACETVPTEDEGLRSSRCSVNHPIFHEGSNGTFIVTFDVSYKATLGDRMLMRASASSENNKASSSKATFQLELPVKYAVYTMISRQEESTKYFNFATSDEKKMKEAEHRYRVNNLSQRDLAISINFWVPVLLNGVAVWDVVMEAPSQSLPCVSERKPPQHSDFLTQISRSPMLDCSIADCLQFRCDVPSFSVQEELDFTLKGNLSFGWVRETLQKKVLVVSVAEITFDTSVYSQLPGQEAFMRAQMEMVLEEDEVYNAIPIIMGSSVGALLLLALITATLYKLGFFKRHYKEMLEDKPEDTATFSGDDFSCVAPNVPLS

SEQ ID NO: 49977 - protein, 1170 aa, Homo sapiens
MKDSCITVMAMALLSGFFFFAPASSYNLDVRGARSFSPPRAGRHFGYRVLQVGNGVIVGAPGEGNSTGSLYQCQSGTGHCLPVTLRGSNYTSKYLGMTLATDPTDGSILACDPGLSRTCDQNTYLSGLCYLFRQNLQGPMLQGRPGFQECIKGNVDLVFLFDGSMSLQPDEFQKILDFMKDVMKKLSNTSYQFAAVQFSTSYKTEFDFSDYVKRKDPDALLKHVKHMLLLTNTFGAINYVATEVFREELGARPDATKVLIIITDGEATDSGNIDAAKDIIRYIIGIGKHFQTKESQETLHKFASKPASEFVKILDTFEKLKDLFTELQKKIYVIEGTSKQDLTSFNMELSSSGISADLSRGHAVVGAVGAKDWAGGFLDLKADLQDDTFIGNEPLTPEVRAGYLGYTVTWLPSRQKTSLLASGAPRYQHMGRVLLFQEPQGGGHWSQVQTIHGTQIGSYFGGELCGVDVDQDGETELLLIGAPLFYGEQRGGRVFIYQRRQLGFEEVSELQGDPGYPLGRFGEAITALTDINGDGLVDVAVGAPLEEQGAVYIFNGRHGGLSPQPSQRIEGTQVLSGIQWFGRSIHGVKDLEGDGLADVAVGAESQMIVLSSRPVVDMVTLMSFSPAEIPVHEVECSYSTSNKMKEGVNITICFQIKSLIPQFQGRLVANLTYTLQLDGHRTRRRGLFPGGRHELRRNIAVTTSMSCTDFSFHFPVCVQDLISPINVSLNFSLWEEEGTPRDQRAQGKDIPPILRPSLHSETWEIPFEKNCGEDKKCEANLRVSFSPARSRALRLTAFASLSVELSLSNLEEDAYWVQLDLHFPPGLSFRKVEMLKPHSQIPVSCEELPEESRLLSRALSCNVSSPIFKAGHSVALQMMFNTLVNSSWGDSVELHANVTCNNEDSDLLEDNSATTIIPILYPINILIQDQEDSTLYVSFTPKGPKIHQVKHMYQVRIQPSIHDHNIPTLEAVVGVPQPPSEGPITHQWSVQMEPPVPCHYEDLERLPDAAEPCLPGALFRCPVVFRQEILVQVIGTLELVGEIEASSMFSLCSSLSISFNSSKHFHLYGSNASLAQVVMKVDVVYEKQMLYLYVLSGIGGLLLLLLIFIVLYKVGFFKRNLKEKMEAGRGVPNGIPAEDSEQLASGQEAGDPGCLKPLHEKDSESGGGKD

SEQ ID NO: 49978 - protein, 1086 aa, Homo sapiens
MKDSCITVMAMALLSGFFFFAPASSYNLDVRGARSFSPPRAGRHFGYRVLQVGNGVIVGAPGEGNSTGSLYQCQSGTGHCLPVTLRGSNYTSKYLGMTLATDPTDGSILFAAVQFSTSYKTEFDFSDYVKRKDPDALLKHVKHMLLLTNTFGAINYVATEVFREELGARPDATKVLIIITDGEATDSGNIDAAKDIIRYIIGIGKHFQTKESQETLHKFASKPASEFVKILDTFEKLKDLFTELQKKIYVIEGTSKQDLTSFNMELSSSGISADLSRGHAVVGAVGAKDWAGGFLDLKADLQDDTFIGNEPLTPEVRAGYLGYTVTWLPSRQKTSLLASGAPRYQHMGRVLLFQEPQGGGHWSQVQTIHGTQIGSYFGGELCGVDVDQDGETELLLIGAPLFYGEQRGGRVFIYQRRQLGFEEVSELQGDPGYPLGRFGEAITALTDINGDGLVDVAVGAPLEEQGAVYIFNGRHGGLSPQPSQRIEGTQVLSGIQWFGRSIHGVKDLEGDGLADVAVGAESQMIVLSSRPVVDMVTLMSFSPAEIPVHEVECSYSTSNKMKEGVNITICFQIKSLIPQFQGRLVANLTYTLQLDGHRTRRRGLFPGGRHELRRNIAVTTSMSCTDFSFHFPVCVQDLISPINVSLNFSLWEEEGTPRDQRAGKDIPPILRPSLHSETWEIPFEKNCGEDKKCEANLRVSFSPARSRALRLTAFASLSVELSLSNLEEDAYWVQLDLHFPPGLSFRKVEMLKPHSQIPVSCEELPEESRLLSRALSCNVSSPIFKAGHSVALQMMFNTLVNSSWGDSVELHANVTCNNEDSDLLEDNSATTIIPILYPINILIQDQEDSTLYVSFTPKGPKIHQVKHMYQVRIQPSIHDHNIPTLEAVVGVPQPPSEGPITHQWSVQMEPPVPCHYEDLERLPDAAEPCLPGALFRCPVVFRQEILVQVIGTLELVGEIEASSMFSLCSSLSISFNSSKHFHLYGSNASLAQVVMKVDVVYEKQMLYLYVLSGIGGLLLLLLIFIVLYKVGFFKRNLKEKMEAGRGVPNGIPAEDSEQLASGQEAGDPGCLKPLHEKDSESGGGKD

SEQ ID NO: 49979 - protein, 404 aa, Homo sapiens
MKDSCITVMAMALLSGFFFFAPASSYNLDVRGARSFSPPRAGRHFGYRVLQIKSLIPQFQGRLVANLTYTLQLDGHRTRRRGLFPGGRHELRRNIAVTTSMSCTDFSFHFPMMFNTLVNSSWGDSVELHANVTCNNEDSDLLEDNSATTIIPILYPINILIQDQEDSTLYVSFTPKGPKIHQVKHMYQVRIQPSIHDHNIPTLEAVVGVPQPPSEGPITHQWSVQMEPPVPCHYEDLERLPDAAEPCLPGALFRCPVVFRQEILVQVIGTLELVGEIEASSMFSLCSSLSISFNSSKHFHLYGSNASLAQVVMKVDVVYEKQMLYLYVLSGIGGLLLLLLIFIVLYKVGFFKRNLKEKMEAGRGVPNGIPAEDSEQLASGQEAGDPGCLKPLHEKDSESGGGKD

SEQ ID NO: 49980 - protein, 162 aa, Homo sapiens
MKDSCITVMAMALLSGFFFFAPASSYNLDVRGARSFSPPRAGRHFGYRVLQVGNGVIVGAPGEGNSTGSLYQCQSGTGHCLPVTLRGSNYTSKYLGMTLATDPTDGSILACDPGLSRTCDQNTYLSGLCYLFRQNLQGPMLQGRPGFQVCCCSVFHKLQNRI

SEQ ID NO: 49981 - protein, 1152 aa, Homo sapiens
MALRVLLLTALTLCHGFNLDTENAMTFQENARGFGQSVVQLQGSRVVVGAPQEIVAANQRGSLYQCDYSTGSCEPIRLQVPVEAVNMSLGLSLAATTSPPQLLACGPTVHQTCSENTYVKGLCFLFGSNLRQQPQKFPEALRGCPQEDSDIAFLIDGSGSIIPHDFRRMKEFVSTVMEQLKKSKTLFSLMQYSEEFRIHFTFKEFQNNPNPRSLVKPITQLLGRTHTATGIRKVVRELFNITNGARKNAFKILVVITDGEKFGDPLGYEDVIPEADREGVIRYVIGVGDAFRSEKSRQELNTIASKPPRDHVFQVNNFEALKTIQNQLREKIFAIEGTQTGSSSSFEHEMSQEGFSAAITSNGPLLSTVGSYDWAGGVFLYTSKEKSTFINMTRVDSDMNDAYLGYAAAIILRNRVQSLVLGAPRYQHIGLVAMFRQNTGMWESNANVKGTQIGAYFGASLCSVDVDSNGSTDLVLIGAPHYYEQTRGGQVSVCPLPRGRARWQCDAVLYGEQGQPWGRFGAALTVLGDVNGDKLTDVAIGAPGEEDNRGAVYLFHGTSGSGISPSHSQRIAGSKLSPRLQYFGQSLSGGQDLTMDGLVDLTVGAQGHVLLLRSQPVLRVKAIMEFNPREVARNVFECNDQVVKGKEAGEVRVCLHVQKSTRDRLREGQIQSVVTYDLALDSGRPHSRAVFNETKNSTRRQTQVLGLTQTCETLKLQLPNCIEDPVSPIVLRLNFSLVGTPLSAFGNLRPVLAEDAQRLFTALFPFEKNCGNDNICQDDLSITFSFMSLDCLVVGGPREFNVTVTVRNDGEDSYRTQVTFFFPLDLSYRKVSTLQNQRSQRSWRLACESASSTEVSGALKSTSCSINHPIFPENSEVTFNITFDVDSKASLGNKLLLKANVTSENNMPRTNKTEFQLELPVKYAVYMVVTSHGVSTKYLNFTASENTSRVMQHQYQVSNLGQRSLPISLVFLVPVRLNQTVIWDRPQVTFSENLSSTCHTKERLPSHSDFLAELRKAPVVNCSIAVCQRIQCDIPFFGIQEEFNATLKGNLSFDWYIKTSHNHLLIVSTAEILFNDSVFTLLPGQGAFVRSQTETKVEPFEVPNPLPLIVGSSVGGLLLLALITAALYKLGFFKRQYKDMMSEGGPPGAEPQ

SEQ ID NO: 49982 - protein, 1153 aa, Homo sapiens
MALRVLLLTALTLCHGFNLDTENAMTFQENARGFGQSVVQLQGSRVVVGAPQEIVAANQRGSLYQCDYSTGSCEPIRLQVPVEAVNMSLGLSLAATTSPPQLLACGPTVHQTCSENTYVKGLCFLFGSNLRQQPQKFPEALRGCPQEDSDIAFLIDGSGSIIPHDFRRMKEFVSTVMEQLKKSKTLFSLMQYSEEFRIHFTFKEFQNNPNPRSLVKPITQLLGRTHTATGIRKVVRELFNITNGARKNAFKILVVITDGEKFGDPLGYEDVIPEADREGVIRYVIGVGDAFRSEKSRQELNTIASKPPRDHVFQVNNFEALKTIQNQLREKIFAIEGTQTGSSSSFEHEMSQEGFSAAITSNGPLLSTVGSYDWAGGVFLYTSKEKSTFINMTRVDSDMNDAYLGYAAAIILRNRVQSLVLGAPRYQHIGLVAMFRQNTGMWESNANVKGTQIGAYFGASLCSVDVDSNGSTDLVLIGAPHYYEQTRGGQVSVCPLPRGQRARWQCDAVLYGEQGQPWGRFGAALTVLGDVNGDKLTDVAIGAPGEEDNRGAVYLFHGTSGSGISPSHSQRIAGSKLSPRLQYFGQSLSGGQDLTMDGLVDLTVGAQGHVLLLRSQPVLRVKAIMEFNPREVARNVFECNDQVVKGKEAGEVRVCLHVQKSTRDRLREGQIQSVVTYDLALDSGRPHSRAVFNETKNSTRRQTQVLGLTQTCETLKLQLPNCIEDPVSPIVLRLNFSLVGTPLSAFGNLRPVLAEDAQRLFTALFPFEKNCGNDNICQDDLSITFSFMSLDCLVVGGPREFNVTVTVRNDGEDSYRTQVTFFFPLDLSYRKVSTLQNQRSQRSWRLACESASSTEVSGALKSTSCSINHPIFPENSEVTFNITFDVDSKASLGNKLLLKANVTSENNMPRTNKTEFQLELPVKYAVYMVVTSHGVSTKYLNFTASENTSRVMQHQYQVSNLGQRSLPISLVFLVPVRLNQTVIWDRPQVTFSENLSSTCHTKERLPSHSDFLAELRKAPVVNCSIAVCQRIQCDIPFFGIQEEFNATLKGNLSFDWYIKTSHNHLLIVSTAEILFNDSVFTLLPGQGAFVRSQTETKVEPFEVPNPLPLIVGSSVGGLLLLALITAALYKLGFFKRQYKDMMSEGGPPGAEPQ

SEQ ID NO: 49983 - protein, 1163 aa, Homo sapiens
MTRTRAALLLFTALATSLGFNLDTEELTAFRVDSAGFGDSVVQYANSWVVVGAPQKITAANQTGGLYQCGYSTGACEPIGLQVPPEAVNMSLGLSLASTTSPSQLLACGPTVHHECGRNMYLTGLCFLLGPTQLTQRLPVSRQECPRQEQDIVFLIDGSGSISSRNFATMMNFVRAVISQFQRPSTQFSLMQFSNKFQTHFTFEEFRRSSNPLSLLASVHQLQGFTYTATAIQNVVHRLFHASYGARRDAAKILIVITDGKKEGDSLDYKDVIPMADAAGIIRYAIGVGLAFQNRNSWKELNDIASKPSQEHIFKVEDFDALKDIQNQLKEKIFAIEGTETTSSSSFELEMAQEGFSAVFTPDGPVLGAVGSFTWSGGAFLYPPNMSPTFINMSQENVDMRDSYLGYSTELALWKGVQSLVLGAPRYQHTGKAVIFTQVSRQWRMKAEVTGTQIGSYFGASLCSVDVDSDGSTDLVLIGAPHYYEQTRGGQVSVCPLPRGWRRWWCDAVLYGEQGHPWGRFGAALTVLGDVNGDKLTDVVIGAPGEEENRGAVYLFHGVLGPSISPSHSQRIAGSQLSSRLQYFGQALSGGQDLTQDGLVDLAVGARGQVLLLRTRPVLWVGVSMQFIPAEIPRSAFECREQVVSEQTLVQSNICLYIDKRSKNLLGSRDLQSSVTLDLALDPGRLSPRATFQETKNRSLSRVRVLGLKAHCENFNLLLPSCVEDSVTPITLRLNFTLVGKPLLAFRNLRPMLAADAQRYFTASLPFEKNCGADHICQDNLGISFSFPGLKSLLVGSNLELNAEVMVWNDGEDSYGTTITFSHPAGLSYRYVAEGQKQGQLRSLHLTCDSAPVGSQGTWSTSCRINHLIFRGGAQITFLATFDVSPKAVLGDRLLLTANVSSENNTPRTSKTTFQLELPVKYAVYTVVSSHEQFTKYLNFSESEEKESHVAMHRYQVNNLGQRDLPVSINFWVPVELNQEAVWMDVEVSHPQNPSLRCSSEKIAPPASDFLAHIQKNPVLDCSIAGCLRFRCDVPSFSVQEELDFTLKGNLSFGWVRQILQKKVSVVSVAEITFDTSVYSQLPGQEAFMRAQTTTVLEKYKVHNPTPLIVGSSIGGLLLLALITAVLYKVGFFKRQYKEMMEEANGQIAPENGTQTPSPPSEK

SEQ ID NO: 49984 - protein, 1822 aa, Homo sapiens
MAGPRPSPWARLLLAALISVSLSGTLANRCKKAPVKSCTECVRVDKDCAYCTDEMFRDRRCNTQAELLAAGCQRESIVVMESSFQITEETQIDTTLRRSQMSPQGLRVRLRPGEERHFELEVFEPLESPVDLYILMDFSNSMSDDLDNLKKMGQNLARVLSQLTSDYTIGFGKFVDKVSVPQTDMRPEKLKEPWPNSDPPFSFKNVISLTEDVDEFRNKLQGERISGNLDAPEGGFDAILQTAVCTRDIGWRPDSTHLLVFSTESAFHYEADGANVLAGIMSRNDERCHLDTTGTYTQYRTQDYPSVPTLVRLLAKHNIIPIFAVTNYSYSYYEKLHTYFPVSSLGVLQEDSSNIVELLEEAFNRIRSNLDIRALDSPRGLRTEVTSKMFQKTRTGSFHIRRGEVGIYQVQLRALEHVDGTHVCQLPEDQKGNIHLKPSFSDGLKMDAGIICDVCTCELQKEVRSARCSFNGDFVCGQCVCSEGWSGQTCNCSTGSLSDIQPCLREGEDKPCSGRGECQCGHCVCYGEGRYEGQFCEYDNFQCPRTSGFLCNDRGRCSMGQCVCEPGWTGPSCDCPLSNATCIDSNGGICNGRGHCECGRCHCHQQSLYTDTICEINYSAIHPGLCEDLRSCVQCQAWGTGEKKGRTCEECNFKVKMVDELKRAEEVVVRCSFRDEDDDCTYSYTMEGDGAPGPNSTVLVHKKKDCPPGSFWWLIPLLLLLLPLLALLLLLCWKYCACCKACLALLPCCNRGHMVGFKEDHYMLRENLMASDHLDTPMLRSGNLKGRDVVRWKVTNNMQRPGFATHAASINPTELVPYGLSLRLARLCTENLLKPDTRECAQLRQEVEENLNEVYRQISGVHKLQQTKFRQQPNAGKKQDHTIVDTVLMAPRSAKPALLKLTEKQVEQRAFHDLKVAPGYYTLTADQDARGMVEFQEGVELVDVRVPLFIRPEDDDEKQLLVEAIDVPAGTATLGRRLVNITIIKEQARDVVSFEQPEFSVSRGDQVARIPVIRRVLDGGKSQVSYRTQDGTAQGNRDYIPVEGELLFQPGEAWKELQVKLLELQEVDSLLRGRQVRRFHVQLSNPKFGAHLGQPHSTTIIIRDPDELDRSFTSQMLSSQPPPHGDLGAPQNPNAKAAGSRKIHFNWLPPSGKPMGYRVKYWIQGDSESEAHLLDSKVPSVELTNLYPYCDYEMKVCAYGAQGEGPYSSLVSCRTHQEVPSEPGRLAFNVVSSTVTQLSWAEPAETNGEITAYEVCYGLVNDDNRPIGPMKKVLVDNPKNRMLLIENLRESQPYRYTVKARNGAGWGPEREAIINLATQPKRPMSIPIIPDIPIVDAQSGEDYDSFLMYSDDVLRSPSGSQRPSVSDDTGCGWKFEPLLGEELDLRRVTWRLPPELIPRLSASSGRSSDAEAPHGPPDDGGAGGKGGSLPRSATPGPPGEHLVNGRMDFAFPGSTNSLHRMTTTSAAAYGTHLSPHVPHRVLSTSSTLTRDYNSLTRSEHSHSTTLPRDYSTLTSVSSHDSRLTAGVPDTPTRLVFSALGPTSLRVSWQEPRCERPLQGYSVEYQLLNGGELHRLNIPNPAQTSVVVEDLLPNHSYVFRVRAQSQEGWGREREGVITIESQVHPQSPLCPLPGSAFTLSTPSAPGPLVFTALSPDSLQLSWERPRRPNGDIVGYLVTCEMAQGGGPATAFRVDGDSPESRLTVPGLSENVPYKFKVQARTTEGFGPEREGIITIESQDGGPFPQLGSRAGLFQHPLQSEYSSITTTHTSATEPFLVDGLTLGAQHLEAGGSLTRHVTQEFVSRTLTTSGTLSTHMDQQFFQT

SEQ ID NO: 49985 - protein, 1805 aa, Homo sapiens
MAGPRPSPWARLLLAALISVSLSGTLANRCKKAPVKSCTECVRVDKDCAYCTDEMFRDRRCNTQAELLAAGCQRESIVVMESSFQITEETQIDTTLRRSQMSPQGLRVRLRPGEERHFELEVFEPLESPVDLYILMDFSNSMSDDLDNLKKMGQNLARVLSQLTSDYTIGFGKFVDKVSVPQTDMRPEKLKEPWPNSDPPFSFKNVISLTEDVDEFRNKLQGERISGNLDAPEGGFDAILQTAVCTRDIGWRPDSTHLLVFSTESAFHYEADGANVLAGIMSRNDERCHLDTTGTYTQYRTQDYPSVPTLVRLLAKHNIIPIFAVTNYSYSYYEKLHTYFPVSSLGVLQEDSSNIVELLEEAFNRIRSNLDIRALDSPRGLRTEVTSKMFQKTRTGSFHIRRGEVGIYQVQLRALEHVDGTHVCQLPEDQKGNIHLKPSFSDGLKMDAGIICDVCTCELQKEVRSARCSFNGDFVCGQCVCSEGWSGQTCNCSTGSLSDIQPCLREGEDKPCSGRGECQCGHCVCYGEGRYEGQFCEYDNFQCPRTSGFLCNDRGRCSMGQCVCEPGWTGPSCDCPLSNATCIDSNGGICNGRGHCECGRCHCHQQSLYTDTICEINYSAIHPGLCEDLRSCVQCQAWGTGEKKGRTCEECNFKVKMVDELKRAEEVVVRCSFRDEDDDCTYSYTMEGDGAPGPNSTVLVHKKKDCPPGSFWWLIPLLLLLLPLLALLLLLCWKYCACCKACLALLPCCNRGHMVGFKEDHYMLRENLMASDHLDTPMLRSGNLKGRDVVRWKVTNNMQRPGFATHAASINPTELVPYGLSLRLARLCTENLLKPDTRECAQLRQEVEENLNEVYRQISGVHKLQQTKFRQQPNAGKKQDHTIVDTVLMAPRSAKPALLKLTEKQVEQRAFHDLKVAPGYYTLTADQDARGMVEFQEGVELVDVRVPLFIRPEDDDEKQLLVEAIDVPAGTATLGRRLVNITIIKEQARDVVSFEQPEFSVSRGDQVARIPVIRRVLDGGKSQVSYRTQDGTAQGNRDYIPVEGELLFQPGEAWKELQVKLLELQEVDSLLRGRQVRRFHVQLSNPKFGAHLGQPHSTTIIIRDPDELDRSFTSQMLSSQPPPHGDLGAPQNPNAKAAGSRKIHFNWLPPSGKPMGYRVKYWIQGDSESEAHLLDSKVPSVELTNLYPYCDYEMKVCAYGAQGEGPYSSLVSCRTHQEVPSEPGRLAFNVVSSTVTQLSWAEPAETNGEITAYEVCYGLVNDDNRPIGPMKKVLVDNPKNRMLLIENLRESQPYRYTVKARNGAGWGPEREAIINLATQPKRPMSIPIIPDIPIVDAQSGEDYDSFLMYSDDVLRSPSGSQRPSVSDDTEHLVNGRMDFAFPGSTNSLHRMTTTSAAAYGTHLSPHVPHRVLSTSSTLTRDYNSLTRSEHSHSTTLPRDYSTLTSVSSHGLPPIWEHGRSRLPLSWALGSRSRAQMKGFPPSRGPRDSIILAGRPAAPSWGPDSRLTAGVPDTPTRLVFSALGPTSLRVSWQEPRCERPLQGYSVEYQLLNGGELHRLNIPNPAQTSVVVEDLLPNHSYVFRVRAQSQEGWGREREGVITIESQVHPQSPLCPLPGSAFTLSTPSAPGPLVFTALSPDSLQLSWERPRRPNGDIVGYLVTCEMAQGGGPATAFRVDGDSPESRLTVPGLSENVPYKFKVQARTTEGFGPEREGIITIESQDGGPFPQLGSRAGLFQHPLQSEYSSITTTHTSATEPFLVDGLTLGAQHLEAGGSLTRHVTQEFVSRTLTTSGTLSTHMDQQFFQT

SEQ ID NO: 49986 - protein, 1805 aa, Homo sapiens; identical to SEQ ID NO: 49985

SEQ ID NO: 49987 - protein, 643 aa, Homo sapiens
GGIEETQIDTTLRRSQMSPQGLRVRLRPGEERHFELEVFEPLESPVDLYILMDFSNSMSDDLDNLKKMGQNLARVLSQLTSDYTIGFGKFVDKVSVPQTDMRPEKLKEPWPNSDPPFSFKNVISLTEDVDEFRNKLQGERISGNLDAPEGGFDAILQTAVCTRDIGWRPDSTHLLVFSTESAFHYEADGANVLAGIMSRNDERCHLDTTGTYTQYRTQDYPSVPTLVRLLAKHNIIPIFAVTNYSYSYYEKLHTYFPVSSLGVLQEDSSNIVELLEEAFNRIRSNLDIRALDSPRGLRTEVTSKMFQKTRTGSFHIRRGEVGIYQVQLRALEHVDGTHVCQLPEDQKGNIHLKPSFSDGLKMDAGIICDVCTCELQKEVRSARCSFNGDFVCGQCVCSEGWSGQTCNCSTGSLSDIQPCLREGEDKPCSGRGECQCGHCVCYGEGRYEGQFCEYDNFQCPRTSGFLCNDRGRCSMGQCVCEPGWTGPSCDCPLSNATCIDSNGGICNGRGHCECGRCHCHQQSLYTDTICEINYSAIHPGLCEDLRSCVQCQAWGTGEKKGRTCEECNFKVKMVDELKRAEEVVVRCSFRDEDDDCTYSYTMEGDGAPGPNSTVLVHKKKDCPPGSFWWLIPLLLLLLPLLAL

SEQ ID NO: 49988 - protein, 788 aa, Homo sapiens
MGIELLCLFFLFLGRNDHVQGGCALGGAETCEDCLLIGPQCAWCAQENFTHPSGVGERCDTPANLLAKGCQLNFIENPVSQVEILKNKPLSVGRQKNSSDIVQIAPQSLILKLRPGGAQTLQVHVRQTEDYPVDLYYLMDLSASMDDDLNTIKELGSRLSKEMSKLTSNFRLGFGSFVEKPVSPFVKTTPEEIANPCSSIPYFCLPTFGFKHILPLTNDAERFNEIVKNQKISANIDTPEGGFDAIMQAAVCKEKIGWRNDSLHLLVFVSDADSHFGMDSKLAGIVIPNDGLCHLDSKNEYSMSTVLEYPTIGQLIDKLVQNNVLLIFAVTQEQVHLYENYAKLIPGATVGLLQKDSGNILQLIISAYEELRSEVELEVLGDTEGLNLSFTAICNNGTLFQHQKKCSHMKVGDTASFSVTVNIPHCERRSRHIIIKPVGLGDALELLVSPECNCDCQKEVEVNSSKCHHGNGSFQCGVCACHPGHMGPRCECGEDMLSTDSCKEAPDHPSCSGRGDCYCGQCICHLSPYGNIYGPYCQCDNFSCVRHKGLLCGGNGDCDCGECVCRSGWTGEYCNCTTSTDSCVSEDGVLCSGRGDCVCGKCVCTNPGASGPTCERCPTCGDPCNSKRSCIECHLSAAGQAREECVDKCKLAGATISEEEDFSKDGSVSCSLQGENECLITFLITTDNEGKTIIHSINEKDCPKPPNIPMIMLGVSLAILLIGVVLLCIWKLLVSFHDRKEVAKFEAERSKAKWQTGTNPLYRGSTSTFKNVTYKHREKQKVDLSTDC

SEQ ID NO: 49989 - protein, 788 aa, Homo sapiens; identical to SEQ ID NO: 49988

SEQ ID NO: 49990 - protein, 798 aa, Homo sapiens
MVALPMVLVLLLVLSRGESELDAKIPSTGDATEWRNPHLSMLGSCQPAPSCQKCILSHPSCAWCKQLNFTASGEAEARRCARREELLARGCPLEELEEPRGQQEVLQDQPLSQGARGEGATQLAPQRVRVTLRPGEPQQLQVRFLRAEGYPVDLYYLMDLSYSMKDDLERVRQLGHALLVRLQEVTHSVRIGFGSFVDKTVLPFVSTVPSKLRHPCPTRLERCQSPFSFHHVLSLTGDAQAFEREVGRQSVSGNLDSPEGGFDAILQAALCQEQIGWRNVSRLLVFTSDDTFHTAGDGKLGGIFMPSDGHCHLDSNGLYSRSTEFDYPSVGQVAQALSAANIQPIFAVTSAALPVYQELSKLIPKSAVGELSEDSSNVVQLIMDAYNSLSSTVTLEHSSLPPGVHISYESQCEGPEKREGKAEDRGQCNHVRINQTVTFWVSLQATHCLPEPHLLRLRALGFSEELIVELHTLCDCNCSDTQPQAPHCSDGQGHLQCGVCSCAPGRLGRLCECSVAELSSPDLESGCRAPNGTGPLCSGKGHCQCGRCSCSGQSSGHLCECDDASCERHEGILCGGFGRCQCGVCHCHANRTGRACECSGDMDSCISPEGGLCSGHGRCKCNRCQCLDGYYGALCDQCPGCKTPCERHRDCAECGAFRTGPLATNCSTACAHTNVTLALAPILDDGWCKERTLDNQLFFFLVEDDARGTVVLRVRPQEKGADHTQAIVLGCVGGIVAVGLGLVLAYRLSVEIYDRREYSRFEKEQQQLNWKQDSNPLYKSAITTTINPRFQEADSPTL

SEQ ID NO: 49991 - protein, 650 aa, Homo sapiens
MVALPMVLVLLLVLSRGESELDAKIPSTGDATEWRNPHLSMLGSCQPAPSCQKCILSHPSCAWCKQLNFTASGEAEARRCARREELLARGCPLEELEEPRGQQEVLQDQPLSQGARGEGATQLAPQRVRVTLRPGEPQQLQVRFLRAEGYPVDLYYLMDLSYSMKDDLERVRQLGHALLVRLQEVTHSVRIGFGSFVDKTVLPFVSTVPSKLRHPCPTRLERCQSPFSFHHVLSLTGDAQAFEREVGRQSVSGNLDSPEGGFDAILQAALCQEQIGWRNVSRLLVFTSDDTFHTAGDGKLGGIFMPSDGHCHLDSNGLYSRSTEFDYPSVGQVAQALSAANIQPIFAVTSAALPVYQELSKLIPKSAVGELSEDSSNVVQLIMDAYNSLSSTVTLEHSSLPPGVHISYESQCEGPEKREGKAEDRGQCNHVRINQTVTFWVSLQATHCLPEPHLLRLRALGFSEELIVELHTLCDCNCSDTQPQAPHCSDGQGHLQCGVCRDCAECGAFRTGPLATNCSTACAHTNVTLALAPILDDGWCKERTLDNQLFFFLVEDDARGTVVLRVRPQEKGADHTQAIVLGCVGGIVAVGLGLVLAYRLSVEIYDRREYSRFEKEQQQLNWKQDSNPLYKSAITTTINPRFQEADSPTL

SEQ ID NO: 49992 - protein, 798 aa, Homo sapiens; identical to SEQ ID NO: 49990

SEQ ID NO: 49993 - protein, 401 aa, Homo sapiens
MNLVAVMGAFNKGHGKCDCGKCKCDQGWYGDACQYPTNCDLTKKKSNQMCKNSQDIICSNAGTCHCGRCKCDNSDGSGLVYGKFCECDDRECIDDETEEICGGHGKCYCGNCYCKAGWHGDKCEFQCDITPWESKRRCTSPDGKICSNRGTCVCGECTCHDVDPTGDWGDIHGDTCECDERDCRAVYDRYSDDFCSGHGQCNCGRCDCKAGWYGKKCEHPQSCTLSAEESIRKCQGSSDLPCSGRGKCECGKCTCYPPGDRRVYGKTCECDDRRCEDLDGVVCGGHGTCSCGRCVCERGWFGKLCQHPRKCNMTEEQSKNLCESADGILCSGKGSCHCGKCICSAEEWYISGEFCDCDDRDCDKHDGLICTGNGICSCGNCECWDGWNGNACEIWLGSEYP

SEQ ID NO: 49994 - protein, 494 aa, Homo sapiens
MRPPGFRNFLLLASSLLFAGLSAVPQSFSPSLRSWPGAACRLSRAESERRCRAPGQPPGAALCHGRGRCDCGVCICHVTEPGMFFGPLCECHEWVCETYDGSTCAGHGKCDCGKCKCDQGWYGDACQYPTNCDLTKKKSNQMCKNSQDIICSNAGTCHCGRCKCDNSDGSGLVYGKFCECDDRECIDDETEEICGGHGKCYCGNCYCKAGWHGDKCEFQCDITPWESKRRCTSPDGKICSNRGTCVCGECTCHDVDPTGDWGDIHGDTCECDERDCRAVYDRYSDDFCSGHGQCNCGRCDCKAGWYGKKCEHPQSCTLSAEESIRKCQGSSDLPCSGRGKCECGKCTCYPPGDRRVYGKTCECDDRRCEDLDGVVCGGHGTCSCGRCVCERGWFGKLCQHPRKCNMTEEQSKNLCESADGILCSGKGSCHCGKCICSAEEWYISGEFCDCDDRDCDKHDGLICTGNGICSCGNCECWDGWNGNACEIWLGSEYP

SEQ ID NO: 49995 - protein, 402 aa, Homo sapiens
MSGCARPTTGAPVQAMVSVTGKCKCDQGWYGDACQYPTNCDLTKKKSNQMCKNSQDIICSNAGTCHCGRCKCDNSDGSGLVYGKFCECDDRECIDDETEEICGGHGKCYCGNCYCKAGWHGDKCEFQCDITPWESKRRCTSPDGKICSNRGTCVCGECTCHDVDPTGDWGDIHGDTCECDERDCRAVYDRYSDDFCSGHGQCNCGRCDCKAGWYGKKCEHPQSCTLSAEESIRKCQGSSDLPCSGRGKCECGKCTCYPPGDRRVYGKTCECDDRRCEDLDGVVCGGHGTCSCGRCVCERGWFGKLCQHPRKCNMTEEQSKNLCESADGILCSGKGSCHCGKCICSAEEWYISGEFCDCDDRDCDKHDGLICTGNGICSCGNCECWDGWNGNACEIWLGSEYP

SEQ ID NO: 49996 - protein, 353 aa, Homo sapiens
MCKNSQDIICSNAGTCHCGRCKCDNSDGSGLVYGKFCECDDRECIDDETEEICGGHGKCYCGNCYCKAGWHGDKCEFQCDITPWESKRRCTSPDGKICSNRGTCVCGECTCHDVDPTGDWGDIHGDTCECDERDCRAVYDRYSDDFCSGHGQCNCGRCDCKAGWYGKKCEHPQSCTLSAEESIRKCQGSSDLPCSGRGKCECGKCTCYPPGDRRVYGKTCECDDRRCEDLDGVVCGGHGTCSCGRCVCERGWFGKLCQHPRKCNMTEEQSKNLCESADGILCSGKGSCHCGKCICSAEEWYISGEFCDCDDRDCDKHDGLICTGNGICSCGNCECWDGWNGNACEIWLGSEYP

SEQ ID NO: 49997 - protein, 353 aa, Homo sapiens; identical to SEQ ID NO: 49996

SEQ ID NO: 49998 - protein, 317 aa, Homo sapiens
MKTALILLSILGMACAFSMKNLHRRVKIEDSEENGVFKYRPRYYLYKHAYFYPHLKRFPVQGSSDSSEENGDDSSEEEEEEEETSNEGENNEESNEDEDSEAENTTLSATTLGYGEDATPGTGYTGLAAIQLPKKAGDITNKATKEKESDEEEEEEEEGNENEESEAEVDENEQGINGTSTNSTEAENGNGSSGGDNGEEGEEESVTGANAEDTTETGRQGKGTSKTTTSPNGGFEPTTPPQVYRTTSPPFGKTTTVEYEGEYEYTGANEYDNGYEIYESENGEPRGDNYRAYEDEYSYFKGQGYDGYDGQNYYHHQ

SEQ ID NO: 49999 - protein, 313 aa, Homo sapiens
MNQLSFLLFLIATTRGWSTDEANTYFKEWTCSSSPSLPRSCKEIKDECPSAFDGLYFLRTENGVIYQTFCDMTSGGGGWTLVASVHENDMRGKCTVGDRWSSQQGSKAVYPEGDGNWANYNTFGSAEAATSDDYKNPGYYDIQAKDLGIWHVPNKSPMQHWRNSSLLRYRTDTGFLQTLGHNLFGIYQKYPVKYGEGKCWTDNGPVIPVVYDFGDAQKTASYYSPYGQREFTAGFVQFRVFNNERAANALCAGMRVTGCNTEHHCIGGGGYFPEASPQQCGDFSGFDWSGYGTHVGYSSSREITEAAVLLFYR

SEQ ID NO: 50000 - protein, 325 aa, Homo sapiens
MLSMLRTMTRLCFLLFFSVATSGCSAAAASSLEMLSREFETCAFSFSSLPRSCKEIKERCHSAGDGLYFLRTKNGVVYQTFCDMTSGGGGWTLVASVHENDMRGKCTVGDRWSSQQGNKADYPEGDGNWANYNTFGSAEAATSDDYKNPGYYDIQAKDLGIWHVPNKSPMQHWRNSALLRYRTNTGFLQRLGHNLFGIYQKYPVKYRSGKCWNDNGPAIPVVYDFGDAKKTASYYSPYGQREFVAGFVQFRVFNNERAANALCAGIKVTGCNTEHHCIGGGGFFPQGKPRQCGDFSAFDWDGYGTHVKSSCSREITEAAVLLFYR

SEQ ID NO: 50001 - protein, 911 aa, Homo sapiens
MDGAMGPRGLLLCMYLVSLLILQAMPALGSATGRSKSSEKRQAVDTAVDGVFIRSLKVNCKVTSRFAHYVVTSQVVNTANEAREVAFDLEIPKTAFISDFAVTADGNAFIGDIKDKVTAWKQYRKAAISGENAGLVRASGRTMEQFTIHLTVNPQSKVTFQLTYEEVLKRNHMQYEIVIKVKPKQLVHHFEIDVDIFEPQGISKLDAQASFLPKELAAQTIKKSFSGKKGHVLFRPTVSQQQSCPTCSTSLLNGHFKVTYDVSRDKICDLLVANNHFAHFFAPQNLTNMNKNVVFVIDISGSMRGQKVKQTKEALLKILGDMQPGDYFDLVLFGTRVQSWKGSLVQASEANLQAAQDFVRGFSLDEATNLNGGLLRGIEILNQVQESLPELSNHASILIMLTDGDPTEGVTDRSQILKNVRNAIRGRFPLYNLGFGHNVDFNFLEVMSMENNGRAQRIYEDHDATQQLQGFYSQVAKPLLVDVDLQYPQDAVLALTQNHHKQYYEGSEIVVAGRIADNKQSSFKADVQAHGEGQEFSITCLVDEEEMKKLLRERGHMLENHVERLWAYLTIQELLAKRMKVDREERANLSSQALQMSLDYGFVTPLTSMSIRGMADQDGLKPTIDKPSEDSPPLEMLGPRRTFVLSALQPSPTHSSSNTQRLPDRVTGVDTDPHFIIHVPQKEDTLCFNINEEPGVILSLVQDPNTGFSVNGQLIGNKARSPGQHDGTYFGRLGIANPATDFQLEVTPQNITLNPGFGGPVFSWRDQAVLRQDGVVVTINKKRNLVVSVDDGGTFEVVLHRVWKGSSVHQDFLGFYVLDSHRMSARTHGLLGQFFHPIGFEVSDIHPGSDPTKPDATMVVRNRRLTVTRGLQKDYSKDPWHGAEVSCWFIHNNGAGLIDGAYTDYIVPDIF

SEQ ID NO: 50002 - protein, 623 aa, Homo sapiens
MNKNVVFVIDISGSMRGQKVKQTKEALLKILGDMQPGDYFDLVLFGTRVQSWKGSLVQASEANLQAAQDFVRGFSLDEATNLNGGLLRGIEILNQVQESLPELSNHASILIMLTDGDPTEGVTDRSQILKNVRNAIRGRFPLYNLGFGHNVDFNFLEVMSMENNGRAQRIYEDHDATQQLQGFYSQVAKPLLVDVDLQYPQDAVLALTQNHHKQYYEGSEIVVAGRIADNKQSSFKADVQAHGEGQEFSITCLVDEEEMKKLLRERGHMLENHVERLWAYLTIQELLAKRMKVDREERANLSSQALQMSLDYGFVTPLTSMSIRGMADQDGLKPTIDKPSEDSPPLEMLGPRRTFVLSALQPSPTHSSSNTQRLPDRVTGVDTDPHFIIHVPQKEDTLCFNINEEPGVILSLVQDPNTGFSVNGQLIGNKARSPGQHDGTYFGRLGIANPATDFQLEVTPQNITLNPGFGGPVFSWRDQAVLRQDGVVVTINKKRNLVVSVDDGGTFEVVLHRVWKGSSVHQDFLGFYVLDSHRMSARTHGLLGQFFHPIGFEVSDIHPGSDPTKPDATMVVRNRRLTVTRGLQKDYSKDPWHGAEVSCWFIHNNGAGLIDGAYTDYIVPDIF

SEQ ID NO: 50003 - protein, 769 aa, Homo sapiens
MEQFTIHLTVNPQSKVTFQLTYEEVLKRNHMQYEIVIKVKPKQLVHHFEIDVDIFEPQGISKLDAQASFLPKELAAQTIKKSFSGKKGHVLFRPTVSQQQSCPTCSTSLLNGHFKVTYDVSRDKICDLLVANNHFAHFFAPQNLTNMNKNVVFVIDISGSMRGQKVKQTKEALLKILGDMQPGDYFDLVLFGTRVQSWKGSLVQASEANLQAAQDFVRGFSLDEATNLNGGLLRGIEILNQVQESLPELSNHASILIMLTDGDPTEGVTDRSQILKNVRNAIRGRFPLYNLGFGHNVDFNFLEVMSMENNGRAQRIYEDHDATQQLQGFYSQVAKPLLVDVDLQYPQDAVLALTQNHHKQYYEGSEIVVAGRIADNKQSSFKADVQAHGEGQEFSITCLVDEEEMKKLLRERGHMLENHVERLWAYLTIQELLAKRMKVDREERANLSSQALQMSLDYGFVTPLTSMSIRGMADQDGLKPTIDKPSEDSPPLEMLGPRRTFVLSALQPSPTHSSSNTQRLPDRVTGVDTDPHFIIHVPQKEDTLCFNINEEPGVILSLVQDPNTGFSVNGQLIGNKARSPGQHDGTYFGRLGIANPATDFQLEVTPQNITLNPGFGGPVFSWRDQAVLRQDGVVVTINKKRNLVVSVDDGGTFEVVLHRVWKGSSVHQDFLGFYVLDSHRMSARTHGLLGQFFHPIGFEVSDIHPGSDPTKPDATMVVRNRRLTVTRGLQKDYSKDPWHGAEVSCWFIHNNGAGLIDGAYTDYIVPDIF

SEQ ID NO: 50004 - protein, 645 aa, Homo sapiens
MDGAMGPRGLLLCMYLVSLLILQAMPALGSATGRSKSSEKRQAVDTAVDGVFIRSLKVNCKVTSRFAHYVVTSQVVNTANEAREVAFDLEIPKTAFISDFAVTADGNAFIGDIKDKVTAWKQYRKAAISGENAGLVRASGRTMEQFTIHLTVNPQSKVTFQLTYEEVLKRNHMQYEIVIKVKPKQLVHHFEIDVDIFEPQGISKLDAQASFLPKELAAQTIKKSFSGKKGHVLFRPTVSQQQSCPTCSTSLLNGHFKVTYDVSRDKICDLLVANNHFAHFFAPQNLTNMNKNVVFVIDISGSMRGQKVKQTKEALLKILGDMQPGDYFDLVLFGTRVQSWKGSLVQASEANLQAAQDFVRGFSLDEATNLNGGLLRGIEILNQVQESLPELSNHASILIMLTDGDPTEGVTDRSQILKNVRNAIRGRFPLYNLGFGHNVDFNFLEVMSMENNGRAQRIYEDHDATQQLQGFYSQVAKPLLVDVDLQYPQDAVLALTQNHHKQYYEGSEIVVAGRIADNKQSSFKADVQAHGEGQEFSITCLVDEEEMKKLLRERGHMLENHVERLWAYLTIQELLAKRMKVDREERANLSSQALQMSLDYGFVTPLTSMSIRGMADQDGLKPTIDKPSLHHPRAPERGHPVLQHQ

SEQ ID NO: 50005 - protein, 946 aa, Homo sapiens
MKRLTCFFICFFLSEVSGFEIPINGLSEFVDYEDLVELAPGKFQLVAENRRYQRSLPGESEEMMEEVDQVTLYSYKVQSTITSRMATTMIQSKVVNNSPQPQNVVFDVQIPKGAFISNFSMTVDGKTFRSSIKEKTVGRALYAQARAKGKTAGLVRSSALDMENFRTEVNVLPGAKVQFELHYQEVKWRKLGSYEHRIYLQPGRLAKHLEVDVWVIEPQGLRFLHVPDTFEGHFDGVPVISKGQQKAHVSFKPTVAQQRICPNCRETAVDGELVVLYDVKREEKAGELEVFNGYFVHFFAPDNLDPIPKNILFVIDVSGSMWGVKMKQTVEAMKTILDDLRAEDHFSVIDFNQNIRTWRNDLISATKTQVADAKRYIEKIQPSGGTNINEALLRAIFILNEANNLGLLDPNSVSLIILVSDGDPTVGELKLSKIQKNVKENIQDNISLFSLGMGFDVDYDFLKRLSNENHGIAQRIYGNQDTSSQLKKFYNQVSTPLLRNVQFNYPHTSVTDVTQNNFHNYFGGSEIVVAGKFDPAKLDQIESVITATSANTQLVLETLAQMDDLQDFLSKDKHADPDFTRKLWAYLTINQLLAERSLAPTAAAKRRITRSILQMSLDHHIVTPLTSLVIENEAGDERMLADAPPQDPSCCSGALYYGSKVVPDSTPSWANPSPTPVISMLAQGSQVLESTPPPHVMRVENDPHFIIYLPKSQKNICFNIDSEPGKILNLVSDPESGIVVNGQLVGAKKPNNGKLSTYFGKLGFYFQSEDIKIEISTETITLSHGSSTFSLSWSDTAQVTNQRVQISVKKEKVVTITLDKEMSFSVLLHRVWKKHPVNVDFLGIYIPPTNKFSPKAHGLIGQFMQEPKIHIFNERPGKDPEKPEASMEVKGQKLIITRGLQKDYRTDLVFGTDVTCWFVHNSGKGFIDGHYKDYFVPQLYSFLKRP

SEQ ID NO: 50006 - protein, 885 aa, Homo sapiens
MVALSHLGSALQLGSLFPRSPFRLLGKRSLPEGVANGIEVYSTKINSKVTSRFAHNVVTMRAVNRADTAKEVSFDVELPKTAFITNFTLTIDGVTYPGNVKEKEVAKKQYEKAVSQGKTAGLVKASGRKLEKFTVSVNVAAGSKVTFELTYEELLKRHKGKYEMYLKVQPKQLVKHFEIEVDIFEPQGISMLDAEASFITNDLLGSALTKSFSGKKGHVSFKPSLDQQRSCPTCTDSLLNGDFTITYDVNRESPGNVQIVNGYFVHFFAPQGLPVVPKNVAFVIDISGSMAGRKLEQTKEALLRILEDMQEEDYLNFILFSGDVSTWKEHLVQATPENLQEARTFVKSMEDKGMTNINDGLLRGISMLNKAREEHRIPERSTSIVIMLTDGDANVGESRPEKIQENVRNAIGGKFPLYNLGFGNNLNYNFLENMALENHGFARRIYEDSDADLQLQGFYEEVANPLLTGVEMEYPENAILDLTQNTYQHFYDGSEIVVAGRLVDEDMNSFKADVKGHGATNDLTFTEEVDMKEMEKALQERDYIFGNYIERLWAYLTIEQLLEKRKNAHGEEKENLTARALDLSLKYHFVTPLTSMVVTKPEDNEDERAIADKPGEGFSATPVSPAMSYLTSYQPPQNPYYYVDGDPHFIIQIPEKDDALCFNIDEAPGTVLRLIQDAVTGLTVNGQITGDKRGSPDSKTRKTYFGKLGIANAQMDFQVEVTTEKITLWNRAVPSTFSWLDTVTVTQDGLSMMINRKNMVVSFGDGVTFVVVLHQVWKKHPVHRDFLGFYVVDSHRMSAQTHGLLGQFFQPFDFKVSDIRPGSDPTKPDATLVVKNHQLIVTRGSQKDYRKDASIGTKVVCWFVHNNGEGLIDGVHTDYIVPNLF

SEQ ID NO: 50007 - protein, 670 aa, Homo sapiens [sequence omitted]

SEQ ID NO: 50008 - protein, 890 aa, Homo sapiens
MAFAWWPCLILALLSSLAASGFPRSPFRLLGKRSLPEGVANGIEVYSTKINSKVTSRFAHNVVTMRAVNRADTAKEVSFDVELPKTAFITNFTLTIDGVTYPGNVKEKEVAKKQYEKAVSQGKTAGLVKASGRKLEKFTVSVNVAAGSKVTFELTYEELLKRHKGKYEMYLKVQPKQLVKHFEIEVDIFEPQGISMLDAEASFITNDLLGSALTKSFSGKKGHVSFKPSLDQQRSCPTCTDSLLNGDFTITYDVNRESPGNVQIVNGYFVHFFAPQGLPVVPKNVAFVIDISGSMAGRKLEQTKEALLRILEDMQEEDYLNFILFSGDVSTWKEHLVQATPENLQEARTFVKSMEDKGMTNINDGLLRGISMLNKAREEHRIPERSTSIVIMLTDGDANVGESRPEKIQENVRNAIGGKFPLYNLGFGNNLNYNFLENMALENHGFARRIYEDSDADLQLQGFYEEVANPLLTGVEMEYPENAILDLTQNTYQHFYDGSEIVVAGRLVDEDMNSFKADVKGHGATNDLTFTEEVDMKEMEKALQERDYIFGNYIERLWAYLTIEQLLEKRKNAHGEEKENLTARALDLSLKYHFVTPLTSMVVTKPEDNEDERAIADKPGEDAEATPVSPAMSYLTSYQPPQNPYYYVDGDPHFIIQIPEKDDALCFNIDEAPGTVLRLIQDAVTGLTVNGQITGDKRGSPDSKTRKTYFGKLGIANAQMDFQVEVTTEKITLWNRAVPSTFSWLDTVTVTQDGLSMMINRKNMVVSFGDGVTFVVVLHQVWKKHPVHRDFLGFYVVDSHRMSAQTHGLLGQFFQPFDFKVSDIRPGSDPTKPDATLVVKNHQLIVTRGSQKDYRKDASIGTKVVCWFVHNNGEGLIDGVHTDYIVPNLF

SEQ ID NO: 50009 - protein, 658 aa, Homo sapiens
MAFAWWPCLILALLSSLAASGFPRSPFRLLGKRSLPEGVANGIEVYSTKINSKVTSRFAHNVVTMRAVNRADTAKEVSFDVELPKTAFITNFTLTIDGVTYPGNVKEKEVAKKQYEKAVSQGKTAGLVKASGRKLEKFTVSVNVAAGSKRHKGKYEMYLKVQPKQLVKHFEIEVDIFEPQGISMLDAEASFITNDLLGSALTKSFSGKKGHVSFKPSLDQQRSCPTCTDSLLNGDFTITYDVNRESPGNVQIVNGYFVHFFAPQGLPVVPKNVAFVIDISGSMAGRKLEQTKEALLRILEDMQEEDYLNFILFSGDVSTWKEHLVQATPENLQEARTFVKSMEDKGMTNINDGLLRGISMLNKAREEHRIPERSTSIVIMLTDGDANVGESRPEKIQENVRNAIGGKFPLYNLGFGNNLNYNFLENMALENHGFARRIYEDSDADLQLQGFYEEVANPLLTGVEMEYPENAILDLTQNTYQHFYDGSEIVVAGRLVDEDMNSFKADVKGHGATNDLTFTEEVDMKEMEKALQERDYIFGNYIERLWAYLTIEQLLEKRKNAHGEEKENLTARALDLSLKYHFVTPLTSMVVTKPEDNEDERAIADKPGEGGDSHTGEPRHVLPDQLPASSKPLLLCGRGSPLHHPNSGERRCPLLQHR

SEQ ID NO: 50010 - protein, 930 aa, Homo sapiens
MKPPRPVRTCSKVLVLLSLLAIHQTTTAEKNGIDIYSLTVDSRVSSRFAHTVVTSRVVNRANTVQEATFQMELPKKAFITNFSMIIDGMTYPGIIKEKAEAQAQYSAAVAKGKSAGLVKATGRNMEQFQVSVSVAPNAKITFELVYEELLKRRLGVYELLLKVRPQQLVKHLQMDIHIFEPQGISFLETESTFMTNQLVDALTTWQNKTKAHIRFKPTLSQQQKSPEQQETVLDGNLIIRYDVDRAISGGSIQIENGYFVHYFAPEGLTTMPKNVVFVIDKSGSMSGRKIQQTREALIKILDDLSPRDQFNLIVFSTEATQWRPSLVPASAENVNKARSFAAGIQALGGTNINDAMLMAVQLLDSSNQEERLPEGSVSLIILLTDGDPTVGETNPRSIQNNVREAVSGRYSLFCLGFGFDVSYAFLEKLALDNGGLARRIHEDSDSALQLQDFYQEVANPLLTAVTFEYPSNAVEEVTQNNFRLLFKGSEMVVAGKLQDRGPDVLTATVSGKLPTQNITFQTESSVAEQEAEFQSPKYIFHNFMERLWAYLTIQQLLEQTVSASDADQQALRNQALNLSLAYSFVTPLTSMVVTKPDDQEQSQVAEKPMEGESRNRNVHSGSTFFKYYLQGAKIPKPEASFSPRRGWNRQAGAAGSRMNFRPGVLSSRQLGLPGPPDVPDHAAYHPFRRLAILPASAPPATSNPDPAVSRVMNMKIEETTMTTQTPAPIQAPSAILPLPGQSVERLCVDPRHRQGPVNLLSDPEQGVEVTGQYEREKAGFSWIEVTFKNPLVWVHASPEHVVVTRNRRSSAYKWKETLFSVMPGLKMTMDKTGLLLLSDPDKVTIGLLFWDGRGEGLRLLLRDTDRFSSHVGGTLGQFYQEVLWGSPAASDDGRRTLRVQGNDHSATRERRLDYQEGPPGVEISCWSVEL

SEQ ID NO: 50011 - protein, 914 aa, Homo sapiens
MKPPRPVRTCSKVLVLLSLLAIHQTTTAEKNGIDIYSLTVDSRVSSRFAHTVVTSRVVNRANTVQEATFQMELPKKAFITNFSMIIDGMTYPGIIKEKAEAQAQYSAAVAKGKSAGLVKATGRNMEQFQVSVSVAPNAKITFELVYEELLKRRLGVYELLLKVRPQQLVKHLQMDIHIFEPQGISFLETESTFMTNQLVDALTTWQNKTKAHIRFKPTLSQQQKSPEQQETVLDGNLIIRYDVDRAISGGSIQIENGYFVHYFAPEGLTTMPKNVVFVIDKSGSMSGRKIQQTREALIKILDDLSPRDQFNLIVFSTEATQWRPSLVPASAENVNKARSFAAGIQALGGTNINDAMLMAVQLLDSSNQEERLPEGSVSLIILLTDGDPTVGETNPRSIQNNVREAVSGRYSLFCLGFGFDVSYAFLEKLALDNGGLARRIHEDSDSALQLQDFYQEVANPLLTAVTFEYPSNAVEEVTQNNFRLLFKGSEMVVAGKLQDRGPDVLTATVSGKLPTQNITFQTESSVAEQEAEFQSPKYIFHNFMERLWAYLTIQQLLEQTVSASDADQQALRNQALNLSLAYSFVTPLTSMVVTKPDDQEQSQVAEKPMEGESRNRNVHSAGAAGSRMNFRPGVLSSRQLGLPGPPDVPDHAAYHPFRRLAILPASAPPATSNPDPAVSRVMNMKIEETTMTTQTPACPSCSRSRAPAVPAPIQAPSAILPLPGQSVERLCVDPRHRQGPVNLLSDPEQGVEVTGQYEREKAGFSWIEVTFKNPLVWVHASPEHVVVTRNRRSSAYKWKETLFSVMPGLKMTMDKTGLLLLSDPDKVTIGLLFWDGRGEGLRLLLRDTDRFSSHVGGTLGQFYQEVLWGSPAASDDGRRTLRVQGNDHSATRERRLDYQEGPPGVEISCWSVEL

SEQ ID NO: 50012 - protein, 900 aa, Homo sapiens
MKPPRPVRTCSKVLVLLSLLAIHQTTTAEKNGIDIYSLTVDSRVSSRFAHTVVTSRVVNRANTVQEATFQMELPKKAFITNFSMIIDGMTYPGIIKEKAEAQAQYSAAVAKGKSAGLVKATGRNMEQFQVSVSVAPNAKITFELVYEELLKRRLGVYELLLKVRPQQLVKHLQMDIHIFEPQGISFLETESTFMTNQLVDALTTWQNKTKAHIRFKPTLSQQQKSPEQQETVLDGNLIIRYDVDRAISGGSIQIENGYFVHYFAPEGLTTMPKNVVFVIDKSGSMSGRKIQQTREALIKILDDLSPRDQFNLIVFSTEATQWRPSLVPASAENVNKARSFAAGIQALGGTNINDAMLMAVQLLDSSNQEERLPEGSVSLIILLTDGDPTVGETNPRSIQNNVREAVSGRYSLFCLGFGFDVSYAFLEKLALDNGGLARRIHEDSDSALQLQDFYQEVANPLLTAVTFEYPSNAVEEVTQNNFRLLFKGSEMVVAGKLQDRGPDVLTATVSGKLPTQNITFQTESSVAEQEAEFQSPKYIFHNFMERLWAYLTIQQLLEQTVSASDADQQALRNQALNLSLAYSFVTPLTSMVVTKPDDQEQSQVAEKPMEGESRNRNVHSAGAAGSRMNFRPGVLSSRQLGLPGPPDVPDHAAYHPFRRLAILPASAPPATSNPDPAVSRVMNMKIEETTMTTQTPAPIQAPSAILPLPGQSVERLCVDPRHRQGPVNLLSDPEQGVEVTGQYEREKAGFSWIEVTFKNPLVWVHASPEHVVVTRNRRSSAYKWKETLFSVMPGLKMTMDKTGLLLLSDPDKVTIGLLFWDGRGEGLRLLLRDTDRFSSHVGGTLGQFYQEVLWGSPAASDDGRRTLRVQGNDHSATRERRLDYQEGPPGVEISCWSVEL

SEQ ID NO: 50013 - protein, 560 aa, Homo sapiens
MTYPGIIKEKAEAQAQYSAAVAKGKSAGLVKATGRNMEQFQVSVSVAPNAKITFELVYEELLKRRLGVYELLLKVRPQQLVKHLQMDIHIFEPQGISFLETESTFMTNQLVDALTTWQNKTKAHIRFKPTLSQQQKSPEQQETVLDGNLIIRYDVDRAISGGSIQIENGYFVHYFAPEGLTTMPKNVVFVIDKSGSMSGRKIQQTREALIKILDDLSPRDQFNLIVFSTEATQWRPSLVPASAENVNKARSFAAGIQALGGTNINDAMLMAVQLLDSSNQEERLPEGSVSLIILLTDGDPTVGETNPRSIQNNVREAVSGRYSLFCLGFGFDVSYAFLEKLALDNGGLARRIHEDSDSALQLQDFYQEVANPLLTAVTFEYPSNAVEEVTQNNFRLLFKGSEMVVAGKLQDRGPDVLTATVSGKLPTQNITFQTESSVAEQEAEFQSPKYIFHNFMERLWAYLTIQQLLEQTVSASDADQQALRNQALNLSLAYSFVTPLTSMVVTKPDDQEQSQVAEKPMEGESRNRNVHSGSTFFKYYLQGAKIPKPGDKVGGGGRGD

SEQ ID NO: 50014 - protein, 888 aa, Homo sapiens
MKPPRPVRTCSKVLVLLSLLAIHQTTTAEKNGIDIYSLTVDSRVSSRFAHTVVTSRVVNRANTVQEATFQMELPKKAFITNFSMIIDGMTYPGIIKEKAEAQAQYSAAVAKGKSAGLVKATGRNMEQFQVSVSVAPNAKRRLGVYELLLKVRPQQLVKHLQMDIHIFEPQGISFLETESTFMTNQLVDALTTWQNKTKAHIRFKPTLSQQQKSPEQQETVLDGNLIIRYDVDRAISGGSIQIENGYFVHYFAPEGLTTMPKNVVFVIDKSGSMSGRKIQQTREALIKILDDLSPRDQFNLIVFSTEATQWRPSLVPASAENVNKARSFAAGIQALGGTNINDAMLMAVQLLDSSNQEERLPEGSVSLIILLTDGDPTVGETNPRSIQNNVREAVSGRYSLFCLGFGFDVSYAFLEKLALDNGGLARRIHEDSDSALQLQDFYQEVANPLLTAVTFEYPSNAVEEVTQNNFRLLFKGSEMVVAGKLQDRGPDVLTATVSGKLPTQNITFQTESSVAEQEAEFQSPKYIFHNFMERLWAYLTIQQLLEQTVSASDADQQALRNQALNLSLAYSFVTPLTSMVVTKPDDQEQSQVAEKPMEGESRNRNVHSAGAAGSRMNFRPGVLSSRQLGLPGPPDVPDHAAYHPFRRLAILPASAPPATSNPDPAVSRVMNMKIEETTMTTQTPAPIQAPSAILPLPGQSVERLCVDPRHRQGPVNLLSDPEQGVEVTGQYEREKAGFSWIEVTFKNPLVWVHASPEHVVVTRNRRSSAYKWKETLFSVMPGLKMTMDKTGLLLLSDPDKVTIGLLFWDGRGEGLRLLLRDTDRFSSHVGGTLGQFYQEVLWGSPAASDDGRRTLRVQGNDHSATRERRLDYQEGPPGVEISCWSVEL

SEQ ID NO: 50015 - protein, 956 aa, Homo sapiens
MLLLLGLCLGLSLCVGSQEEAQSWGHSSEQDGLRVPRQVRLLQRLKTKPLMTEFSVKSTIISRYAFTTVSCRMLNRASEDQDIEFQMQIPAAAFITNFTMLIGDKVYQGEITEREKKSGDRVKEKRNKTTEENGEKGTEIFRASAVIPSKDKAAFFLSYEELLQRRLGKYEHSISVRPQQLSGRLSVDVNILESAGIASLEVLPLHNSRQRGSGRGEDDSGPPPSTVINQNETFANIIFKPTVVQQARIAQNGILGDFIIRYDVNREQSIGDIQVLNGYFVHYFAPKDLPPLPKNVVFVLDSSASMVGTKLRQTKDALFTILHDLRPQDRFSIIGFSNRIKVWKDHLISVTPDSIRDGKVYIHHMSPTGGTDINGALQRAIRLLNKYVAHSGIGDRSVSLIVFLTDGKPTVGETHTLKILNNTREAARGQVCIFTIGIGNDVDFRLLEKLSLENCGLTRRVHEEEDAGSQLIGFYDEIRTPLLSDIRIDYPPSSVVQATKTLFPNYFNGSEIIIAGKLVDRKLDHLHVEVTASNSKKFIILKTDVPVRPQKAGKDVTGSPRPGGDGEGDTNHIERLWSYLTTKELLSSWLQSDDEPEKERLRQRAQALAVSYRFLTPFTSMKLRGPVPRMDGLEEAHGMSAAMGPEPVVQSVRGAGTQPGPLLKKPYQPRIKISKTSVDGDPHFVVDFPLSRLTVCFNIDGQPGDILRLVSDHRDSGVTVNGELIGAPAPPNGHKKQRTYLRTITILINKPERSYLEITPSRVILDGGDRLVLPCNQSVVVGSWGLEVSVSANANVTVTIQGSIAFVILIHLYKKPAPFQRHHLGFYIANSEGLSSNCHGLLGQFLNQDARLTEDPAGPSQNLTHPLLLQVGEGPEAVLTVKGHQVPVVWKQRKIYNGEEQIDCWFARNNAAKLIDGEYKDYLAFHPFDTGMDTWPGNVQGALKLAALKMQVHEGQ

SEQ ID NO: 50016 - protein, 742 aa, Homo sapiens
MRNYDSGPPPSTVINQNETFANIIFKPTVVQQARIAQNGILGDFIIRYDVNREQSIGDIQVLNGYFVHYFAPKDLPPLPKNVVFVLDSSASMVGTKLRQTKDALFTILHDLRPQDRFSIIGFSNRIKVWKDHLISVTPDSIRDGKVYIHHMSPTGGTDINGALQRAIRLLNKYVAHSGIGDRSVSLIVFLTDGKPTVGETHTLKILNNTREAARGQVCIFTIGIGNDVDFRLLEKLSLENCGLTRRVHEEEDAGSQLIGFYDEIRTPLLSDIRIDYPPSSVVQATKTLFPNYFNGSEIIIAGKLVDRKLDHLHVEVTASNSKKFIILKTDVPVRPQKAGKDVTGSPRPGGDGEGDTNHIERLWSYLTTKELLSSWLQSDDEPEKERLRQRAQALAVSYRFLTPFTSMKLRGPVPRMDGLEEAHGMSAAMGPEPVVQSVRGAGTQPGPLLKKPYQPRIKISKTSVDGDPHFVVDFPLSRLTVCFNIDGQPGDILRLVSDHRDSGVTVNGELIGAPAPPNGHKKQRTYLRTITILINKPERSYLEITPSRVILDGGDRLVLPCNQSVVVGSWGLEVSVSANANVTVTIQGSIAFVILIHLYKKPAPFQRHHLGFYIANSEGLSSNCHGLLGQFLNQDARLTEDPAGPSQNLTHPLLLQVGEGPEAVLTVKGHQVPVVWKQRKIYNGEEQIDCWFARNNAAKLIDGEYKDYLAFHPFDTGMDTWPGNVQGALKLAALKMQVHEGQ

SEQ ID NO: 50017 - protein, 702 aa, Homo sapiens
MLLLLGLCLGLSLCVGSQEEAQSWGHSSEQDGLRVPRQVRLLQRLKTKPLMTEFSVKSTIISRYAFTTVSCRMLNRASEDQDIEFQMQIPAAAFITNFTMLIGDKVYQGEITEREKKSGDRVKEKRNKTTEENGEKGTEIFRASAVIPSKDKAAFFLSYEELLQRRLGKYEHSISVRPQQLSGRLSVDVNILESAGIASLEVLPLHNSRQRGSGRGEDDSGPPPSTVINQNETFANIIFKPTVVQQARIAQNGILGDFIIRYDVNREQSIGDIQVLNGYFVHYFAPKDLPPLPKNVVFVLDSSASMVGTKLRQTKDALFTILHDLRPQDRFSIIGFSNRIKVWKDHLISVTPDSIRDGKVYIHHMSPTGGTDINGALQRAIRLLNKYVAHSGIGDRSVSLIVFLTDGKPTVGETHTLKILNNTREAARGQVCIFTIGIGNDVDFRLLEKLSLENCGLTRRVHEEEDAGSQLIGFYDEIRTPLLSDIRIDYPPSSVVQATKTLFPNYFNGSEIIIAGKLVDRKLDHLHVEVTASNSKKFIILKTDVPVRPQKAGKDVTGSPRPGGDGEGDTNHIERLWSYLTTKELLSSWLQSDDEPEKERLRQRAQALAVSYRFLTPFTSMKLRGPVPRMDGLEEAHGMSAAMGPEPVVQSVRGAGTQPGPLLKKPYQPRIKISKTSVRGFRREEQIFSNVMKFPFASILEL

SEQ ID NO: 50018 - protein, 695 aa, Homo sapiens
MLLLLGLCLGLSLCVGSQEEAQSWGHSSEQDGLRVPRQVRLLQRLKTKPLMTEFSVKSTIISRYAFTTVSCRMLNRASEDQDIEFQMQIPAAAFITNFTMLIGDKVYQGEITEREKKSGDRVKEKRNKTTEENGEKGTEIFRASAVIPSKDKAAFFLSYEELLQRRLGKYEHSISVRPQQLSGRLSVDVNILESAGIASLEVLPLHNSRQRGSGRGEDDSGPPPSTVINQNETFANIIFKPTVVQQARIAQNGILGDFIIRYDVNREQSIGDIQVLNGYFVHYFAPKDLPPLPKNVVFVLDSSASMVGTKLRQTKDALFTILHDLRPQDRFSIIGFSNRIKVWKDHLISVTPDSIRDGKVYIHHMSPTGGTDINGALQRAIRLLNKYVAHSGIGDRSVSLIVFLTDGKPTVGETHTLKILNNTREAARGQVCIFTIGIGNDVDFRLLEKLSLENCGLTRRVHEEEDAGSQLIGFYDEIRTPLLSDIRIDYPPSSVVQATKTLFPNYFNGSEIIIAGKLVDRKLDHLHVEVTASNSKKFIILKTDVPVRPQKAGKDVTGSPRPGGDGEGDTNHIERLWSYLTTKELLSSWLQSDDEPEKERLRQRAQALAVSYRFLTPFTSMKLRGPVPRMDGLEEAHGMSAAMGPEPVVQSVRGAGTQPGPLLKKPPNSVKKKQNKTKKRHGRDGVFPLHHLGIR

SEQ ID NO: 50019 - protein, 723 aa, Homo sapiens
DSGPPPSTVINQNETFANIIFKPTVVQQARIAQNGILGDFIIRYDVNREQSIGDIQVLNGYFVHYFAPKDLPPLPKNVVFVLDSSASMVGTKLRQTKDALFTILHDLRPQDRFSIIGFSNRIKVWKDHLISVTPDSIRDGKVYIHHMSPTGGTDINGALQRAIRLLNKYVAHSGIGDRSVSLIVFLTDGKPTVGETHTLKILNNTREAARGQVCIFTIGIGNDVDFRLLEKLSLENCGLTRRVHEEEDAGSQLIGFYDEIRTPLLSDIRIDYPPSSVVQATKTLFPNYFNGSEIIIAGKLVDRKLDHLHVEVTASNSKKFIILKTDVPVRPQKAGKDVTGSPRPGGDGEGDTNHIERLWSYLTTKELLSSWLQSDDEPEKERLRQRAQALAVSYRFLTPFTSMKLRGPVPRMDGLEEAHGMSAAMGPEPVVQSVRGAGTQPGPLLKKPYQPRIKISKTSVDGDPHFVVDFPLSRLTVCFNIDGQPGDILRLVSDHRDSGVTVNGELIGAPAPPNGHKKQRTYLRTITILINKPERSYLEITPSRVILDGGDRLVLPCNQSVVVGSWGLEVSVSANANVTVTIQGSIAFVILIHLYKKPAPFQRHHLGFYIANSEGLSSNCHGLLGQFLNQDARLTEDPAGPSQNLTHPLLLQVGEGPEAVLTVKGHQVPVVWKQRKIYNGEEQIDCWFARNNAAKLIDGEYKDYLAFHPFDTGMLGRGMSREL

SEQ ID NO: 50020 - protein, 532 aa, Homo sapiens
MAPSSPRPALPALLVLLGALFPGPGNAQTSVSPSKVILPRGGSVLVTCSTSCDQPKLLGIETPLPKKELLLPGNNRKVYELSNVQEDSQPMCYSNCPDGQSTAKTFLTVYWTPERVELAPLPSWQPVGKNLTLRCQVEGGAPRANLTVVLLRGEKELKREPAVGEPAEVTTTVLVRRDHHGANFSCRTELDLRPQGLELFENTSAPYQLQTFVLPATPPQLVSPRVLEVDTQGTVVCSLDGLFPVSEAQVHLALGDQRLNPTVTYGNDSFSAKASVSVTAEDEGTQRLTCAVILGNQSQETLQTVTIYSFPAPNVILTKPEVSEGTEVTVKCEAHPRAKVTLNGVPAQPLGPRAQLLLKATPEDNGRSFSCSATLEVAGQLIHKNQTRELRVLYGPRLDERDCPGNWTWPENSQQTPMCQAWGNPLPELKCLKDGTFPLPIGESVTVTRDLEGTYLCRARSTQGEVTRKVTVNVLSPRYEIVIITVVAAAVIMGTAGLSTYLYNRQRKIKKYRLQQAQKGTPMKPNTQATPP

SEQ ID NO: 50021 - protein, 310 aa, Homo sapiens
MAPSSPRPALPALLVLLGALFPVSEAQVHLALGDQRLNPTVTYGNDSFSAKASVSVTAEDEGTQRLTCAVILGNQSQETLQTVTIYSFPAPNVILTKPEVSEGTEVTVKCEAHPRAKVTLNGVPAQPLGPRAQLLLKATPEDNGRSFSCSATLEVAGQLIHKNQTRELRVLYGPRLDERDCPGNWTWPENSQQTPMCQAWGNPLPELKCLKDGTFPLPIGESVTVTRDLEGTYLCRARSTQGEVTRKVTVNVLSPRYEIVIITVVAAAVIMGTAGLSTYLYNRQRKIKKYRLQQAQKGTPMKPNTQATPP

SEQ ID NO: 50022 - protein, 275 aa, Homo sapiens
MSSFGYRTLTVALFTLICCPGSDEKVFEVHVRPKKLAVEPKGSLEVNCSTTCNQPEVGGLETSLDKILLDEQAQWKHYLVSNISHDTVLQCHFTCSGKQESMNSNVSVYQPPRQVILTLQPTLVAVGKSFTIECRVPTVEPLDSLTLFLFRGNETLHYETFGKAAPAPQEATATFNSTADREDGHRNFSCLAVLDLMSRGGNIFHKHSAPKMLEIYEPVSDSQMVIIVTVVSVLLSLFVTSVLLCFIFGQHLRQQRMGTYGVRAAWRRLPQAFRP

SEQ ID NO: 50023 - protein, 275 aa, Homo sapiens; identical to SEQ ID NO: 50022

SEQ ID NO: 50024 - protein, 275 aa, Homo sapiens; identical to SEQ ID NO: 50022

SEQ ID NO: 50025 - protein, 275 aa, Homo sapiens; identical to SEQ ID NO: 50022

SEQ ID NO: 50026 - protein, 275 aa, Homo sapiens; identical to SEQ ID NO: 50022

SEQ ID NO: 50027 - protein, 547 aa, Homo sapiens
MATMVPSVLWPRACWTLLVCCLLTPGVQGQEFLLRVEPQNPVLSAGGSLFVNCSTDCPSSEKIALETSLSKELVASGMGWAAFNLSNVTGNSRILCSVYCNGSQITGSSNITVYRLPERVELAPLPPWQPVGQNFTLRCQVEDGSPRTSLTVVLLRWEEELSRQPAVEEPAEVTATVLASRDDHGAPFSCRTELDMQPQGLGLFVNTSAPRQLRTFVLPVTPPRLVAPRFLEVETSWPVDCTLDGLFPASEAQVYLALGDQMLNATVMNHGDTLTATATATARADQEGAREIVCNVTLGGERREARENLTVFSFLGPIVNLSEPTAHEGSTVTVSCMAGARVQVTLDGVPAAAPGQPAQLQLNATESDDGRSFFCSATLEVDGEFLHRNSSVQLRVLYGPKIDRATCPQHLKWKDKTRHVLQCQARGNPYPELRCLKEGSSREVPVGIPFFVNVTHNGTYQCQASSSRGKYTLVVVMDIEAGSSHFVPVFVAVLLTLGVVTIVLALMYVFREHQRSGSYHVREESTYLPLTSMQPTEAMGEEPSRAE

SEQ ID NO: 50028 - protein, 272 aa, Homo sapiens
MGSLFPLSLLFFLAAAYPGVGSALGRRTKRAQSPKGSPLAPSGTSVPFWVRMSPEFVAVQPGKSVQLNCSNSCPQPQNSSLRTPLRQGKTLRGPGWVSYQLLDVRAWSSLAHCLVTCAGKTRWATSRITAYSVPGGLLGGDPEAWKPGHLFRKPGALHRPGSGQRDLDLRVCCWTPRLLAARDLPRAPQSRRPGGPQQLGTHYTDARLEPRAHSFGLRFHRCPCRDPPHCGRCVPMQVPSYEVPGVKGDVLCRLSEKKRNMKQSGEMAIHGG

SEQ ID NO: 50029 - protein, 271 aa, Homo sapiens
MGSLFPLSLLFFLAAAYPGVGSALGRRTKRAQSPKGSPLAPSGTSVPFWVRMSPEFVAVQPGKSVQLNCSNSCPQPQNSSLRTPLRQGKTLRGPGWVSYQLLDVRAWSSLAHCLVTCAGKTRWATSRITAYKPPHSVILEPPVLKGRKYTLRCHVTQVFPVGYLVVTLRHGSRVIYSESLERFTGLDLANVTLTYEFAAGPRDFWQPVICHARLNLDGLVVRNSSAPITLMLAWSPAPTALASGSIAALVGILLTVGAAYLCKCLAMKSQA

SEQ ID NO: 50030 - protein, 237 aa, Homo sapiens
MGSLFPLSLLFFLAAAYPGVGSALGRRTKRAQSPKGSPLAPSGTSVPFWVRMSPEFVAVQPGKSVQLNCSNSCPQPQNSSLRTPLRQGKTLRGPGWVSYQLLDVRAWSSLAHCLVTCAGKTRWATSRITAYKPPHSVILEPPVLKGRKYTLRCHVTQVFPVGYLVVTLRHGSRVIYSESLERFTGLDLANVTLTYEFAAGPRDFWQPVICHARLNLDGLVVRNSSAPITLMLGEAPL

SEQ ID NO: 50031 - protein, 924 aa, Homo sapiens
MPGPSPGLRRALLGLWAALGLGLFGLSAVSQEPFWADLQPRVAFVERGGSLWLNCSTNCPRPERGGLETSLRRNGTQRGLRWLARQLVDIREPETQPVCFFRCARRTLQARGLIRTFQRPDRVELMPLPPWQPVGENFTLSCRVPGAGPRASLTLTLLRGAQELIRRSFAGEPPRARGAVLTATVLARREDHGANFSCRAELDLRPHGLGLFENSSAPRELRTFSLSPDAPRLAAPRLLEVGSERPVSCTLDGLFPASEARVYLALGDQNLSPDVTLEGDAFVATATATASAEQEGARQLVCNVTLGGENRETRENVTIYSFPAPLLTLSEPSVSEGQMVTVTCAAGAQALVTLEGVPAAVPGQPAQLQLNATENDDRRSFFCDATLDVDGETLIKNRSAELRVLYAPRLDDSDCPRSWTWPEGPEQTLRCEARGNPEPSVHCARSDGGAVLALGLLGPVTRALSGTYRCKAANDQGEAVKDVTLTVEYAPALDSVGCPERITWLEGTEASLSCVAHGVPPPDVICVRSGELGAVIEGLLRVAREHAGTYRCEATNPRGSAAKNVAVTVEYGPRFEEPSCPSNWTWVEGSGRLFSCEVDGKPQPSVKCVGSGGATEGVLLPLAPPDPSPRAPRIPRVLAPGIYVCNATNRHGSVAKTVVVSAESPPEMDESTCPSHQTWLEGAEASALACAARGRPSPGVRCSREGIPWPEQQRVSREDAGTYHCVATNAHGTDSRTVTVGVEYRPVVAELAASPPGGVRPGGNFTLTCRAEAWPPAQISWRAPPGALNIGLSSNNSTLSVAGAMGSHGGEYECAATNAHGRHARRITVRVAGPWLWVAVGGAAGGAALLAAGAGLAFYVQSTACKKGEYNVQEAESSGEAVCLNGAGGGAGGAAGAEGGPEAAGGAAESPAEGEVFAIQLTSA

SEQ ID NO: 50032 - protein, 557 aa, Homo sapiens
MMVVLLGATTLVLVAVAPWVLSAAAGGKNLKSPQKVEVDIIDDNFILRWNRSDESVGNVTFSFDYQKTGMDNWIKLSGCQNITSTKCNFSSLKLNVYEEIKLRIRAEKENTSSWYEVDSFTPFRKAQIGPPEVHLEAEDKAIVIHISPGTKDSVMWALDGLSFTYSLVIWKNSSGVEERIENIYSRHKIYKLSPETTYCLKVKAALLTSWKIGVYSPVHCIKTTVENELPPPENIEVSVQNQNYVLKWDYTYANMTFQVQWLHAFLKRNPGNHLYKWKQIPDCENVKTTQCVFPQNVFQKGIYLLRVQASDGNNTSFWSEEIKFDTEIQAFLLPPVFNIRSLSDSFHIYIGAPKQSGNTPVIQDYPLIYEIIFWENTSNAERKIIEKKTDVTVPNLKPLTVYCVKARAHTMDEKLNKSSVFSDAVCEKTKPGNTSKIWLIVGICIALFALPFVIYAAKVFLRCINYVFFPSLKPSSSIDEYFSEQPLKNLLLSTSEEQIEKCFIIENISTIATVEETNQTDEDHKKYSSQTSQDSGNYSNEDESESKTSEELQQDFV

SEQ ID NO: 50033 - protein, 488 aa, Homo sapiens
MDNWIKLSGCQNITSTKCNFSSLKLNVYEEIKLRIRAEKENTSSWYEVDSFTPFRKAQIGPPEVHLEAEDKAIVIHISPGTKDSVMWALDGLSFTYSLVIWKNSSGVEERIENIYSRHKIYKLSPETTYCLKVKAALLTSWKIGVYSPVHCIKTTVENELPPPENIEVSVQNQNYVLKWDYTYANMTFQVQWLHAFLKRNPGNHLYKWKQIPDCENVKTTQCVFPQNVFQKGIYLLRVQASDGNNTSFWSEEIKFDTEIQAFLLPPVFNIRSLSDSFHIYIGAPKQSGNTPVIQDYPLIYEIIFWENTSNAERKIIEKKTDVTVPNLKPLTVYCVKARAHTMDEKLNKSSVFSDAVCEKTKPGNTSKIWLIVGICIALFALPFVIYAAKVFLRCINYVFFPSLKPSSSIDEYFSEQPLKNLLLSTSEEQIEKCFIIENISTIATVEETNQTDEDHKKYSSQTSQDSGNYSNEDESESKTSEELQQDFV

SEQ ID NO: 50034 - protein, 496 aa, Homo sapiens
MMVVLLGATTLVLVAVAPWVLSAAAGGKNLKSPQKVEVDIIDDNFILRWNRSDESVGNVTFSFDYQKTGMDNWIKLSGCQNITSTKCNFSSLKLNVYEEIKLRIRAEKENTSSWYEVDSFTPFRKAQIGPPEVHLEAEDKAIVIHISPGTKDSVMWALDGLSFTYSLVIWKNSSGVEERIENIYSRHKIYKLSPETTYCLKVKAALLTSWKIGVYSPVHCIKTTVENELPPPENIEVSVQNQNYVLKWDYTYANMTFQVQWLHAFLKRNPGNHLYKWKQIPDCENVKTTQCVFPQNVFQKGIYLLRVQASDGNNTSFWSEEIKFDTEIQAFLLPPVFNIRSLSDSFHIYIGAPKQSGNTPVIQDYPLIYEIIFWENTSNAERKIIEKKTDVTVPNLKPLTVYCVKARAHTMDENDAVCEYFSEQPLKNLLLSTSEEQIEKCFIIENISTIATVEETNQTDEDHKKYSSQTSQDSGNYSNEDESESKTSEELQQDFV

SEQ ID NO: 50035 - protein, 515 aa, Homo sapiens [sequence omitted]

SEQ ID NO: 50036 - protein, 515 aa, Homo sapiens [sequence omitted]

SEQ ID NO: 50037 - protein, 331 aa, Homo sapiens
MLLSQNAFIFRSLNLVLMVYISLVFGISYDSPDYTDESCTFKISLRNFRSILSWELKNHSIVPTHYTLLYTIMSKPEDLKVVKNCANTTRSFCDLTDEWRSTHEAYVTVLEGFSGNTTLFSCSHNFWLAIDMSFEPPEFEIVGFTNHINVMVKFPSIVEEELQFDLSLVIEEQSEGIVKKHKPEIKGNMSGNFTYIIDKLIPNTNYCVSVYLEHSDEQAVIKSPLKCTLLPPGQESESAESAKIGGIITVFLIALVLTSTIVTLKWIGYICLRNSLPKVLRQGLAKGWNAVAIHRCSHNALQSETPELKQSSCLSFPSSWDYKRASLCPSD

SEQ ID NO: 50038 - protein, 331 aa, Homo sapiens; identical to SEQ ID NO: 50037

SEQ ID NO: 50039 - protein, 186 aa, Homo sapiens
MLLKSPENSLLQFQFKYGVPTPTNVTIESYNMNPIVYWEYQIMPQVPVFTVEVKNYGVKNSEWIDACINISHHYCNISDHVGDPSNSLWVRVKARVGQKESAYAKSEEFAVCRDGKIGPPKLDIRKEEKQIMIDIFHPSVFVNGDEQEVDYDPETTCYIRVYNVYVRMNGSEIKRSCAFSLFSFFI

SEQ ID NO: 50040 - protein, 489 aa, Homo sapiens
MALLFLLPLVMQGVSRAEMGTADLGPSSVPTPTNVTIESYNMNPIVYWEYQIMPQVPVFTVEVKNYGVKNSEWIDACINISHHYCNISDHVGDPSNSLWVRVKARVGQKESAYAKSEEFAVCRDGKIGPPKLDIRKEEKQIMIDIFHPSVFVNGDEQEVDYDPETTCYIRVYNVYVRMNGSEIQYKILTQKEDDCDEIQCQLAIPVSSLNSQYCVSAEGVLHVWGVTTEKSKEVCITIFNSSIKGSLWIPVVAALLLFLVLSLVFICFYIKKINPLKEKSIILPKSLISVVRSATLETKPESKYVSLITSYQPFSLEKEVVCEEPLSPATVPGMHTEDNPGKVEHTEELSSITEVVTTEENIPDVVPGSHLTPIERESSSPLSSNQSEPGSIALNSYHSRNCSESDHSRNGFDTDSSCLESHSSLSDSEFPPNNKGEIKTEGQELITVIKAPTSFGYDKPHVLVDLLVDDSGKESLIGYRPTEDSKEFS

SEQ ID NO: 50041 - protein, 161 aa, Homo sapiens
MLLKSPENSLLQFQFKYGVPTPTNVTIESYNMNPIVYWEYQIMPQVPVFTVEVKNYGVKNSEWIDACINISHHYCNISDHVGDPSNSLWVRVKARVGQKESAYAKSEEFAVCRDGKIGPPKLDIRKEEKQIMIDIFHPSVFVNGDEQEVDYDPETTCYIRV

SEQ ID NO: 50042 - protein, 274 aa, Homo sapiens
MALLFLLPLVMQGVSRAEMGTADLGPSSVPTPTNVTIESYNMNPIVYWEYQIMPQVPVFTVEVKNYGVKNSEWIDACINISHHYCNISDHVGDPSNSLWVRVKARVGQKESAYAKSEEFAVCRDGKIGPPKLDIRKEEKQIMIDIFHPSVFVNGDEQEVDYDPETTCYIRVYNVYVRMNGSEIQYKILTQKEDDCDEIQCQLAIPVSSLNSQYCVSAEGVLHVWGVTTEKSKEVCITIFNSSIKGSLWIPVVAALLLFCLAWYSSVFILRKLIH

SEQ ID NO: 50043 - protein, 210 aa, Homo sapiens
MALLFLLPLVMQGVSRAEMGTADLGPSSVPTPTNVTIESYNMNPIVYWEYQIMPQVPVFTVEVKNYGVKARVGQKESAYAKSEEFAVCRDGKIGPPKLDIRKEEKQIMIDIFHPSVFVNGDEQEVDYDPETTCYIRVYNVYVRMNGSEIQYKILTQKEDDCDEIQCQLAIPVSSLNSQYCVSAEGVLHVWGVTTEKSKEVCITIFNSSIK

SEQ ID NO: 50044 - protein, 461 aa, Homo sapiens
MPTPTNVTIESYNMNPIVYWEYQIMPQVPVFTVEVKNYGVKNSEWIDACINISHHYCNISDHVGDPSNSLWVRVKARVGQKESAYAKSEEFAVCRDGKIGPPKLDIRKEEKQIMIDIFHPSVFVNGDEQEVDYDPETTCYIRVYNVYVRMNGSEIQYKILTQKEDDCDEIQCQLAIPVSSLNSQYCVSAEGVLHVWGVTTEKSKEVCITIFNSSIKGSLWIPVVAALLLFLVLSLVFICFYIKKINPLKEKSIILPKSLISVVRSATLETKPESKYVSLITSYQPFSLEKEVVCEEPLSPATVPGMHTEDNPGKVEHTEELSSITEVVTTEENIPDVVPGSHLTPIERESSSPLSSNQSEPGSIALNSYHSRNCSESDHSRNGFDTDSSCLESHSSLSDSEFPPNNKGEIKTEGQELITVIKAPTSFGYDKPHVLVDLLVDDSGKESLIGYRPTEDSKEFS

SEQ ID NO: 50045 - protein, 337 aa, Homo sapiens
MRPTLLWSLLLLLGVFAAAAAAPPDPLSQLPAPQHPKIRLYNAEQVLSWEPVALSNSTRPVVYQVQFKYTDSKWFTADIMSIGVNCTQITATECDFTAASPSAGFPMDFNVTLRLRAELGALHSAWVTMPWFQHYRNVTVGPPENIEVTPGEGSLIIRFSSPFDIADTSTAFFCYYVHYWEKGGIQQVKGPFRSNSISLDNLKPSRVYCLQVQAQLLWNKSNIFRVGHLSNISCYETMADASTELQQVILISVGTFSLLSVLAGACFFLVLKYRGLIKYWFHTPPSIPLQIEEYLKDPTQPILEALDKDSSPKDDVWDSVSIISFPEKEQEDVLQTL

SEQ ID NO: 50046 - protein, 125 aa, Homo sapiens
MHKEEHEVAVLGPPPSTILPRSTVINIHSETSVPDHVVWSLFNTLFLNWCCLGFIAFAYSVKSRDRKMVGDVTGAQAYASTAKCLNIWALILGILMTIGFILLLVFGSVTVYHIMLQIIQEKRGY

SEQ ID NO: 50047 - protein, 125 aa, Homo sapiens; identical to SEQ ID NO: 50046

SEQ ID NO: 50048 - protein, 99 aa, Homo sapiens
PQSQKMHKEEHEVAVLGPPPSTILPRSTVINIHSETSVPDHVVVPVQHPLLECCLGFIAFAYSVKSRDRKMVGDVTGAQALHRQVPEHLGPDSGHPHDH

SEQ ID NO: 50049 - protein, 125 aa, Homo sapiens; identical to SEQ ID NO: 50046

SEQ ID NO: 50050 - protein, 164 aa, Homo sapiens
MNHIVQTFSPVNSGQPPNYEMLKEEQEVAMLGVPHNPAPPMSTVIHIRSETSVPDHVVVPVQHPLHECCLGFIAFAYSVKSRDRKMVGDVTGAQALHRQVPEHLGPDFGHLHDHSAHHHPSVGRPGPAIDQEASLRPGALPVTCIPRTLSSIPRPAPRGQELCP

SEQ ID NO: 50051 - protein, 132 aa, Homo sapiens
MNHIVQTFSPVNSGQPPNYEMLKEEQEVAMLGVPHNPAPPMSTVIHIRSETSVPDHVVWSLFNTLFMNTCCLGFIAFAYSVKSRDRKMVGDVTGAQAYASTAKCLNIWALILGIFMTILLIIIPVLVVQAQR

SEQ ID NO: 50052 - protein, 148 aa, Homo sapiens
PPNYEMLKEEHEVAVLGAPHNPAPPTSTVIHIRSETSVPDHVVVPVQHPLHECCLGFIAFAYSVKSRDRKMVGDVTGAQALHRQVPEHLGPDSGHPHDHSAHRHPSADLPGLWIDQEASLRPGALPMTCIPRTPTSIPRPAPGAESCI

SEQ ID NO: 50053 - protein, 133 aa, Homo sapiens
MNHTVQTFFSPVNSGQPPNYEMLKEEHEVAVLGAPHNPAPPTSTVIHIRSETSVPDHVVWSLFNTLFMNPCCLGFIAFAYSVKSRDRKMVGDVTGAQAYASTAKCLNIWALILGILMTILLIVIPVLIFQAYG

SEQ ID NO: 50054 - protein, 1025 aa, Homo sapiens
MSNGYSTDENFRYLISCFRARVKMYIQVEPVLDYLTFLPAEVKEQIQRTVATSGNMQAVELLLSTLEKGVWHLGWTREFVEALRRTGSPLAARYMNPELTDLPSPSFENAHDEYLQLLNLLQPTLVDKLLVRDVLDKCMEEELLTIEDRNRIAAAENNGNESGVRELLKRIVQKENWFSAFLNVLRQTGNNELVQELTGSDCSESNAEIENLSQVDGPQVEEQLLSTTVQPNLEKEVWGMENNSSESSFADSSVVSESDTSLAEGSVSCLDESLGHNSNMGSDSGTMGSDSDEENVAARASPEPELQLRPYQMEVAQPALEGKNIIICLPTGSGKTRVAVYIAKDHLDKKKKASEPGKVIVLVNKVLLVEQLFRKEFQPFLKKWYRVIGLSGDTQLKISFPEVVKSCDIIISTAQILENSLLNLENGEDAGVQLSDFSLIIIDECHHTNKEAVYNNIMRHYLMQKLKNNRLKKENKPVIPLPQILGLTASPGVGGATKQAKAEEHILKLCANLDAFTIKTVKENLDQLKNQIQEPCKKFAIADATREDPFKEKLLEIMTRIQTYCQMSPMSDFGTQPYEQWAIQMEKKAAKEGNRKERVCAEHLRKYNEALQINDTIRMIDAYTHLETFYNEEKDKKFAVIEDDSDEGGDDEYCDGDEDEDDLKKPLKLDETDRFLMTLFFENNKMLKRLAENPEYENEKLTKLRNTIMEQYTRTEESARGIIFTKTRQSAYALSQWITENEKFAEVGVKAHHLIGAGHSSEFKPMTQNEQKEVISKFRTGKINLLIATTVAEEGLDIKECNIVIRYGLVTNEIAMVQARGRARADESTYVLVAHSGSGVIEHETVNDFREKMMYKAIHCVQNMKPEEYAHKILELQMQSIMEKKMKTKRNIAKHYKNNPSLITFLCKNCSVLACSGEDIHVIEKMHHVNMTPEFKELYIVRENKALQKKCADYQINGEIICKCGQAWGTMMVHKGLDLPCLKIRNFVVVFKNNSTKKQYKKWVELPITFPNLDYSECCLFSDED

SEQ ID NO: 50055 - protein, 221 aa, Homo sapiens
MSNGYSTDENFRYLISCFRARVKMYIQVEPVLDYLTFLPAEVKEQIQRTVATSGNMQAVELLLSTLEKGVWHLGWTREFVEALRRTGSPLAARYMNPELTDLPSPSFENAHDEYLQLLNLLQPTLVDKLLVRDVLDKCMEEELLTIEDRNRIAAAENNGNESGVRELLKRIVQKENWFSAFLNVLRQTGNNELVQELTGSDCSESNAGICNFTEEDSSNSA

SEQ ID NO: 50056 - protein, 1025 aa, Homo sapiens; identical to SEQ ID NO: 50054

SEQ ID NO: 50057 - protein, 349 aa, Homo sapiens
MPVERMRMRPWLEEQINSNTIPGLKWLNKEKKIFQIPWMHAARHGWDVEKDAPLFRNWAIHTGKHQPGVDKPDPKTWKANFRCAMNSLPDIEEVKDKSIKKGNNAFRVYRMLPLSERPSKKGKKPKTEKEDKVKHIKQEPVESSLGLSNGVSDLSPEYAVLTSTIKNEVDSTVNIIVVGQSHLDSNIENQEIVTNPPDICQVVEVTTESDEQPVSMSELYPLQISPVSSYAESETTDSVPSDEESAEGRPHWRKRNIEGKQYLSNMGTRGSYLLPGMASFVTSNKPDLQVTIKEESNPVPYNSSWPPFQDLPLSSSMTPASSSSRPDRETRASVIKKTSDITQARVKSC

SEQ ID NO: 50058 - protein, 137 aa, Homo sapiens
MPVERMRMRPWLEEQINSNTIPGLKWLNKEKKIFQIPWMHAARHGWDVEKDAPLFRNWAIHTGKHQPGVDKPDPKTWKANFRCAMNSLPDIEEVKDKSIKKGNNAFRVYRMLPLSERPSKKGKKPKTEKEDKVKHIK

SEQ ID NO: 50059 - protein, 137 aa, Homo sapiens; identical to SEQ ID NO: 50058

SEQ ID NO: 50060 - protein, 176 aa, Homo sapiens
MPVERMRMRPWLEEQINSNTIPGLKWLNKEKKIFQIPWMHAARHGWDVEKDAPLFRNWAIHTGKHQPGVDKPDPKTWKANFRCAMNSLPDIEEVKDKSIKKGNNAFRVYRMLPLSERPSKKGKKPKTEKEDKVKHIKQEPVESSLGLSNGVSDLSPEYAVLTSTIKNEVDSTVNII

SEQ ID NO: 50061 - protein, 161 aa, Homo sapiens
MPVERMRMRPWLEEQINSNTIPGLKWLNKEKKIFQIPWMHAARHGWDVEKDAPLFRNWAIHTGKHQPGVDKPDPKTWKANFRCAMNSLPDIEEVKDKSIKKGNNAFRVYRMLPLSERPSKKGKKPKTEKEDKVKHIKQEPVESSLGLSNGVSDLSPEYAVL

SEQ ID NO: 50062 - protein, 427 aa, Homo sapiens
MGTPKPRILPWLVSQLDLGQLEGVAWVNKSRTRFRIPWKHGLRQDAQQEDFGIFQAWAEATGAYVPGRDKPDLPTWKRNFRSALNRKEGLRLAEDRSKDPHDPHKIYEFVNSGVGDFSQPDTSPDTNGGGSTSDTQEDILDELLGNMVLAPLPDPGPPSLAVAPEPCPQPLRSPSLDNPTPFPNLGPSENPLKRLLVPGEEWEFEVTAFYRGRQVFQQTISCPEGLRLVGSEVGDRTLPGWPVTLPDPGMSLTDRGVMSYVRHVLSCLGGGLALWRAGQWLWAQRLGHCHTYWAVSEELLPNSGHGPDGEVPKDKEGGVFDLGPFIVDLITFTEGSGRSPRYALWFCVGESWPQDQPWTKRLVMVKVVPTCLRALVEMARVGGASSLENTVDLHISNSHPLSLTSDQYKAYLQDLVEGMDFQGPGES

SEQ ID NO: 50063 - protein, 300 aa, Homo sapiens
MGTPKPRILPWLVSQLDLGQLEGVAWVNKSRTRFRIPWKHGLRQDAQQEDFGIFQAWAEATGAYVPGRDKPDLPTWKRNFRSALNRKEGLRLAEDRSKDPHDPHKIYEFVNSGVGDFSQPDTSPDTNGGGSTSDTQEDILDELLGNMVLAPLPDPGPPSLAVAPEPCPQPLRSPSLDNPTPFPNLGPSENPLKRLLVPGEDLITFTEGSGRSPRYALWFCVGESWPQDQPWTKRLVMVKVVPTCLRALVEMARVGGASSLENTVDLHISNSHPLSLTSDQYKAYLQDLVEGMDFQGPGES

SEQ ID NO: 50064 - protein, 427 aa, Homo sapiens; identical to SEQ ID NO: 50062

SEQ ID NO: 50065 - protein, 104 aa, Homo sapiens
MGTPKPRILPWLVSQLDLGQLEGVAWVNKSRTRFRIPWKHGLRQDAQQEDFGIFQELGTFPSQTPLRTPMVEAVLLIPRKTFWMSYWVTWCWPHSQIRDPQAWL

SEQ ID NO: 50066 - protein, 281 aa, Homo sapiens
MVLAPLPDPGPPSLAVAPEPCPQPLRSPSLDNPTPFPNLGPSENPLKRLLVPGEEWEFEVTAFYRGRQVFQQTISCPEGLRLVGSEVGDRTLPGWPVTLPDPGMSLTDRGVMSYVRHVLSCLGGGLALWRAGQWLWAQRLGHCHTYWAVSEELLPNSGHGPDGEVPKDKEGGVFDLGPFIVDLITFTEGSGRSPRYALWFCVGESWPQDQPWTKRLVMVKVVPTCLRALVEMARVGGASSLENTVDLHISNSHPLSLTSDQYKAYLQDLVEGMDFQGPGES

SEQ ID NO: 50067 - protein, 154 aa, Homo sapiens
MVLAPLPDPGPPSLAVAPEPCPQPLRSPSLDNPTPFPNLGPSENPLKRLLVPGEDLITFTEGSGRSPRYALWFCVGESWPQDQPWTKRLVMVKVVPTCLRALVEMARVGGASSLENTVDLHISNSHPLSLTSDQYKAYLQDLVEGMDFQGPGES

SEQ ID NO: 50068 - protein, 281 aa, Homo sapiens; identical to SEQ ID NO: 50066

SEQ ID NO: 50069 - protein, 300 aa, Homo sapiens; identical to SEQ ID NO: 50063

SEQ ID NO: 50070 - protein, 154 aa, Homo sapiens; identical to SEQ ID NO: 50067

SEQ ID NO: 50071 - protein, 467 aa, Homo sapiens
MALHPRRVRLKPWLVAQVDSGLYPGLIWLHRDSKRFQIPWKHATRHSPQQEEENTIFKAWAVETGKYQEGVDDPDPAKWKAQLRCALNKSREFNLMYDGTKEVPMNPVKIYQVCDIPQPQGSIINPGSTGSAPWDEKDNDVDEEDEEDELDQSQHHVPIQDTFPFLNINGSPMAPASVGNCSVGNCSPEAVWPKTEPLEMEVPQAPIQPFYSSPELWISSLPMTDLDIKFQYRGKEYGQTMTVSNPQGCRLFYGDLGPMPDQEELFGPVSLEQVKFPGPEHITNEKQKLFTSKLLDVMDRGLILEVSGHAIYAIRLCQCKVYWSGPCAPSLVAPNLIERQKKVKLFCLETFLSDLIAHQKGQIEKQPPFEIYLCFGEEWPDGKPLERKLILVQVIPVVARMIYEMFSGDFTRSFDSGSVRLQISTPDIKDNIVAQLKQLYRILQTQESWQPMQPTPSMQLPPALPPQ

SEQ ID NO: 50072 - protein, 276 aa, Homo sapiens
MALHPRRVRLKPWLVAQVDSGLYPGLIWLHRDSKRFQIPWKHATRHSPQQEEENTIFKAWAVETGKYQEGVDDPDPAKWKAQLRCALNKSREFNLMYDGTKEVPMNPVKIYQVCDIPQPQGSIINPGSTGSAPWDEKDNDVDEEDEEDELDQSQHHVPIQDTFPFLNINGSPMAPASVGNCSVGNCSPEAVWPKTEPLEMEVPQAPIQPFYSSPELWISSLPMTDLDIKFQYRGKEYGQTMTVSNPQGCRLFYGDLGPMPDQEELFGPVSLEQVKF

SEQ ID NO: 50073 - protein, 372 aa, Homo sapiens
MYDGTKEVPMNPVKIYQVCDIPQPQGSIINPGSTGSAPWDEKDNDVDEEDEEDELDQSQHHVPIQDTFPFLNINGSPMAPASVGNCSVGNCSPEAVWPKTEPLEMEVPQAPIQPFYSSPELWISSLPMTDLDIKFQYRGKEYGQTMTVSNPQGCRLFYGDLGPMPDQEELFGPVSLEQVKFPGPEHITNEKQKLFTSKLLDVMDRGLILEVSGHAIYAIRLCQCKVYWSGPCAPSLVAPNLIERQKKVKLFCLETFLSDLIAHQKGQIEKQPPFEIYLCFGEEWPDGKPLERKLILVQVIPVVARMIYEMFSGDFTRSFDSGSVRLQISTPDIKDNIVAQLKQLYRILQTQESWQPMQPTPSMQLPPALPPQ

SEQ ID NO: 50074 - protein, 426 aa, Homo sapiens
MCDRNGGRRLRQWLIEQIDSSMYPGLIWENEEKSMFRIPWKHAGKQDYNQEVDASIFKAWAVFKGKFKEGDKAEPATWKTRLRCALNKSPDFEEVTDRSQLDISEPYKVYRIVPEEEQKCKLGVATAGCVNEVTEMECGRSEIDELIKEPSVDDYMGMIKRSPSPPEACRSQLLPDWWAQQPSTGVPLVTGYTTYDAHHSAFSQMVISFYYGGKLVGQATTTCPEGCRLSLSQPGLPGTKLYGPEGLELVRFPPADAIPSERQRQVTRKLFGHLERGVLLHSSRQGVFVKRLCQGRVFCSGNAVVCKGRPNKLERDEVVQVFDTSQFFRELQQFYNSQGRLPDGRVVLCFGEEFPDMAPLRSKLILVQIEQLYVRQLAEEAGKSCGAGSVMQAPEEPPPDQVFRMFPDICASHQRSFFRENQQITV

SEQ ID NO: 50075 - protein, 181 aa, Homo sapiens
MAGSREVVAMDCEMVGLGPHRESGLARCSLVNVHGAVLYDKFIRPEGEITDYRTRVSGVTPQHMVGATPFAVARLEILQLLKGKLVVGHDLKHDFQALKEDMSGYTIYDTSTDRLLWREAKLDHCRRVSLRVLSERLLHKSIQNSLLGHSSVEDARATMELYQISQRIRARRGLPRLAVSD

SEQ ID NO: 50076 - protein, 181 aa, Homo sapiens; identical to SEQ ID NO: 50075

SEQ ID NO: 50077 - protein, 353 aa, Homo sapiens
MSTLLLNLDFGEPPPKKALEGNAKHRNFVKKRRLLERRGFLSKKNQPPSKAPKLHSEPSKKGETPTVDGTWKTPSFPKKKTAASSNGSGQPLDKKAAVSWLTPAPSKKADSVAAKVDLLGEFQSALPKINSHPTRSQKKSSQKKSSKKNHPQKNAPQNSTQAHSENKCSGASQKLPRKMVAIDCEMVGTGPKGHVSSLARCSIVNYNGDVLYDEYILPPCHIVDYRTRWSGIRKQHMVNATPFKIARGQILKILTGKIVVGHAIHNDFKALQYFHPKSLTRDTSHIPPLNRKADCPENATMSLKHLTKKLLNRDIQVGKSGHSSVEDAQATMELYKLVEVEWEEHLARNPPTD

SEQ ID NO: 50078 - protein, 353 aa, Homo sapiens; identical to SEQ ID NO: 50077

SEQ ID NO: 50079 - protein, 119 aa, Homo sapiens
MEASALTSSAVTSVAKVVRVASGSAVVLPLARIATVVIGGVVAVPMVLSAMGFTAAGIASSSIAAKMMSAAAIANGGGVASGSLVATLQSLGATGLSGLTKFILGSIGSAIAAVIARFY

SEQ ID NO: 50080 - protein, 122 aa, Homo sapiens
MEASALTSSAVTSVAKVVRVASGSAVVLPLARIATVVIGGGESVVAVPMVLSAMGFTAAGIASSSIAAKMMSAAAIANGGGVASGSLVATLQSLGATGLSGLTKFILGSIGSAIAAVIARFY

SEQ ID NO: 50081 - protein, 122 aa, Homo sapiens
MEASALTSSAVTSVAKVVRVASGSAVVLPLARIATVVIGGVASIVAVPMVLSAMGFTAAGIASSSIAAKMMSAAAIANGGGVASGSLVATLQSLGATGLSGLTKFILGSIGSAIAAVIARFY

SEQ ID NO: 50082 - protein, 62 aa, Homo sapiens
MEASALTSSAVTSVAKVVRVASGSAVVLPLARIATVVIGGVVAVPMVLSAMGFTAAGIASSS

SEQ ID NO: 50083 - protein, 57 aa, Homo sapiens
MEASALTSSAVTSVAKVVRVASGSAVVLPLARIATVVIGGVVAVPMVLSAMGFTAAG

SEQ ID NO: 50084 - protein, 119 aa, Homo sapiens; identical to SEQ ID NO: 50079

SEQ ID NO: 50085 - protein, 40 aa, Homo sapiens
MEASALTSSAVTSVAKVVRVASGSAVVLPLARIATVVIGG

SEQ ID NO: 50086 - protein, 93 aa, Homo sapiens
MEASALTSSAVTSVAKVVRVASGSAVVLPLARIATVVIGGVVAVPMVLSAMGFTAAGIASSSIAAKMMSAAAIANGGGVASGSLVATLQSLGA

SEQ ID NO: 50087 - protein, 785 aa, Homo sapiens
MGKKYKNIVLLKGLEVINDYHFRMVKSLLSNDLKLNLKMREEYDKIQIADLMEEKFRGDAGLGKLIKIFEDIPTLEDLAETLKKEKLKVKGPALSRKRKKEVDATSPAPSTSSTVKTEGAEATPGAQKRKKSTKEKAGPKGSKVSEEQTQPPSPAGAGMSTAMGRSPSPKTSLSAPPNSSSTENPKTVAKCQVTPRRNVLQKRPVIVKVLSTTKPFEYETPEMEKKIMFHATVATQTQFFHVKVLNTSLKEKFNGKKIIIISDYLEYDSLLEVNEESTVSEAGPNQTFEVPNKIINRAKETLKIDILHKQASGNIVYGVFMLHKKTVNQKTTIYEIQDDRGKMDVVGTGQCHNIPCEEGDKLQLFCFRLRKKNQMSKLISEMHSFIQIKKKTNPRNNDPKSMKLPQEQRQLPYPSEASTTFPESHLRTPQMPPTTPSSSFFTKKSEDTISKMNDFMRMQILKEGSHFPGPFMTSIGPAESHPHTPQMPPSTPSSSFLTTKSEDTISKMNDFMRMQILKEGSHFPGPFMTSIGPAESHPHTPQMPPSTPSSSFLTTLKPRLKTEPEEVSIEDSAQSDLKEVMVLNATESFVYEPKEQKKMFHATVATENEVFRVKVFNIDLKEKFTPKKIIAIANYVCRNGFLEVYPFTLVADVNADRNMEIPKGLIRSASVTPKINQLCSQTKGSFVNGVFEVHKKNVRGEFTYYEIQDNTGKMEVVVHGRLTTINCEEGDKLKLTCFELAPKSGNTGELRSVIHSHIKVIKTRKNKKDILNPDSSMETSPDFFF

SEQ ID NO: 50088 - protein, 673 aa, Homo sapiens
MGKKYKNIVLLKGLEVINDYHFRMVKSLLSNDLKLNLKMREEYDKIQIADLMEEKFRGDAGLGKLIKIFEDIPTLEDLAETLKKEKLKVKGPALSRKRKKEVDATSPAPSTSSTVKTEGAEATPGAQKRKKSTKEKAGPKGSKVSEEQTQPPSPAGAGMSTAMGRSPSPKTSLSAPPNSSSTENPKTVAKCQVTPRRNVLQKRPVIVKVLSTTKPFEYETPEMEKKIMFHATVATQTQFFHVKVLNTSLKEKFNGKKIIIISDYLEYDSLLEVNEESTVSEAGPNQTFEVPNKIINRAKETLKIDILHKQASGNIVYGVFMLHKKTVNQKTTIYEIQDDRGKMDVVGTGQCHNIPCEEGDKLQLFCFRLRKKNQMSKLISEMHSFIQIKKKTNPRNNDPKSMKLPQEQRQLPYPSEASTTFPESHLRTPQMPPTTPSSSFFTKLKPRLKTEPEEVSIEDSAQSDLKEVMVLNATESFVYEPKEQKKMFHATVATENEVFRVKVFNIDLKEKFTPKKIIAIANYVCRNGFLEVYPFTLVADVNADRNMEIPKGLIRSASVTPKINQLCSQTKGSFVNGVFEVHKKNVRGEFTYYEIQDNTGKMEVVVHGRLTTINCEEGDKLKLTCFELAPKSGNTGELRSVIHSHIKVIKTRKNKKDILNPDSSMETSPDFFF

SEQ ID NO: 50089 - protein, 414 aa, Homo sapiens
MGKKYKNIVLLKGLEVINDYHFRMVKSLLSNDLKLNLKMREEYDKIQIADLMEEKFRGDAGLGKLIKIFEDIPTLEDLAETLKKEKLKVKGPALSRKRKKEVDATSPAPSTSSTVKTEGAEATPGAQKRKKSTKEKAGPKGSKVSEEQTQPPSPAGAGMSTAMGRSPSPKTSLSAPPNSSSTENPKTVAKCQVTPRRNVLQKRPVIVKVLSTTKPFEYETPEMEKKIMFHATVATQTQFFHVKVLNTSLKEKFTPKKIIAIANYVCRNGFLEVYPFTLVADVNADRNMEIPKGLIRSASVTPKINQLCSQTKGSFVNGVFEVHKKNVRGEFTYYEIQDNTGKMEVVVHGRLTTINCEEGDKLKLTCFELAPKSGNTGELRSVIHSHIKVIKTRKNKKDILNPDSSMETSPDFFF

SEQ ID NO: 50090 - protein, 729 aa, Homo sapiens
MGKKYKNIVLLKGLEVINDYHFRMVKSLLSNDLKLNLKMREEYDKIQIADLMEEKFRGDAGLGKLIKIFEDIPTLEDLAETLKKEKLKVKGPALSRKRKKEVDATSPAPSTSSTVKTEGAEATPGAQKRKKSTKEKAGPKGSKVSEEQTQPPSPAGAGMSTAMGRSPSPKTSLSAPPNSSSTENPKTVAKCQVTPRRNVLQKRPVIVKVLSTTKPFEYETPEMEKKIMFHATVATQTQFFHVKVLNTSLKEKFNGKKIIIISDYLEYDSLLEVNEESTVSEAGPNQTFEVPNKIINRAKETLKIDILHKQASGNIVYGVFMLHKKTVNQKTTIYEIQDDRGKMDVVGTGQCHNIPCEEGDKLQLFCFRLRKKNQMSKLISEMHSFIQIKKKTNPRNNDPKSMKLPQEQRQLPYPSEASTTFPESHLRTPQMPPTTPSSSFFTKKSEDTISKMNDFMRMQILKEGSHFPGPFMTSIGPAESHPHTPQMPPSTPSSSFLTTLKPRLKTEPEEVSIEDSAQSDLKEVMVLNATESFVYEPKEQKKMFHATVATENEVFRVKVFNIDLKEKFTPKKIIAIANYVCRNGFLEVYPFTLVADVNADRNMEIPKGLIRSASVTPKINQLCSQTKGSFVNGVFEVHKKNVRGEFTYYEIQDNTGKMEVVVHGRLTTINCEEGDKLKLTCFELAPKSGNTGELRSVIHSHIKVIKTRKNKKDILNPDSSMETSPDFFF

SEQ ID NO: 50091 - protein, 729 aa, Homo sapiens; identical to SEQ ID NO: 50090

SEQ ID NO: 50092 - protein, 127 aa, Homo sapiens
MGKKYKNIVLLKGLEVINDYHFRMVKSLLSNDLKLNLKMREEYDKIQIADLMEEKFRGDAGLGKLIKIFEDIPTLEDLAETLKKEKLKVKGPALSRKRKKEVDATSPAPSTSSTVKTEGAEATPGAQ

SEQ ID NO: 50093 - protein, 733 aa, Homo sapiens
MSVKMGKKYKNIVLLKGLEVINDYHFRMVKSLLSNDLKLNLKMREEYDKIQIADLMEEKFRGDAGLGKLIKIFEDIPTLEDLAETLKKEKLKVKGPALSRKRKKEVDATSPAPSTSSTVKTEGAEATPGAQNPKTVAKCQVTPRRNVLQKRPVIVKVLSTTKPFEYETPEMEKKIMFHATVATQTQFFHVKVLNTSLKEKFNGKKIIIISDYLEYDSLLEVNEESTVSEAGPNQTFEVPNKIINRAKETLKIDILHKQASGNIVYGVFMLHKKTVNQKTTIYEIQDDRGKMDVVGTGQCHNIPCEEGDKLQLFCFRLRKKNQMSKLISEMHSFIQIKKKTNPRNNDPKSMKLPQEQRQLPYPSEASTTFPESHLRTPQMPPTTPSSSFFTKKSEDTISKMNDFMRMQILKEGSHFPGPFMTSIGPAESHPHTPQMPPSTPSSSFLTTKSEDTISKMNDFMRMQILKEGSHFPGPFMTSIGPAESHPHTPQMPPSTPSSSFLTTLKPRLKTEPEEVSIEDSAQSDLKEVMVLNATESFVYEPKEQKKMFHATVATENEVFRVKVFNIDLKEKFTPKKIIAIANYVCRNGFLEVYPFTLVADVNADRNMEIPKGLIRSASVTPKINQLCSQTKGSFVNGVFEVHKKNVRGEFTYYEIQDNTGKMEVVVHGRLTTINCEEGDKLKLTCFELAPKSGNTGELRSVIHSHIKVIKTRKNKKDILNPDSSMETSPDFFF

SEQ ID NO: 50094 - protein, 180 aa, Homo sapiens
MGKKYKNIVLLKGLEVINDYHFRMVKSLLSNDLKLNLKMREEYDKIQIADLMEEKFRGDAGLGKLIKIFEDIPTLEDLAETLKKEKLKVKGPALSRKRKKEVDATSPAPSTSSTVKTEGAEATPGAQKRKKSTKEKAGPKGSKVSEEQTQPPSPAGAGMSTAMGRSPSPKTSLSAPPNSS

SEQ ID NO: 50095 - protein, 494 aa, Homo sapiens
  VARIANT 1: note = MOD_RES - Any amino acid
XSTENPKTVAKCQVTPRRNVLQKRPVIVKVLSTTKPFEYETPEMEKKIMFHATVATQTQFFHVKVLNTSLKEKFNGKKIIIISDYLEYDSLLEVNEESTVSEAGPNQTFEVPNKIINRAKETLKIDILHKQASGNIVYGVFMLHKKTVNQKTTIYEIQDDRGKMDVVGTGQCHNIPCEEGDKLQLFCFRLRKKNQMSKLISEMHSFIQIKKKTNPRNNDPKSMKLPQEQRQLPYPSEASTTFPESHLRTPQMPPTTPSSSFFTKLKPRLKTEPEEVSIEDSAQSDLKEVMVLNATESFVYEPKEQKKMFHATVATENEVFRVKVFNIDLKEKFTPKKIIAIANYVCRNGFLEVYPFTLVADVNADRNMEIPKGLIRSASVTPKINQLCSQTKGSFVNGVFEVHKKNVRGEFTYYEIQDNTGKMEVVVHGRLTTINCEEGDKLKLTCFELAPKSGNTGELRSVIHSHIKVIKTRKNKKDILNPDSSMETSPDFFF

SEQ ID NO: 50096 - protein, 250 aa, Homo sapiens
MTLSPLLLFLPPLLLLLDVPTAAVQASPLQALDFFGNGPPVNYKTGNLYLRGPLKKSNAPLVNVTLYYEALCGGCRAFLIRELFPTWLLVMEILNVTLVPYGNAQEQNVSGRWEFKCQHGEEECKFNKVEACVLDELDMELAFLTIVCMEEFEDMERSLPLCLQLYAPGLSPDTIMECAMGDRGMQLMHANAQRTDALQPPHEYVPWVTVNGKPLEDQTQLLTLVCQLYQGKKPDVCPSSTSSLRSVCFK

SEQ ID NO: 50097 - protein, 195 aa, Homo sapiens
MALLFPLLAALVMTSYSPVGSLGCDLPQNHGLLSRNTLVLLHQMRRISPFLCLKDRRDFRFPQEMVKGSQLQKAHVMSVLHEMLQQIFSLFHTERSSAAWNMTLLDQLHTGLHQQLQHLETCLLQVVGEGESAGAISSPALTLRRYFQGIRVYLKEKKYSDCAWEVVRMEIMKSLFLSTNMQERLRSKDRDLGSS

SEQ ID NO: 50098 - protein, 286 aa, Homo sapiens
MSAPLDAALHALQEEQARLKMRLWDLQQLRKELGDSPKDKVPFSVPKIPLVFRGHTQQDPEVPKSLVSNLRIHCPLLAGSALITFDDPKVAEQVLQQKEHTINMEECRLRVQVQPLELPMVTTIQMSSQLSGRRVLVTGFPASLRLSEEELLDKLEIFFGKTRNGGGDVDVRELLPGSVMLGFARDGVAQRLCQIGQFTVPLGGQQVPLRVSPYVNGEIQKAEIRSQPVPRSVLVLNIPDILDGPELHDVLEIHFQKPTRGGGEVEALTVVPQGQQGLAVFTSESG

SEQ ID NO: 50099 - protein, 288 aa, Homo sapiens
MSAPLDAALHALQEEQARLKMRLWDLQQLRKELGDSPKDKVPFSVPKIPLVFRGHTQQDPEVPKSLVSNLRIHCPLLAGSALITFDDPKVAEQVLQQKEHTINMEECRLRVQVQPLELPMVTTIQVMMSSQLSGRRVLVTGFPASLRLSEEELLDKLEIFFGKTRNGGGDVDVRELLPGSVMLGFARDGVAQRLCQIGQFTVPLGGQQVPLRVSPYVNGEIQKAEIRSQPVPRSVLVLNIPDILDGPELHDVLEIHFQKPTRGGGEVEALTVVPQGQQGLAVFTSESG

SEQ ID NO: 50100 - protein, 444 aa, Homo sapiens
MAVTTRLTWLHEKILQNHFGGKRLSLLYKGSVHGFRNGVLLDRCCNQGPTLTVIYSEDHIIGAYAEESYQEGKYASIILFALQDTKISEWKLGLCTPETLFCCDVTKYNSPTNFQIDGRNRKVIMDLKTMENLGLAQNCTISIQDYEVFRCEDSLDERKIKGVIELRKSLLSALRTYEPYGSLVQQIRILLLGPIGAGKSSFFNSVRSVFQGHVTHQALVGTNTTGISEKYRTYSIRDGKDGKYLPFILCDSLGLSEKEGGLCRDDIFYILNGNIRDRYQFNPMESIKLNHHDYIDSPSLKDRIHCVAFVFDASSIQYFSSQMIVKIKRIRRELVNAGVVHVALLTHVDSMDLITKGDLIEIERCEPVRSKLEEVQRKLGFALSDISVVSNYSSEWELDPVKDVLILSALRRMLWAADDFLEDLPFEQIGNLREEIINCAQGKK

SEQ ID NO: 50101 - protein, 195 aa, Homo sapiens
MDLKTMENLGLAQNCTISIQDYEVFRCEDSLDERKIKGVIELRKSLLSALRTYEPYGSLVQQIRILLLGPIGAGKSSFFNSVRSVFQGHVTHQALVGTNTTGISEKYRTYSIRDGKDGKYLPFILCDSLGLSEKEGGLCRDDIFYILNGNIRDRYQFNPMESIKLNHHDYIDSPSLKDRIHCVAFVFDASSIQYF

SEQ ID NO: 50102 - protein, 76 aa, Homo sapiens
  VARIANT 1: note = MOD_RES - Any amino acid
XLSDISVVSNYSSEWELDPVKDVLILSALRRMLWAADDFLEDLPFEQIGRWFGGVEAWKRSGNLREEIINCAQGKK

SEQ ID NO: 50103 - protein, 129 aa, Homo sapiens
MESIKLNHHDYIDSPSLKDRIHCVAFVFDASSIQYFSSQMIVKIKRIRRELVNAGVVHVALLTHVDSMDLITKGDLIEIERCEPVRSKVMNDALRKHIFWGMLLQSHTSVYKNKNKQLLGLRRITKLLK

SEQ ID NO: 50104 - protein, 194 aa, Homo sapiens
MLCDTMGLDGAEGAGLCMDDIPHILKGCMPDRYQFNSRKPITPEHSTFITSPSLKDRIHCVAYVLDINSIDNLYSKMLAKVKQVHKEVLNCGIAYVALLTKVDDCSEVLQDNFLNMSRSMTSQSRVMNVHKMLGIPISNILMVGNYASDLELDPMKDILILSALRQMLRAADDFLEDLPLEETGAIERALQPCI

SEQ ID NO: 50105 - protein, 452 aa, Homo sapiens
MEVTTRLTWNDENHLRKLLGNVSLSLLYKSSVHGGSIEDMVERCSRQGCTITMAYIDYNMIVAFMLGNYINLHESSTEPNDSLWFSLQKKNDTTEIETLLLNTAPKIIDEQLVCRLSKTDIFIICRDNKIYLDKMITRNLKLRFYGHRQYLECEVFRVEGIKDNLDDIKRIIKAREHRNRLLADIRDYRPYADLVSEIRILLVGPVGSGKSSFFNSVKSIFHGHVTGQAVVGSDITSITERYRIYSVKDGKNGKSLPFMLCDTMGLDGAEGAGLCMDDIPHILKGCMPDRYQFNSRKPITPEHSTFITSPSLKDRIHCVAYVLDINSIDNLYSKMLAKVKQVHKEVLNCGIAYVALLTKVDDCSEVLQDNFLNMSRSMTSQSRVMNVHKMLGIPISNILMVGNYASDLELDPMKDILILSALRQMLRAADDFLEDLPLEETGAIERALQPCI

SEQ ID NO: 50106 - protein, 97 aa, Homo sapiens
MEVTTRLTWNDENHLRKLLGNVSLSLLYKSSVHGGSIEDMVERCSRQGCTITMAYIDYNMIVAFMLGNYINLHESSTEPNDSLWFSLQKKNDTTEIE

SEQ ID NO: 50107 - protein, 478 aa, Homo sapiens
MSTNGDDHQVKDSLEQLRCHFTWELSIDDDEMPDLENRVLDQIEFLDTKYSVGIHNLLAYVKHLKGQNEEALKSLKEAENLMQEEHDNQANVRSLVTWGNFAWMYYHMGRLAEAQTYLDKVENICKKLSNPFRYRMECPEIDCEEGWALLKCGGKNYERAKACFEKVLEVDPENPESSAGYAISAYRLDGFKLATKNHKPFSLLPLRQAVRLNPDNGYIKVLLALKLQDEGQEAEGEKYIEEALANMSSQTYVFRYAAKFYRRKGSVDKALELLKKALQETPTSVLLHHQIGLCYKAQMIQIKEATKGQPRGQNREKLDKMIRSAIFHFESAVEKKPTFEVAHLDLARMYIEAGNHRKAEENFQKLLCMKPVVEETMQDIHFHYGRFQEFQKKSDVNAIIHYLKAIKIEQASLTRDKSINSLKKLVLRKLRRKALDLESLSLLGFVYKLEGNMNEALEYYERALRLAADFENSVRQGP

SEQ ID NO: 50108 - protein, 447 aa, Homo sapiens
MPDLENRVLDQIEFLDTKYSVGIHNLLAYVKHLKGQNEEALKSLKEAENLMQEEHDNQANVRSLVTWGNFAWMYYHMGRLAEAQTYLDKVENICKKLSNPFRYRMECPEIDCEEGWALLKCGGKNYERAKACFEKVLEVDPENPESSAGYAISAYRLDGFKLATKNHKPFSLLPLRQAVRLNPDNGYIKVLLALKLQDEGQEAEGEKYIEEALANMSSQTYVFRYAAKFYRRKGSVDKALELLKKALQETPTSVLLHHQIGLCYKAQMIQIKEATKGQPRGQNREKLDKMIRSAIFHFESAVEKKPTFEVAHLDLARMYIEAGNHRKAEENFQKLLCMKPVVEETMQDIHFHYGRFQEFQKKSDVNAIIHYLKAIKIEQASLTRDKSINSLKKLVLRKLRRKALDLESLSLLGFVYKLEGNMNEALEYYERALRLAADFENSVRQGP

SEQ ID NO: 50109 - protein, 472 aa, Homo sapiens
MSENNKNSLESSLRQLKCHFTWNLMEGENSLDDFEDKVFYRTEFQNREFKATMCNLLAYLKHLKGQNEAALECLRKAEELIQQEHADQAEIRSLVTWGNYAWVYYHMGRLSDVQIYVDKVKHVCEKFSSPYRIESPELDCEEGWTRLKCGGNQNERAKVCFEKALEKKPKNPEFTSGLAIASYRLDNWPPSQNAIDPLRQAIRLNPDNQYLKVLLALKLHKMREEGEEEGEGEKLVEEALEKAPGVTDVLRSAAKFYRRKDEPDKAIELLKKALEYIPNNAYLHCQIGCCYRAKVFQVMNLRENGMYGKRKLLELIGHAVAHLKKADEANDNLFRVCSILASLHALADQYEDAEYYFQKEFSKELTPVAKQLLHLRYGNFQLYQMKCEDKAIHHFIEGVKINQKSREKEKMKDKLQKIAKMRLSKNGADSEALHVLAFLQELNEKMQQADEDSERGLESGSLIPSASSWNGE

SEQ ID NO: 50110 - protein, 451 aa, Homo sapiens
MPKNKKRNTPHRGSSAGGGGSGAAAATAATAGGQHRNVQPFSDEDASIETMSHCSGYSDPSSFAEDGPEVLDEEGTQEDLEYKLKGLIDLTLDKSAKTRQAALEGIKNALASKMLYEFILERRMTLTDSIERCLKKGKSDEQRAAAALASVLCIQLGPGIESEEILKTLGPILKKIICDGSASMQARQTCATCFGVCCFIATDDITELYSTLECLENIFTKSYLKEKDTTVICSTPNTVLHISSLLAWTLLLTICPINEVKKKLEMHFHKLPSLLSCDDVNMRIAAGESLALLFELARGIESDFFYEDMESLTQMLRALATDGNKHRAKVDKRKQRSVFRDVLRAVEERDFPTETIKFGPERMYIDCWVKKHTYDTFKEVLGSGMQYHLQSNEFLRNVFELGPPVMLDAATLKTMKISRFERHLYNSAAFKARTKARSKCRDKRADVGEFF

SEQ ID NO: 50111 - protein, 451 aa, Homo sapiens; identical to SEQ ID NO: 50110

SEQ ID NO: 50112 - protein, 18 aa, Homo sapiens
MPKNKKRNTPHRGSSAGG

SEQ ID NO: 50113 - protein, 31 aa, Homo sapiens
MPKNKKRNTPHRGSSAGGGGSGAAAATAATA

SEQ ID NO: 50114 - protein, 62 aa, Homo sapiens
MPKNKKRNTPHRGSSAGGGGSGAAAATAATAGGQHRNVQPFSDEDASIETMSHCSGYSDPSS

SEQ ID NO: 50115 - protein, 401 aa, Homo sapiens
MSHCSGYSDPSSFAEDGPEVLDEEGTQEDLEYKLKGLIDLTLDKSAKTRQAALEGIKNALASKMLYEFILERRMTLTDSIERCLKKGKSDEQRAAAALASVLCIQLGPGIESEEILKTLGPILKKIICDGSASMQARQTCATCFGVCCFIATDDITELYSTLECLENIFTKSYLKEKDTTVICSTPNTVLHISSLLAWTLLLTICPINEVKKKLEMHFHKLPSLLSCDDVNMRIAAGESLALLFELARGIESDFFYEDMESLTQMLRALATDGNKHRAKVDKRKQRSVFRDVLRAVEERDFPTETIKFGPERMYIDCWVKKHTYDTFKEVLGSGMQYHLQSNEFLRNVFELGPPVMLDAATLKTMKISRFERHLYNSAAFKARTKARSKCRDKRADVGEFF

SEQ ID NO: 50116 - protein, 157 aa, Homo sapiens
MHFHKLPSLLSCDDVNMRIAAGESLALLFELARGIESDFFYEDMESLTQMLRALATDGNKHRAKVDKRKQRSVFRDVLRAVEERDFPTETIKFGPERMYIDCWVKKHTYDTFKEVLGSGMQYHLQSNEFLRNVFELGPPVMLDAATLKTMKISRFER

SEQ ID NO: 50117 - protein, 608 aa, Homo sapiens
MGPKKSWRSHFFPLPEVWLLLLLSQALSPSHGPQTQAGVGLVWSVPLPSALRSQSCLGAPLRDASELTTVHLFPTRGWGARRALWVHSSASASSAASRRRLRAQASGISSFSLVDGGAPREDGGARGVWLPSSGQVSAQRTGRRLVGLEPTPTGSLTPRPPRPVPGMPRARKGNTLRKGGQRRGGGARSSAQADSGSSDDEAASEARSTASECPSLLSTTAEDSLGGDVVDEQGQQEDLEEKLKEYVDCLTDKSAKTRQGALESLRLALASRLLPDFLLERRLTLADALEKCLKKGKGEEQALAAAVLGLLCVQLGPGPKGEELFHSLQPLLVSVLSDSTASPAARLHCASALGLGCYVAAADIQDLVSCLACLESVFSRFYGLGGSSTSPVVPASLHGLLSAALQAWALLLTICPSTQISHILDRQLPRLPQLLSSESVNLRIAAGETIALLFELARDLEEEFVYEDMEALCSVLRTLATDSNKYRAKADRRRQRSTFRAVLHSVEGGECEEEIVRFGFEVLYMDSWARHRIYAAFKEVLGSGMHHHLQNNELLRDIFGLGPVLLLDATALKACKVPRFEKHLYNAAAFKARTKARSRVRDKRADIL

SEQ ID NO: 50118 - protein, 442 aa, Homo sapiens
MPRARKGNTLRKGGQRRGGGARSSAQADSGSSDDEAASEARSTASECPSLLSTTAEDSLGGDVVDEQGQQEDLEEKLKEYVDCLTDKSAKTRQGALESLRLALASRLLPDFLLERRLTLADALEKCLKKGKGEEQALAAAVLGLLCVQLGPGPKGEELFHSLQPLLVSVLSDSTASPAARLHCASALGLGCYVAAADIQDLVSCLACLESVFSRFYGLGGSSTSPVVPASLHGLLSAALQAWALLLTICPSTQISHILDRQLPRLPQLLSSESVNLRIAAGETIALLFELARDLEEEFVYEDMEALCSVLRTLATDSNKYRAKADRRRQRSTFRAVLHSVEGGECEEEIVRFGFEVLYMDSWARHRIYAAFKEVLGSGMHHHLQNNELLRDIFGLGPVLLLDATALKACKVPRFEKHLYNAAAFKARTKARSRVRDKRADIL

SEQ ID NO: 50119 - protein, 506 aa, Homo sapiens
MAWNSPSRRPVWQGGAPREDGGARGVWLPSSGQVSAQRTGRRLVGLEPTPTGSLTPRPPRPVPGMPRARKGNTLRKGGQRRGGGARSSAQADSGSSDDEAASEARSTASECPSLLSTTAEDSLGGDVVDEQGQQEDLEEKLKEYVDCLTDKSAKTRQGALESLRLALASRLLPDFLLERRLTLADALEKCLKKGKGEEQALAAAVLGLLCVQLGPGPKGEELFHSLQPLLVSVLSDSTASPAARLHCASALGLGCYVAAADIQDLVSCLACLESVFSRFYGLGGSSTSPVVPASLHGLLSAALQAWALLLTICPSTQISHILDRQLPRLPQLLSSESVNLRIAAGETIALLFELARDLEEEFVYEDMEALCSVLRTLATDSNKYRAKADRRRQRSTFRAVLHSVEGGECEEEIVRFGFEVLYMDSWARHRIYAAFKEVLGSGMHHHLQNNELLRDIFGLGPVLLLDATALKACKVPRFEKHLYNAAAFKARTKARSRVRDKRADIL

SEQ ID NO: 50120 - protein, 442 aa, Homo sapiens; identical to SEQ ID NO: 50118

SEQ ID NO: 50121 - protein, 570 aa, Homo sapiens
MTLLWCVVSLYFYGILQSDASERCDDWGLDTMRQIQVFEDEPARIKCPLFEHFLKFNYSTAHSAGLTLIWYWTRQDRDLEEPINFRLPENRISKEKDVLWFRPTLLNDTGNYTCMLRNTTYCSKVAFPLEVVQKDSCFNSPMKLPVHKLYIEYGIQRITCPNVDGYFPSSVKPTITWYMGCYKIQNFNNVIPEGMNLSFLIALISNNGNYTCVVTYPENGRTFHLTRTLTVKVVGSPKNAVPPVIHSPNDHVVYEKEPGEELLIPCTVYFSFLMDSRNEVWWTIDGKKPDDITIDVTINESISHSRTEDETRTQILSIKKVTSEDLKRSYVCHARSAKGEVAKAAKVKQKVPAPRYTVELACGFGATVLLVVILIVVYHVYWLEMVLFYRAHFGTDETILDGKEYDIYVSYARNAEEEEFVLLTLRGVLENEFGYKLCIFDRDSLPGGIVTDETLSFIQKSRRLLVVLSPNYVLQGTQALLELKAGLENMASRGNINVILVQYKAVKETKVKELKRAKTVLTVIKWKGEKSKYPQGRFWKQLQVAMPVKKSPRRSSSDEQGLSYSSLKNV

SEQ ID NO: 50122 - protein, 687 aa, Homo sapiens
MTLLWCVVSLYFYGILQSDASERCDDWGLDTMRQIQVFEDEPARIKCPLFEHFLKFNYSTAHSAGLTLIWYWTRQDRDLEEPINFRLPENRISKEKDVLWFRPTLLNDTGNYTCMLRNTTYCSKVAFPLEVVQKDSCFNSPMKLPVHKLYIEYGIQRITCPNVDGYFPSSVKPTITWYMGCYKIQNFNNVIPEGMNLSFLIALISNNGNYTCVVTYPENGRTFHLTRTLTVKVVGSPKNAVPPVIHSPNDHVVYEKEPGEELLIPCTVYFSFLMDSRNEVWWTIDGKKPDDITIDVTINESISHSRTEDETRTQILSIKKVTSEDLKRSYVCHARSAKGEVAKAAKVKQKVPAPRYTVELACGFGATVLLVVILIVVYHVYWLEMVLFYRAHFGTDETILDGKEYDIYVSYARNAEEEEFVLLTLRGVLENEFGYKLCIFDRDSLPGGNTVEAVFDFIQRSRRMIVVLSPDYVTEKSISMLEFKLGVMCQNSIATKLIVVEYRPLEHPHPGILQLKESVSFVSWKGEKSKHSGSKFWKALRLALPLRSLSASSGWNESCSSQSDISLDHVQRRRSRLKEPPELQSSERAAGSPPAPGTMSKHRGKSSATCRCCVTYCEGENHLRNKSRAEIHNQPQWETHLCKPVPQESETQWIQNGTRLEPPAPQISALALHHFTDLSNNNDFYIL

SEQ ID NO: 50123 - protein, 570 aa, Homo sapiens; identical to SEQ ID NO: 50121

SEQ ID NO: 50124 - protein, 356 aa, Homo sapiens
MTLLWCVVSLYFYGILQSDASERCDDWGLDTMRQIQVFEDEPARIKCPLFEHFLKFNYSTAHSAGLTLIWYWTRQDRDLEEPINFRLPENRISKEKDVLWFRPTLLNDTGNYTCMLRNTTYCSKVAFPLEVVQKDSCFNSPMKLPVHKLYIEYGIQRITCPNVDGYFPSSVKPTITWYMGCYKIQNFNNVIPEGMNLSFLIALISNNGNYTCVVTYPENGRTFHLTRTLTVKVVGSPKNAVPPVIHSPNDHVVYEKEPGEELLIPCTVYFSFLMDSRNEVWWTIDGKKPDDITIDVTINESISHSRTEDETRTQILSIKKVTSEDLKRSYVCHARSAKGEVAKAAKVKQKGNRCGQ

SEQ ID NO: 50125 - protein, 113 aa, Homo sapiens
MTLLWCVVSLYFYGILQSDASERCDDWGLDTMRQIQVFEDEPARIKCPLFEHFLKFNYSTAHSAGLTLIWYWTRQDRDLEEPINFRLPENRISKEKDVLWFRPTLLNDTGNYT

SEQ ID NO: 50126 - protein, 356 aa, Homo sapiens; identical to SEQ ID NO: 50124

SEQ ID NO: 50127 - protein, 570 aa, Homo sapiens; identical to SEQ ID NO: 50121

SEQ ID NO: 50128 - protein, 687 aa, Homo sapiens; identical to SEQ ID NO: 50122

SEQ ID NO: 50129 - protein, 570 aa, Homo sapiens; identical to SEQ ID NO: 50121

SEQ ID NO: 50130 - protein, 145 aa, Homo sapiens
MTLLWCVVSLYFYGILQSDASERCDDWGLDTMRQIQVFEDEPARIKCPLFEHFLKFNYSTAHSAGLTLIWYWTRQDRDLEEPINFRLPENRISKEKDVLWFRPTLLNDTGNYTCMLRNTTYCSKVAFPLEVVQKDSCFNSPMKLP

SEQ ID NO: 50131 - protein, 696 aa, Homo sapiens
MKAPIPHLILLYATFTQSLKVVTKRGSADGCTDWSIDIKKYQVLVGEPVRIKCALFYGYIRTNYSLAQSAGLSLMWYKSSGPGDFEEPIAFDGSRMSKEEDSIWFRPTLLQDSGLYACVIRNSTYCMKVSISLTVGENDTGLCYNSKMKYFEKAELSKSKEISCRDIEDFLLPTREPEILWYKECRTKTWRPSIVFKRDTLLIREVREDDIGNYTCELKYGGFVVRRTTELTVTAPLTDKPPKLLYPMESKLTIQETQLGDSANLTCRAFFGYSGDVSPLIYWMKGEKFIEDLDENRVWESDIRILKEHLGEQEVSISLIVDSVEEGDLGNYSCYVENGNGRRHASVLLHKRELMYTVELAGGLGAILLLLVCLVTIYKCYKIEIMLFYRNHFGAEELDGDNKDYDAYLSYTKVDPDQWNQETGEEERFALEILPDMLEKHYGYKLFIPDRDLIPTGTYIEDVARCVDQSKRLIIVMTPNYVVRRGWSIFELETRLRNMLVTGEIKVILIECSELRGIMNYQEVEALKHTIKLLTVIKWHGPKCNKLNSKFWKRLQYEMPFKRIEPITHEQALDVSEQGPFGELQTVSAISMAAATSTALATAHPDLRSTFHNTYHSQMRQKHYYRSYEYDVPPTGTLPLTSIGNQHTYCNIPMTLINGQRPQTKSSREQNPDEAHTNSAILPLLPRETSISSVIW

SEQ ID NO: 50132 - protein, 696 aa, Homo sapiens; identical to SEQ ID NO: 50131

SEQ ID NO: 50133 - protein, 686 aa, Homo sapiens
MKPPFLLALVVCSVVSTNLKMVSKRNSVDGCIDWSVDLKTYMALAGEPVRVKCALFYSYIRTNYSTAQSTGLRLMWYKNKGDLEEPIIFSEVRMSKEEDSIWFHSAEAQDSGFYTCVLRNSTYCMKVSMSLTVAENESGLCYNSRIRYLEKSEVTKRKEISCPDMDDFKKSDQEPDVVWYKECKPKMWRSIIIQKGNALLIQEVQEEDGGNYTCELKYEGKLVRRTTELKVTALLTDKPPKPLFPMENQPSVIDVQLGKPLNIPCKAFFGFSGESGPMIYWMKGEKFIEELAGHIREGEIRLLKEHLGEKEVELALIFDSVVEADLANYTCHVENRNGRKHASVLLRKKDLIYKIELAGGLGAIFLLLVLLVVIYKCYNIELMLFYRQHFGADETNDDNKEYDAYLSYTKVDQDTLDCDNPEEEQFALEVLPDVLEKHYGYKLFIPERDLIPSGTYMEDLTRYVEQSRRLIIVLTPDYILRRGWSIFELESRLHNMLVSGEIKVILIECTELKGKVNCQEVESLKRSIKLLSLIKWKGSKSSKLNSKFWKHLVYEMPIKKKEMLPRCHVLDSAEQGLFGELQPIPSIAMTSTSATLVSSQADLPEFHPSDSMQIRHCCRGYKHEIPATTLPVPSLGNHHTYCNLPLTLLNGQLPLNNTLKDTQEFHRNSSLLPLSSKELSFTSDIW

SEQ ID NO: 50134 - protein, 686 aa, Homo sapiens; identical to SEQ ID NO: 50133

SEQ ID NO: 50135 - protein, 291 aa, Homo sapiens [sequence omitted]

SEQ ID NO: 50136 - protein, 398 aa, Homo sapiens
MLRLYVLVMGVSAFTLQPAAHTGAARSCRFRGRHYKREFRLEGEPVALRCPQVPYWLWASVSPRINLTWHKNDSARTVPGEEETRMWAQDGALWLLPALQEDSGTYVCTTRNASYCDKMSIELRVFENTDAFLPFISYPQILTLSTSGVLVCPDLSEFTRDKTDVKIQWYKDSLLLDKDNEKFLSVRGTTHLLVHDVALEDAGYYRCVLTFAHEGQQYNITRSIELRIKKKKEETIPVIISPLKTISASLGSRLTIPCKVFLGTGTPLTTMLWWTANDTHIESAYPGGRVTEGPRQEYSENNENYIEVPLIFDPVTREDLHMDFKCVVHNTLSFQTLRTTVKEASSTFSWGIVLAPLSLAFLVLGGIWMHRRCKHRTGKADGLTVLWPHHQDFQSYPK

SEQ ID NO: 50137 - protein, 398 aa, Homo sapiens; identical to SEQ ID NO: 50136

SEQ ID NO: 50138 - protein, 229 aa, Homo sapiens
MLRLYVLVMGVSAFTLQPAAHTGAARSCRFRGRHYKREFRLEGEPVALRCPQVPYWLWASVSPRINLTWHKNDSARTVPGEEETRMWAQDGALWLLPALQEDSGTYVCTTRNASYCDKMSIELRVFENTDAFLPFISYPQILTLSTSGVLVCPDLSEFTRDKTDVKIQWYKDSLLLDKDNEKFLSVRGTTHLLVHDVALEDAGYYRCVLTFAHEGQQYNITRSIELRIK

SEQ ID NO: 50139 - protein, 556 aa, Homo sapiens
MGFWILAILTILMYSTAAKFSKQSWGLENEALIVRCPRQGKPSYTVDWYYSQTNKSIPTQERNRVFASGQLLKFLPAAVADSGIYTCIVRSPTFNRTGYANVTIYKKQSDCNVPDYLMYSTVSGSEKNSKIYCPTIDLYNWTAPLEWFKNCQALQGSRYRAHKSFLVIDNVMTEDAGDYTCKFIHNENGANYSVTATRSFTVKDEQGFSLFPVIGAPAQNEIKEVEIGKNANLTCSACFGKGTQFLAAVLWQLNGTKITDFGEPRIQQEEGQNQSFSNGLACLDMVLRIADVKEEDLLLQYDCLALNLHGLRRHTVRLSRKNPIDHHSIYCIIAVCSVFLMLINVLVIILKMFWIEATLLWRDIAKPYKTRNDGKLYDAYVVYPRNYKSSTDGASRVEHFVHQILPDVLENKCGYTLCIYGRDMLPGEDVVTAVETNIRKSRRHIFILTPQITHNKEFAYEQEVALHCALIQNDAKVILIEMEALSELDMLQAEALQDSLQHLMKVQGTIKWREDHIANKRSLNSKFWKHVRYQMPVPSKIPRKASSLTPLAAQKQ

SEQ ID NO: 50140 - protein, 328 aa, Homo sapiens
MGFWILAILTILMYSTAAKFSKQSWGLENEALIVRCPRQGKPSYTVDWYYSQTNKSIPTQERNRVFASGQLLKFLPAAVADSGIYTCIVRSPTFNRTGYANVTIYKKQSDCNVPDYLMYSTVSGSEKNSKIYCPTIDLYNWTAPLEWFKNCQALQGSRYRAHKSFLVIDNVMTEDAGDYTCKFIHNENGANYSVTATRSFTVKDEQGFSLFPVIGAPAQNEIKEVEIGKNANLTCSACFGKGTQFLAAVLWQLNGTKITDFGEPRIQQEEGQNQSFSNGLACLDMVLRIADVKEEDLLLQYDCLALNLHGLRRHTVRLSRKNPSKECF

SEQ ID NO: 50141 - protein, 259 aa, Homo sapiens
MGFWILAILTILMYSTAAKFSKQSWGLENEALIVRCPRQGKPSYTVDWYYSQTNKSIPTQERNRVFASGQLLKFLPAAVADSGIYTCIVRSPTFNRTGYANVTIYKKQSDCNVPDYLMYSTVSGSEKNSKIYCPTIDLYNWTAPLEWFKNCQALQGSRYRAHKSFLVIDNVMTEDAGDYTCKFIHNENGANYSVTATRSFTVKVWCQSFCKLKKSLIFSNTHWIQSLMRGFVMVYYGVHKCCRVVFNLCLQYFQHHQWP

SEQ ID NO: 50142 - protein, 211 aa, Homo sapiens
MYSTVSGSEKNSKIYCPTIDLYNWTAPLEWFKNCQALQGSRYRAHKSFLVIDNVMTEDAGDYTCKFIHNENGANYSVTATRSFTVKDEQGFSLFPVIGAPAQNEIKEVEIGKNANLTCSACFGKGTQFLAAVLWQLNGTKITDFGEPRIQQEEGQNQSFSNGLACLDMVLRIADVKEEDLLLQYDCLALNLHGLRRHTVRLSRKNPSKECF

SEQ ID NO: 50143 - protein, 314 aa, Homo sapiens
MGFWILAILTILMYSTAAKFSKQSWGLENEALIVRCPRQGKPSYTVDWYYSQTNKSIPTQERNRVFASGQLLKFLPAAVADSGIYTCIVRSPTFNRTGYANVTIYKKQSDCNVPDYLMYSTVSGSEKNSKIYCPTIDLYNWTAPLEWFKNCQALQGSRYRAHKSFLVIDNVMTEDAGDYTCKFIHNENGANYSVTATRSFTVKDEQGFSLFPVIGAPAQNEIKEVEIGTQFLAAVLWQLNGTKITDFGEPRIQQEEGQNQSFSNGLACLDMVLRIADVKEEDLLLQYDCLALNLHGLRRHTVRLSRKNPSKECF

SEQ ID NO: 50144 - protein, 38 aa, Homo sapiens
MGFWILAILTILMYSTAAKFSKQSWGLENEALIVRCPR

SEQ ID NO: 50145 - protein, 575 aa, Homo sapiens
MWSLLLCGLSIALPLSVTADGCKDIFMKNEILSASQPFAFNCTFPPITSGEVSVTWYKNSSKIPVSKIIQSRIHQDETWILFLPMEWGDSGVYQCVIKGRDSCHRIHVNLTVFEKHWCDTSIGGLPNLSDEYKQILHLGKDDSLTCHLHFPKSCVLGPIKWYKDCNEIKGERFTVLETRLLVSNVSAEDRGNYACQAILTHSGKQYEVLNGITVSITERAGYGGSVPKIIYPKNHSIEVQLGTTLIVDCNVTDTKDNTNLRCWRVNNTLVDDYYDESKRIREGVETHVSFREHNLYTVNITFLEVKMEDYGLPFMCHAGVSTAYIILQLPAPDFRAYLIGGLIALVAVAVSVVYIYNIFKIDIVLWYRSAFHSTETIVDGKLYDAYVLYPKPHKESQRHAVDALVLNILPEVLERQCGYKLFIFGRDEFPGQAVANVIDENVKLCRRLIVIVVPESLGFGLLKNLSEEQIAVYSALIQDGMKVILIELEKIEDYTVMPESIQYIKQKHGAIRWHGDFTEQSQCMKTKFWKTVRYHMPPRRCRPFPPVQLLQHTPCYRTAGPELGSRRKKCTLTTG

SEQ ID NO: 50146 - protein, 172 aa, Homo sapiens
MWSLLLCGLSIALPLSVTADGCKDIFMKNEILSASQPFAFNCTFPPITSGEVSVTWYKNSSKIPVSKIIQSRIHQDETWILFLPMEWGDSGVYQCVIKGRDSCHRIHVNLTVFEKHWCDTSIGGLPNLSDEYKQILHLGKDDSLTCHLHFPKSCVLGPIKWYKDCNEIKGER

SEQ ID NO: 50147 - protein, 457 aa, Homo sapiens
MTGLVSLSYFPLSTRSCALQSCSPVWGCGPCCSAGCPSPFHCLSQQDCNEIKGERFTVLETRLLVSNVSAEDRGNYACQAILTHSGKQYEVLNGITVSIKRAGYGGSVPKIIYPKNHSIEVQLGTTLIVDCNVTDTKDNTNLRCWRVNNTLVDDYYDESKRIREGVETHVSFREHNLYTVNITFLEVKMEDYGLPFMCHAGVSTAYIILQLPAPDFRAYLIGGLIALVAVAVSVVYIYNIFKIDIVLWYRSAFHSTETIVDGKLYDAYVLYPKPHKESQRHAVDALVLNILPEVLERQCGYKLFIFGRDEFPGQAVANVIDENVKLCRRLIVIVVPESLGFGLLKNLSEEQIAVYSALIQDGMKVILIELEKIEDYTVMPESIQYIKQKHGAIRWHGDFTEQSQCMKTKFWKTVRYHMPPRRCRPFPPVQLLQHTPCYRTAGPELGSRRKKCTLTTG

SEQ ID NO: 50148 - protein, 575 aa, Homo sapiens; identical to SEQ ID NO: 50145

SEQ ID NO: 50149 - protein, 578 aa, Homo sapiens
MLPCLVVLLAALLSLRLGSDAHGTELPSPPSVWFEAEFFHHILHWTPIPNQSESTCYEVALLRYGIESWNSISNCSQTLSYDLTAVTLDLYHSNGYRARVRAVDGSRHSNWTVTNTRFSVDEVTLTVGSVNLEIHNGFILGKIQLPRPKMAPANDTYESIFSHFREYEIAIRKVPGNFTFTHKKVKHENFSLLTSGEVGEFCVQVKPSVASRSNKGMWSKEECISLTRQYFTVTNVIIFFAFVLLLSGALAYCLALQLYVRRRKKLPSVLLFKKPSPFIFISQRPSPETQDTIHPLDEEAFLKVSPELKNLDLHGSTDSGFGSTKPSLQTEEPQFLLPDPHPQADRTLGNREPPVLGDSCSSGSSNSTDSGICLQEPSLSPSTGPTWEQQVGSNSRGQDDSGIDLVQNSEGRAGDTQGGSALGHHSPPEPEVPGEEDPAAVAFQGYLRQTRCAEEKATKTGCLEEESPLTDGLGPKFGRCLVDEAGLHPPALAKGYLKQDPLEMTLASSGAPTGQWNQPTEEWSLLALSSCSDLGISDWSFAHDLAPLGCVAAPGGLLGSFNSDLVTLPLISSLQSSE

SEQ ID NO: 50150 - protein, 499 aa, Homo sapiens
MSRTELPSPPSVWFEAEFFHHILHWTPIPNQSESTCYEVALLRYGIESWNSISNCSQTLSYDLTAVTLDLYHSNGYRARVRAVDGSRHSNWTVTNTRFSVDEVTLTVGSVNLEIHNGFILGKIQLPRPKMAPANDTYESIFSHFREYEIAIRKVPGNFTFTHKKVKHENFSLLTSGEVGEFCVQVKPSVASRSNKGMWSKEECISLTRQYFTVTNVIIFFAFVLLLSGALAYCLALQLYVRRRKKLPSVLLFKKPSPFIFISQRPSPETQDTIHPLDEEAFLKVSPELKNLDLHGSTDSGFGSTKPSLQTEEPQFLLPDPHPQADRTLGNREPPVLGDSCSSGSSNSTDSGICLQEPSLSPSTGPTWEQQVGSNSRGQDDSGIDLVQNSEGRAGDTQGGSALGHHSPPEPEVPGEEDPAAVAFQGYLRQTRCAEEKATKTGCLEEESPLTDGLGPKFGRCLVDEAGLHPPALAKGYLKQDPLEMTLASSGPNGTVEPAH

SEQ ID NO: 50151 - protein, 558 aa, Homo sapiens
MSRTELPSPPSVWFEAEFFHHILHWTPIPNQSESTCYEVALLRYGIESWNSISNCSQTLSYDLTAVTLDLYHSNGYRARVRAVDGSRHSNWTVTNTRFSVDEVTLTVGSVNLEIHNGFILGKIQLPRPKMAPANDTYESIFSHFREYEIAIRKVPGNFTFTHKKVKHENFSLLTSGEVGEFCVQVKPSVASRSNKGMWSKEECISLTRQYFTVTNVIIFFAFVLLLSGALAYCLALQLYVRRRKKLPSVLLFKKPSPFIFISQRPSPETQDTIHPLDEEAFLKVSPELKNLDLHGSTDSGFGSTKPSLQTEEPQFLLPDPHPQADRTLGNREPPVLGDSCSSGSSNSTDSGICLQEPSLSPSTGPTWEQQVGSNSRGQDDSGIDLVQNSEGRAGDTQGGSALGHHSPPEPEVPGEEDPAAVAFQGYLRQTRCAEEKATKTGCLEEESPLTDGLGPKFGRCLVDEAGLHPPALAKGYLKQDPLEMTLASSGAPTGQWNQPTEEWSLLALSSCSDLGISDWSFAHDLAPLGCVAAPGGLLGSFNSDLVTLPLISSLQSSE

SEQ ID NO: 50152 - protein, 429 aa, Homo sapiens
MAPANDTYESIFSHFREYEIAIRKVPGNFTFTHKKVKHENFSLLTSGEVGEFCVQVKPSVASRSNKGMWSKEECISLTRQYFTVTNVIIFFAFVLLLSGALAYCLALQLYVRRRKKLPSVLLFKKPSPFIFISQRPSPETQDTIHPLDEEAFLKVSPELKNLDLHGSTDSGFGSTKPSLQTEEPQFLLPDPHPQADRTLGNREPPVLGDSCSSGSSNSTDSGICLQEPSLSPSTGPTWEQQVGSNSRGQDDSGIDLVQNSEGRAGDTQGGSALGHHSPPEPEVPGEEDPAAVAFQGYLRQTRCAEEKATKTGCLEEESPLTDGLGPKFGRCLVDEAGLHPPALAKGYLKQDPLEMTLASSGAPTGQWNQPTEEWSLLALSSCSDLGISDWSFAHDLAPLGCVAAPGGLLGSFNSDLVTLPLISSLQSSE

SEQ ID NO: 50153 - protein, 422 aa, Homo sapiens
MSSSCSGLSRVLVAVATALVSASSPCPQAWGPPGVQYGQPGRSVKLCCPGVTAGDPVSWFRDGEPKLLQGPDSGLGHELVLAQADSTDEGTYICQTLDGALGGTVTLQLGYPPARPVVSCQAADYENFSCTWSPSQISGLPTRYLTSYRKKTVLGADSQRRSPSTGPWPCPQDPLGAARCVVHGAEFWSQYRINVTEVNPLGASTRLLDVSLQSILRPDPPQGLRVESVPGYPRRLRASWTYPASWPCQPHFLLKFRLQYRPAQHPAWSTVEPAGLEEVITDAVAGLPHAVRVSARDFLDAGTWSTWSPEAWGTPSTGTIPKEIPAWGQLHTQPEVEPQVDSPAPPRPSLQPHPRLLDHRDSVEQVAVLASLGILSFLGLVAGALALGLWLRLRRGGKDGSPKPGFLASVIPVDRRPGAPNL

SEQ ID NO: 50154 - protein, 390 aa, Homo sapiens
MSSSCSGLSRVLVAVATALVSASSPCPQAWGPPGVQYGQPGRSVKLCCPGVTAGDPVSWFRDGEPKLLQGPDSGLGHELVLAQADSTDEGTYICQTLDGALGGTVTLQLGYPPARPVVSCQAADYENFSCTWSPSQISGLPTRYLTSYRKKTVLGADSQRRSPSTGPWPCPQDPLGAARCVVHGAEFWSQYRINVTEVNPLGASTRLLDVSLQSILRPDPPQGLRVESVPGYPRRLRASWTYPASWPCQPHFLLKFRLQYRPAQHPAWSTVEPAGLEEVITDAVAGLPHAVRVSARDFLDAGTWSTWSPEAWGTPSTGTIPKEIPAWGQLHTQPEVEPQVDSPAPPRPSLQPHPRLLDHRDSVEQVAVLASLGILSFLGLVAGALALGLW

SEQ ID NO: 50155 - protein, 422 aa, Homo sapiens; identical to SEQ ID NO: 50153

SEQ ID NO: 50156 - protein, 422 aa, Homo sapiens; identical to SEQ ID NO: 50153

SEQ ID NO: 50157 - protein, 270 aa, Homo sapiens
MSSSCSGLSRVLVAVATALVSASSPCPQAWGPPGVQYGQPGRSVKLCCPGVTAGDPVSWFRDGEPKLLQGPDSGLGHELVLAQADSTDEGTYICQTLDGALGGTVTLQLGYPPARPVVSCQAADYENFSCTWSPSQISGLPTRYLTSYRKKTVLGADSQRRSPSTGPWPCPQDPLGAARCVVHGAEFWSQYRINVTEVNPLGASTRLLDVSLQSILRPDPPQGLRVESVPGYPRRLRASWTYPASWPCQPHFLLKFRLQYRPAQHPAWST

SEQ ID NO: 50158 - protein, 167 aa, Homo sapiens
MSSSCSGLSRVLVAVATALVSASSPCPQAWGPPGVQYGQPGRSVKLCCPGVTAGDPVSWFRDGEPKLLQGPDSGLGHELVLAQADSTDEGTYICQTLDGALGGTVTLQLGYPPARPVVSCQAADYENFSCTWSPSQISGLPTRYLTSYRKKTVLGADSQRRSPSTGP

SEQ ID NO: 50159 - protein, 139 aa, Homo sapiens
MSSSCSGLSRVLVAVATALVSASSPCPQAWGPPGVQYGQPGRSVKLCCPGVTAGDPVSWFRDGEPKLLQGPDSGLGHELVLAQADSTDEGTYICQTLDGALGGTVTLQLGYPPARPVVSCQAADYENFSCTWSPSQISG

SEQ ID NO: 50160 - protein, 662 aa, Homo sapiens
MEPLVTWVVPLLFLFLLSRQGAACRTSECCFQDPPYPDADSGSASGPRDLRCYRISSDRYECSWQYEGPTAGVSHFLRCCLSSGRCCYFAAGSATRLQFSDQAGVSVLYTVTLWVESWARNQTEKSPEVTLQLYNSVKYEPPLGDIKVSKLAGQLRMEWETPDNQVGAEVQFRHRTPSSPWKLGDCGPQDDDTESCLCPLEMNVAQEFQLRRRQLGSQGSSWSKWSSPVCVPPENPPQPQVRFSVEQLGQDGRRRLTLKEQPTQLELPEGCQGLAPGTEVTYRLQLHMLSCPCKAKATRTLHLGKMPYLSGAAYNVAVISSNQFGPGLNQTWHIPADTHTEPVALNISVGTNGTTMYWPARAQSMTYCIEWQPVGQDGGLATCSLTAPQDPDPAGMATYSWSRESGAMGQEKCYYITIFASAHPEKLTLWSTVLSTYHFGGNASAAGTPHHVSVKNHSLDSVSVDWAPSLLSTCPGVLKEYVVRCRDEDSKQVSEHPVQPTETQVTLSGLRAGVAYTVQVRADTAWLRGVWSQPQRFSIEVQVSDWLIFFASLGSFLSILLVGVLGYLGLNRAARHLCPPLPTPCASSAIEFPGGKETWQWINPVDFQEEASLQEALVVEMSWDKGERTEPLEKTELPEGAPELALDTELSLEDGDRCKAKM

SEQ ID NO: 50161 - protein, 381 aa, Homo sapiens
MEPLVTWVVPLLFLFLLSRQGAACRTSECCFQDPPYPDADSGSASGPRDLRCYRISSDRYECSWQYEGPTAGVSHFLRCCLSSGRCCYFAAGSATRLQFSDQAGVSVLYTVTLWVESWARNQTEKSPEVTLQLYNSVKYEPPLGDIKVSKLAGQLRMEWETPDNQVGAEVQFRHRTPSSPWKLGDCGPQDDDTESCLCPLEMNVAQEFQLRRRQLGSQGSSWSKWSSPVCVPPENPPQPQVRFSVEQLGQDGRRRLTLKEQPTQLELPEGCQGLAPGTEVTYRLQLHMLSCPCKAKATRTLHLGKMPYLSGAAYNVAVISSNQFGPGLNQTWHIPADTHTDGMISAHCNLRLPDSRDSPASASRVAGITGICHHTRLILYF

SEQ ID NO: 50162 - protein, 662 aa, Homo sapiens; identical to SEQ ID NO: 50160

SEQ ID NO: 50163 - protein, 862 aa, Homo sapiens
MAHTFRGCSLAFMFIITWLLIKAKIDACKRGDVTVKPSHVILLGSTVNITCSLKPRQGCFHYSRRNKLILYKFDRRINFHHGHSLNSQVTGLPLGTTLFVCKLACINSDEIQICGAEIFVGVAPEQPQNLSCIQKGEQGTVACTWERGRDTHLYTEYTLQLSGPKNLTWQKQCKDIYCDYLDFGINLTPESPESNFTAKVTAVNSLGSSSSLPSTFTFLDIVRPLPPWDIRIKFQKASVSRCTLYWRDEGLVLLNRLRYRPSNSRLWNMVNVTKAKGRHDLLDLKPFTEYEFQISSKLHLYKGSWSDWSESLRAQTPEEEPTGMLDVWYMKRHIDYSRQQISLFWKNLSVSEARGKILHYQVTLQELTGGKAMTQNITGHTSWTTVIPRTGNWAVAVSAANSKGSSLPTRINIMNLCEAGLLAPRQVSANSEGMDNILVTWQPPRKDPSAVQEYVVEWRELHPGGDTQVPLNWLRSRPYNVSALISENIKSYICYEIRVYALSGDQGGCSSILGNSKHKAPLSGPHINAITEEKGSILISWNSIPVQEQMGCLLHYRIYWKERDSNSQPQLCEIPYRVSQNSHPINSLQPRVTYVLWMTALTAAGESSHGNEREFCLQGKANWMAFVAPSICIAIIMVGIFSTHYFQQKVFVLLAALRPQWCSREIPDPANSTCAKKYPIAEEKTQLPLDRLLIDWPTPEDPEPLVISEVLHQVTPVFRHPPCSNWPQREKGIQGHQASEKDMMHSASSPPPPRALQAESRQLVDLYKVLESRGSDPKPENPACPWTVLPAGDLPTHDGYLPSNIDDLPSHEAPLADSLEELEPQHISLSVFPSSSLHPLTFSCGDKLTLDQLKMRCDSLML

SEQ ID NO: 50164 - protein, 659 aa, Homo sapiens
MAHTFRGCSLAFMFIITWLLIKAKIDACKRGDVTVKPSHVILLGSTVNITCSLKPRQGCFHYSRRNKLILYKFDRRINFHHGHSLNSQVTGLPLGTTLFVCKLACINSDEIQICGAEIFVGVAPEQPQNLSCIQKGEQGTVACTWERGRDTHLYTEYTLQLSGPKNLTWQKQCKDIYCDYLDFGINLTPESPESNFTAKVTAVNSLGSSSSLPSTFTFLDIVRPLPPWDIRIKFQKASVSRCTLYWRDEGLVLLNRLRYRPSNSRLWNMVNVTKAKGRHDLLDLKPFTEYEFQISSKLHLYKGSWSDWSESLRAQTPEEEPTGMLDVWYMKRHIDYSRQQISLFWKNLSVSEARGKILHYQVTLQELTGGKAMTQNITGHTSWTTVIPRTGNWAVAVSAANSKGSSLPTRINIMNLCEAGLLAPRQVSANSEGMDNILVTWQPPRKDPSAVQEYVVEWRELHPGGDTQVPLNWLRSRPYNVSALISENIKSYICYEIRVYALSGDQGGCSSILGNSKHKAPLSGPHINAITEEKGSILISWNSIPVQEQMGCLLHYRIYWKERDSNSQPQLCEIPYRVSQNSHPINSLQPRVTYVLWMTALTAAGESSHGNEREFCLQGKANWMAFVAPSICIAIIMVGIFSTHYFQQKRRHSCPWTGS

SEQ ID NO: 50165 - protein, 230 aa, Homo sapiens
  VARIANT 1: note = MOD_RES - Any amino acid
XQKGEQGTVACTWERGRDTHLYTEYTLQLSGPKNLTWQKQCKDIYCDYLDFGINLTPESPESNFTAKVTAVNSLGSSSSLPSTFTFLDIVRPLPPWDIRIKFQKASVSRCTLYWRDEGLVLLNRLRYRPSNSRLWNMVNVTKAKGRHDLLDLKPFTEYEFQISSKLHLYKGSWSDWSESLRAQTPEEEPTGMLDVWYMKRHIDYSRQQISLFWKVSFKRQLKTQGNKTEG

SEQ ID NO: 50166 - protein, 659 aa, Homo sapiens; identical to SEQ ID NO: 50164

SEQ ID NO: 50167 - protein, 776 aa, Homo sapiens
MAHTFRGCSLAFMFIITWLLIKAKIDACKRGDVTVKPSHVILLGSTVNITCSLKPRQGCFHYSRRNKLILYKFDRRINFHHGHSLNSQVTGLPLGTTLFVCKLACINSDEIQICGAEIFVGVAPEQPQNLSCIQKGEQGTVACTWERGRDTHLYTEYTLQLSGPKNLTWQKQCKDIYCDYLDFGINLTPESPESNFTAKVTAVNSLGSSSSLPSTFTFLDIVRPLPPWDIRIKFQKASVSRCTLYWRDEGLVLLNRLRYRPSNSRLWNMVNVTKAKGRHDLLDLKPFTEYEFQISSKLHLYKGSWSDWSESLRAQTPEEEPTGMLDVWYMKRHIDYSRQQISLFWKNLSVSEARGKILHYQVTLQELTGGKAMTQNITGHTSWTTVIPRTGNWAVAVSAANSKGSSLPTRINIMNLCEAGLLAPRQVSANSEGMDNILVTWQPPRKDPSAVQEYVVEWRELHPGGDTQVPLNWLRSRPYNVSALISEIPYRVSQNSHPINSLQPRVTYVLWMTALTAAGESSHGNEREFCLQGKANWMAFVAPSICIAIIMVGIFSTHYFQQKVFVLLAALRPQWCSREIPDPANSTCAKKYPIAEEKTQLPLDRLLIDWPTPEDPEPLVISEVLHQVTPVFRHPPCSNWPQREKGIQGHQASEKDMMHSASSPPPPRALQAESRQLVDLYKVLESRGSDPKPENPACPWTVLPAGDLPTHDGYLPSNIDDLPSHEAPLADSLEELEPQHISLSVFPSSSLHPLTFSCGDKLTLDQLKMRCDSLML

SEQ ID NO: 50168 - protein, 226 aa, Homo sapiens
MSSPTASSTTPRCGTSAGPASPTWRCRATALHLHHPVDQLPHQVLQPTTGQRQPGTGLPWHSTPAQLALAGLRQAQPHPQQQRLHQPGLRGVDAHGSAAHVPQAVPQAVRAHPPGQLLSWAAAVCLLCQHHLQLPGKKRNSTLYITMLLIVPVIVAGAIIVLLLYLKRLKIIIFPPIPDPGKIFKEMFGDQNDDTLHWKKYDIYEKQTKEETDSVVLIENLKKASQ

SEQ ID NO: 50169 - protein, 279 aa, Homo sapiens
MEWPARLCGLWALLLCAGGGGGGGGAAPTETQPPVTNLSVSVENLCTVIWTWNPPEGASSNCSLWYFSHFGDKQDKKIAPETRRSIEVPLNERICLQVGSQCSTNESEKPSILVEKCISPPEGDPESAVTELQCIWHNLSYMKCSWLPGRNTSPDTNYTLYYWHRSLEKIHQCENIFREGQYFGCSFDLTKVKDSSFEQHSVQIMVKDNAGKIKPSFNIVPLTSRVKPDPPHIKNLSFHNDDLYVQWENPQNFISRCLFYEVEVNNSQTETHNVFYVRF

SEQ ID NO: 50170 - protein, 427 aa, Homo sapiens
MEWPARLCGLWALLLCAGGGGGGGGAAPTETQPPVTNLSVSVENLCTVIWTWNPPEGASSNCSLWYFSHFGDKQDKKIAPETRRSIEVPLNERICLQVGSQCSTNESEKPSILVEKCISPPEGDPESAVTELQCIWHNLSYMKCSWLPGRNTSPDTNYTLYYWHRSLEKIHQCENIFREGQYFGCSFDLTKVKDSSFEQHSVQIMVKDNAGKIKPSFNIVPLTSRVKPDPPHIKNLSFHNDDLYVQWENPQNFISRCLFYEVEVNNSQTETHNVFYVQEAKCENPEFERNVENTSCFMVPGVLPDTLNTVRIRVKTNKLCYEDDKLWSNWSQEMSIGKKRNSTLYITMLLIVPVIVAGAIIVLLLYLKRLKIIIFPPIPDPGKIFKEMFGDQNDDTLHWKKYDIYEKQTKEETDSVVLIENLKKASQ

SEQ ID NO: 50171 - protein, 380 aa, Homo sapiens
MAFVCLAIGCLYTFLISTTFGCTSSSDTEIKVNPPQDFEIVDPGYLGYLYLQWQPPLSLDHFKECTVEYELKYRNIGSETWKTIITKNLHYKDGFDLNKGIEAKIHTLLPWQCTNGSEVQSSWAETTYWISPQGIPETKVQDMDCVYYNWQYLLCSWKPGIGVLLDTNYNLFYWYEGLDHALQCVDYIKADGQNIGCRFPYLEASDYKDFYICVNGSSENKPIRSSYFTFQLQNIVKPLPPVYLTFTRESSCEIKLKWSIPLGPIPARCFDYEIEIREDDTTLVTATVENETYTLKTTNETRQLCFVVRSKVNIYCSDDGIWSEWSDKQCWEGEDLSKKTLLRFWLPFGFILILVIFVTGLLLRKPNTYPKMIPEFFCDT

SEQ ID NO: 50172 - protein, 380 aa, Homo sapiens; identical to SEQ ID NO: 50171

SEQ ID NO: 50173 - protein, 154 aa, Homo sapiens
MAPRRARGCRTLGLPALLLLLLLRPPATREPAASSPSSNNTAATTAAIVPGSQLMPSKSPSTGTTEISSHESSHGTPSQTTAKNWELTASASHQPPGVYPQGHSDTTVAISTSTVLLCGLSAVSLLACYLKSRASVCSCHPRSAGHTCSVGSVC

SEQ ID NO: 50174 - protein, 267 aa, Homo sapiens
MAPRRARGCRTLGLPALLLLLLLRPPATRGITCPPPMSVEHADIWVKSYSLYSRERYICNSGFKRKAGTSSLTECVLNKATNVAHWTTPSLKCIRDPALVHQRPAPPSTVTTAGVTPQPESLSPSGKEPAASSPSSNNTAATTAAIVPGSQLMPSKSPSTGTTEISSHESSHGTPSQTTAKNWELTASASHQPPGVYPQGHSDTTVAISTSTVLLCGLSAVSLLACYLKSRQTPPLASVEMEAMEALPVTWGTSSRDEDLENCSHHL

SEQ ID NO: 50175 - protein, 203 aa, Homo sapiens
MSVEHADIWVKSYSLYSRERYICNSGFKRKAGTSSLTECVLNKATNVAHWTTPSLKCIRDPALVHQRPAPPSTVTTAGVTPQPESLSPSGKEPAASSPSSNNTAATTAAIVPGSQLMPSKSPSTGTTEISSHESSHGTPSQTTAKNWELTASASHQPPGVYPQGHSDTTVAISTSTVLLCGLSAVSLLACYLKSSGAVLSYSG

SEQ ID NO: 50176 - protein, 231 aa, Homo sapiens
MSVEHADIWVKSYSLYSRERYICNSGFKRKAGTSSLTECVLNKATNVAHWTTPSLKCIRDPALVHQRPAPPSTVTTAGVTPQPESLSPSGKEPAASSPSSNNTAATTAAIVPGSQLMPSKSPSTGTTEISSHESSHGTPSQTTAKNWELTASASHQPPGVYPQGHSDTTVAISTSTVLLCGLSAVSLLACYLKSRQTPPLASVEMEAMEALPVTWGTSSRDEDLENCSHHL

SEQ ID NO: 50177 - protein, 169 aa, Homo sapiens
MAPRRARGCRTLGLPALLLLLLLRPPATREPAASSPSSNNTAATTAAIVPGSQLMPSKSPSTGTTEISSHESSHGTPSQTTAKNWELTASASHQPPGVYPQGHSDTTVAISTSTVLLCGLSAVSLLACYLKSRQTPPLASVEMEAMEALPVTWGTSSRDEDLENCSHHL

SEQ ID NO: 50178 - protein, 202 aa, Homo sapiens
MAPRRARGCRTLGLPALLLLLLLRPPATRGDPALVHQRPAPPSTVTTAGVTPQPESLSPSGKEPAASSPSSNNTAATTAAIVPGSQLMPSKSPSTGTTEISSHESSHGTPSQTTAKNWELTASASHQPPGVYPQGHSDTTVAISTSTVLLCGLSAVSLLACYLKSRQTPPLASVEMEAMEALPVTWGTSSRDEDLENCSHHL

SEQ ID NO: 50179 - protein, 252 aa, Homo sapiens
MAPRRARGCRTLGLPALLLLLLLRPPATRGITCPPPMSVEHADIWVKSYSLYSRERYICNSGFKRKAGTSSLTECVLNKATNVAHWTTPSLKCIRDPALVHQRPAPPSTVTTAGVTPQPESLSPSGKEPAASSPSSNNTAATTAAIVPGSQLMPSKSPSTGTTEISSHESSHGTPSQTTAKNWELTASASHQPPGVYPQGHSDTTVAISTSTVLLCGLSAVSLLACYLKSRASVCSCHPRSAGHTCSVGSVC

SEQ ID NO: 50180 - protein, 187 aa, Homo sapiens
MAPRRARGCRTLGLPALLLLLLLRPPATRGDPALVHQRPAPPSTVTTAGVTPQPESLSPSGKEPAASSPSSNNTAATTAAIVPGSQLMPSKSPSTGTTEISSHESSHGTPSQTTAKNWELTASASHQPPGVYPQGHSDTTVAISTSTVLLCGLSAVSLLACYLKSRASVCSCHPRSAGHTCSVGSVC

SEQ ID NO: 50181 - protein, 234 aa, Homo sapiens
MAPRRARGCRTLGLPALLLLLLLRPPATRGITCPPPMSVEHADIWVKSYSLYSRERYICNSGFKRKAGTSSLTECVLNKATNVAHWTTPSLKCIKPAASSPSSNNTAATTAAIVPGSQLMPSKSPSTGTTEISSHESSHGTPSQTTAKNWELTASASHQPPGVYPQGHSDTTVAISTSTVLLCGLSAVSLLACYLKSRQTPPLASVEMEAMEALPVTWGTSSRDEDLENCSHHL

SEQ ID NO: 50182 - protein, 219 aa, Homo sapiens
MAPRRARGCRTLGLPALLLLLLLRPPATRGITCPPPMSVEHADIWVKSYSLYSRERYICNSGFKRKAGTSSLTECVLNKATNVAHWTTPSLKCIKPAASSPSSNNTAATTAAIVPGSQLMPSKSPSTGTTEISSHESSHGTPSQTTAKNWELTASASHQPPGVYPQGHSDTTVAISTSTVLLCGLSAVSLLACYLKSRASVCSCHPRSAGHTCSVGSVC

SEQ ID NO: 50183 - protein, 866 aa, Homo sapiens
MGAARSPPSAVPGPLLGLLLLLLGVLAPGGASLRLLDHRALVCSQPGLNCTVKNSTCLDDSWIHPRNLTPSSPKDLQIQLHFAHTQQGDLFPVAHIEWTLQTDASILYLEGAELSVLQLNTNERLCVRFEFLSKLRHHHRRWRFTFSHFVVDPDQEYEVTVHHLPKPIPDGDPNHQSKNFLVPDCEHARMKVTTPCMSSGSLWDPNITVETLEAHQLRVSFTLWNESTHYQILLTSFPHMENHSCFEHMHHIPAPRPEEFHQRSNVTLTLRNLKGCCRHQVQIQPFFSSCLNDCLRHSATVSCPEMPDTPEPIPDYMPLWVYWFITGISILLVGSVILLIVCMTWRLAGPGSEKYSDDTKYTDGLPAADLIPPPLKPRKVWIIYSADHPLYVDVVLKFAQFLLTACGTEVALDLLEEQAISEAGVMTWVGRQKQEMVESNSKIIVLCSRGTRAKWQALLGRGAPVRLRCDHGKPVGDLFTAAMNMILPDFKRPACFGTYVVCYFSEVSCDGDVPDLFGAAPRYPLMDRFEEVYFRIQDLEMFQPGRMHRVGELSGDNYLRSPGGRQLRAALDRFRDWQVRCPDWFECENLYSADDQDAPSLDEEVFEEPLLPPGTGIVKRAPLVREPGSQACLAIDPLVGEEGGAAVAKLEPHLQPRGQPAPQPLHTLVLAAEEGALVAAVEPGPLADGAAVRLALAGEGEACPLLGSPGAGRNSVLFLPVDPEDSPLGSSTPMASPDLLPEDVREHLEGLMLSLFEQSLSCQAQGGCSRPAMVLTDPHTPYEEEQRQSVQSDQGYISRSSPQPPEGLTEMEEEEEEEQDPGKPALPLSPEDLESLRSLQRQLLFRQLQKNSGWDTMGSESEGPSA

SEQ ID NO: 50184 - protein, 814 aa, Homo sapiens
MGAARSPPSAVPGPLLGLLLLLLGVLAPGGASLRLLDHRALVCSQPGLNCTVKNSTCLDDSWIHPRNLTPSSPKDLQIQLHFAHTQQGDLFPVAHIEWTLQTDASILYLEGAELSVLQLNTNERLCVRFEFLSKLRHHHRRWRFTFSHFVVDPDQEYEVTVHHLPKPIPDGDPNHQSKNFLVPDCEHARMKVTTPCMSSGSLWDPNITVETLEAHQLRVSFTLWNESTHYQILLTSFPHMENHSCFEHMHHIPAPRPEEFHQRSNVTLTLRNLKGCCRHQVQIQPFFSSCLNDCLRHSATVSCPEMPDTPDGLPAADLIPPPLKPRKVWIIYSADHPLYVDVVLKFAQFLLTACGTEVALDLLEEQAISEAGVMTWVGRQKQEMVESNSKIIVLCSRGTRAKWQALLGRGAPVRLRCDHGKPVGDLFTAAMNMILPDFKRPACFGTYVVCYFSEVSCDGDVPDLFGAAPRYPLMDRFEEVYFRIQDLEMFQPGRMHRVGELSGDNYLRSPGGRQLRAALDRFRDWQVRCPDWFECENLYSADDQDAPSLDEEVFEEPLLPPGTGIVKRAPLVREPGSQACLAIDPLVGEEGGAAVAKLEPHLQPRGQPAPQPLHTLVLAAEEGALVAAVEPGPLADGAAVRLALAGEGEACPLLGSPGAGRNSVLFLPVDPEDSPLGSSTPMASPDLLPEDVREHLEGLMLSLFEQSLSCQAQGGCSRPAMVLTDPHTPYEEEQRQSVQSDQGYISRSSPQPPEGLTEMEEEEEEEQDPGKPALPLSPEDLESLRSLQRQLLFRQLQKNSGWDTMGSESEGPSA

SEQ ID NO: 50185 - protein, 502 aa, Homo sapiens
MSLVLLSLAALCRSAVPREPTVQCGSETGPSPEWMLQHDLIPGDLRDLRVEPVTTSVATGDYSILMNVSWVLRADASIRLLKATKICVTGKSNFQSYSCVRCNYTEAFQTQTRPSGGKWTFSYIGFPVELNTVYFIGAHNIPNANMNEDGPSMSVNFTSPGCLDHIMKYKKKCVKAGSLWDPNITACKKNEETVEVNFTTTPLGNRYMALIQHSTIIGFSQVFEPHQKKQTRASVVIPVTGDSEGATVQLTPYFPTCGSDCIRHKGTVVLCPQTGVPFPLDNNKSKPGGWLPLLLLSLLVATWVLVAGIYLMWRHERIKKTSFSTTTLLPPIKVLVVYPSEICFHHTICYFTEFLQNHCRSEVILEKWQKKKIAEMGPVQWLATQKKAADKVVFLLSNDVNSVCDGTCGKSEGSPSENSQDLFPLAFNLFCSDLRSQIHLHKYVVVYFREIDTKDDYNALSVCPKYHLMKDATAFCAELLHVKQQVSAGKRSQACHDGCCSL

SEQ ID NO: 50186 - protein, 791 aa, Homo sapiens
MPVPWFLLSLALGRSPVVLSLERLVGPQDATHCSPVSLEPWGDEERLRVQFLAQQSLSLAPVTAATARTALSGLSGADGRREERGRGKSWVCLSLGGSGNTEPQKKGLSCRLWDSDILCLPGDIVPAPGPVLAPTHLQTELVLRCQKETDCDLCLRVAVHLAVHGHWEEPEDEEKFGGAADSGVEEPRNASLQAQVVLSFQAYPTARCVLLEVQVPAALVQFGQSVGSVVYDCFEAALGSEVRIWSYTQPRYEKELNHTQQLPDCRGLEVWNSIPSCWALPWLNVSADGDNVHLVLNVSEEQHFGLSLYWNQVQGPPKPRWHKNLTGPQIITLNHTDLVPCLCIQVWPLEPDSVRTNICPFREDPRAHQNLWQAARLQLLTLQSWLLDAPCSLPAEAALCWRAPGGDPCQPLVPPLSWENVTVDKVLEFPLLKGHPNLCVQVNSSEKLQLQECLWADSLGPLKDDVLLLETRGPQDNRSLCALEPSGCTSLPSKASTRAARLGEYLLQDLQSGQCLQLWDDDLGALWACPMDKYIHKRWALVWLACLLFAAALSLILLLKKDHAKGWLRLLKQDVRSGAAARGRAALLLYSADDSGFERLVGALASALCQLPLRVAVDLWSRRELSAQGPVAWFHAQRRQTLQEGGVVVLLFSPGAVALCSEWLQDGVSGPGAHGPHDAFRASLSCVLPDFLQGRAPGSYVGACFDRLLHPDAVPALFRTVPVFTLPSQLPDFLGALQQPRAPRSGRLQERAEQVSRALQPALDSYFHPPGTPAPGRGVGPGAGPGAGDGT

SEQ ID NO: 50187 - protein, 705 aa, Homo sapiens
MPVPWFLLSLALGRSPVVLSLERLVGPQDATHCSPGLSCRLWDSDILCLPGDIVPAPGPVLAPTHLQTELVLRCQKETDCDLCLRVAVHLAVHGHWEEPEDEEKFGGAADSGVEEPRNASLQAQVVLSFQAYPTARCVLLEVQVPAALVQFGQSVGSVVYDCFEAALGSEVRIWSYTQPRYEKELNHTQQLPALPWLNVSADGDNVHLVLNVSEEQHFGLSLYWNQVQGPPKPRWHKNLTGPQIITLNHTDLVPCLCIQVWPLEPDSVRTNICPFREDPRAHQNLWQAARLQLLTLQSWLLDAPCSLPAEAALCWRAPGGDPCQPLVPPLSWENVTVDKVLEFPLLKGHPNLCVQVNSSEKLQLQECLWADSLGPLKDDVLLLETRGPQDNRSLCALEPSGCTSLPSKASTRAARLGEYLLQDLQSGQCLQLWDDDLGALWACPMDKYIHKRWALVWLACLLFAAALSLILLLKKDHAKGWLRLLKQDVRSGAAARGRAALLLYSADDSGFERLVGALASALCQLPLRVAVDLWSRRELSAQGPVAWFHAQRRQTLQEGGVVVLLFSPGAVALCSEWLQDGVSGPGAHGPHDAFRASLSCVLPDFLQGRAPGSYVGACFDRLLHPDAVPALFRTVPVFTLPSQLPDFLGALQQPRAPRSGRLQERAEQVSRALQPALDSYFHPPGTPAPGRGVGPGAGPGAGDGT

SEQ ID NO: 50188 - protein, 720 aa, Homo sapiens
MPVPWFLLSLALGRSPVVLSLERLVGPQDATHCSPGLSCRLWDSDILCLPGDIVPAPGPVLAPTHLQTELVLRCQKETDCDLCLRVAVHLAVHGHWEEPEDEEKFGGAADSGVEEPRNASLQAQVVLSFQAYPTARCVLLEVQVPAALVQFGQSVGSVVYDCFEAALGSEVRIWSYTQPRYEKELNHTQQLPDCRGLEVWNSIPSCWALPWLNVSADGDNVHLVLNVSEEQHFGLSLYWNQVQGPPKPRWHKNLTGPQIITLNHTDLVPCLCIQVWPLEPDSVRTNICPFREDPRAHQNLWQAARLQLLTLQSWLLDAPCSLPAEAALCWRAPGGDPCQPLVPPLSWENVTVDKVLEFPLLKGHPNLCVQVNSSEKLQLQECLWADSLGPLKDDVLLLETRGPQDNRSLCALEPSGCTSLPSKASTRAARLGEYLLQDLQSGQCLQLWDDDLGALWACPMDKYIHKRWALVWLACLLFAAALSLILLLKKDHAKGWLRLLKQDVRSGAAARGRAALLLYSADDSGFERLVGALASALCQLPLRVAVDLWSRRELSAQGPVAWFHAQRRQTLQEGGVVVLLFSPGAVALCSEWLQDGVSGPGAHGPHDAFRASLSCVLPDFLQGRAPGSYVGACFDRLLHPDAVPALFRTVPVFTLPSQLPDFLGALQQPRAPRSGRLQERAEQVSRALQPALDSYFHPPGTPAPGRGVGPGAGPGAGDGT

SEQ ID NO: 50189 - protein, 546 aa, Homo sapiens
MAYPTARCVLLEVQVPAALVQFGQSVGSVVYDCFEAALGSEVRIWSYTQPRYEKELNHTQQLPALPWLNVSADGDNVHLVLNVSEEQHFGLSLYWNQVQGPPKPRWHKNLTGPQIITLNHTDLVPCLCIQVWPLEPDSVRTNICPFREDPRAHQNLWQAARLQLLTLQSWLLDAPCSLPAEAALCWRAPGGDPCQPLVPPLSWENVTVDVNSSEKLQLQECLWADSLGPLKDDVLLLETRGPQDNRSLCALEPSGCTSLPSKASTRAARLGEYLLQDLQSGQCLQLWDDDLGALWACPMDKYIHKRWALVWLACLLFAAALSLILLLKKDHAKAAARGRAALLLYSADDSGFERLVGALASALCQLPLRVAVDLWSRRELSAQGPVAWFHAQRRQTLQEGGVVVLLFSPGAVALCSEWLQDGVSGPGAHGPHDAFRASLSCVLPDFLQGRAPGSYVGACFDRLLHPDAVPALFRTVPVFTLPSQLPDFLGALQQPRAPRSGRLQERAEQVSRALQPALDSYFHPPGTPAPGRGVGPGAGPGAGDGT

SEQ ID NO: 50190 - protein, 707 aa, Homo sapiens
MPVPWFLLSLALGRSPVVLSLERLVGPQDATHCSPGLSCRLWDSDILCLPGDIVPAPGPVLAPTHLQTELVLRCQKETDCDLCLRVAVHLAVHGHWEEPEDEEKFGGAADSGVEEPRNASLQAQVVLSFQAYPTARCVLLEVQVPAALVQFGQSVGSVVYDCFEAALGSEVRIWSYTQPRYEKELNHTQQLPDCRGLEVWNSIPSCWALPWLNVSADGDNVHLVLNVSEEQHFGLSLYWNQVQGPPKPRWHKNLTGPQIITLNHTDLVPCLCIQVWPLEPDSVRTNICPFREDPRAHQNLWQAARLQLLTLQSWLLDAPCSLPAEAALCWRAPGGDPCQPLVPPLSWENVTVDKVLEFPLLKGHPNLCVQVNSSEKLQLQECLWADSLGPLKDDVLLLETRGPQDNRSLCALEPSGCTSLPSKASTRAARLGEYLLQDLQSGQCLQLWDDDLGALWACPMDKYIHKRWALVWLACLLFAAALSLILLLKKDHAKAAARGRAALLLYSADDSGFERLVGALASALCQLPLRVAVDLWSRRELSAQGPVAWFHAQRRQTLQEGGVVVLLFSPGAVALCSEWLQDGVSGPGAHGPHDAFRASLSCVLPDFLQGRAPGSYVGACFDRLLHPDAVPALFRTVPVFTLPSQLPDFLGALQQPRAPRSGRLQERAEQVSRALQPALDSYFHPPGTPAPGRGVGPGAGPGAGDGT

SEQ ID NO: 50191 - protein, 70 aa, Homo sapiens
MPVPWFLLSLALGRSPVVLSLERLVGPQDATHCSPGLSCRLWVTYSACLGTSCLLRAPCWRLRTCRQSWC

SEQ ID NO: 50192 - protein, 688 aa, Homo sapiens
MPVPWFLLSLALGRSPVVLSLERLVGPQDATHCSPGLSCRLWDSDILCLPGDIVPAPGPVLAPTHLQTELVLRCQKETDCDLCLRVAVHLAVHGHWEEPEDEEKFGGAADSGVEEPRNASLQAQVVLSFQAYPTARCVLLEVQVPAALVQFGQSVGSVVYDCFEAALGSEVRIWSYTQPRYEKELNHTQQLPALPWLNVSADGDNVHLVLNVSEEQHFGLSLYWNQVQGPPKPRWHKNLTGPQIITLNHTDLVPCLCIQVWPLEPDSVRTNICPFREDPRAHQNLWQAARLQLLTLQSWLLDAPCSLPAEAALCWRAPGGDPCQPLVPPLSWENVTVDVNSSEKLQLQECLWADSLGPLKDDVLLLETRGPQDNRSLCALEPSGCTSLPSKASTRAARLGEYLLQDLQSGQCLQLWDDDLGALWACPMDKYIHKRWALVWLACLLFAAALSLILLLKKDHAKGWLRLLKQDVRSGAAARGRAALLLYSADDSGFERLVGALASALCQLPLRVAVDLWSRRELSAQGPVAWFHAQRRQTLQEGGVVVLLFSPGAVALCSEWLQDGVSGPGAHGPHDAFRASLSCVLPDFLQGRAPGSYVGACFDRLLHPDAVPALFRTVPVFTLPSQLPDFLGALQQPRAPRSGRLQERAEQVSRALQPALDSYFHPPGTPAPGRGVGPGAGPGAGDGT

SEQ ID NO: 50193 - protein, 739 aa, Homo sapiens
MAPWLQLCSVFFTVNACLNGSQLAVAAGGSGRARGADTCGWRGVGPASRNSGLYNITFKYDNCTTYLNPVGKHVIADAQNITISQYACHDQVAVTILWSPGALGIEFLKGFRVILEELKSEGRQCQQLILKDPKQLNSSFKRTGMESQPFLNMKFETDYFVKVVPFPSIKNESNYHPFFFRTRACDLLLQPDNLACKPFWKPRNLNISQHGSDMQVSFDHAPHNFGFRFFYLHYKLKHEGPFKRKTCKQEQTTETTSCLLQNVSPGDYIIELVDDTNTTRKVMHYALKPVHSPWAGPIRAVAITVPLVVISAFATLFTVMCRKKQQENIYSHLDEESSESSTYTAALPRERLRPRPKVFLCYSSKDGQNHMNVVQCFAYFLQDFCGCEVALDLWEDFSLCREGQREWVIQKIHESQFIIVVCSKGMKYFVDKKNYKHKGGGRGSGKGELFLVAVSAIAEKLRQAKQSSSAALSKFIAVYFDYSCEGDVPGILDLSTKYRLMDNLPQLCSHLHSRDHGLQEPGQHTRQGSRRNYFRSKSGRSLYVAICNMHQFIDEEPDWFEKQFVPFHPPPLRYREPVLEKFDSGLVLNDVMCKPGPESDFCLKVEAAVLGATGPADSQHESQHGGLDQDGEARPALDGSAALQPLLHTVKAGSPSDMPRDSGIYDSSVPSSELSLPLMEGLSTDQTETSSLTESVSSSSGLGEEEPPALPSKLLSSGSCKADLGCRSYTDELHAVAPL

SEQ ID NO: 50194 - protein, 595 aa, Homo sapiens
MESQPFLNMKFETDYFVKVVPFPSIKNESNYHPFFFRTRACDLLLQPDNLACKPFWKPRNLNISQHGSDMQVSFDHAPHNFGFRFFYLHYKLKHEGPFKRKTCKQEQTTETTSCLLQNVSPGDYIIELVDDTNTTRKVMHYALKPVHSPWAGPIRAVAITVPLVVISAFATLFTVMCRKKQQENIYSHLDEESSESSTYTAALPRERLRPRPKVFLCYSSKDGQNHMNVVQCFAYFLQDFCGCEVALDLWEDFSLCREGQREWVIQKIHESQFIIVVCSKGMKYFVDKKNYKHKGGGRGSGKGELFLVAVSAIAEKLRQAKQSSSAALSKFIAVYFDYSCEGDVPGILDLSTKYRLMDNLPQLCSHLHSRDHGLQEPGQHTRQGSRRNYFRSKSGRSLYVAICNMHQFIDEEPDWFEKQFVPFHPPPLRYREPVLEKFDSGLVLNDVMCKPGPESDFCLKVEAAVLGATGPADSQHESQHGGLDQDGEARPALDGSAALQPLLHTVKAGSPSDMPRDSGIYDSSVPSSELSLPLMEGLSTDQTETSSLTESVSSSSGLGEEEPPALPSKLLSSGSCKADLGCRSYTDELHAVAPL

SEQ ID NO: 50195 - protein, 715 aa, Homo sapiens
MPRASASGVPALFVSGEQGVGPASRNSGLYNITFKYDNCTTYLNPVGKHVIADAQNITISQYACHDQVAVTILWSPGALGIEFLKGFRVILEELKSEGRQCQQLILKDPKQLNSSFKRTGMESQPFLNMKFETDYFVKVVPFPSIKNESNYHPFFFRTRACDLLLQPDNLACKPFWKPRNLNISQHGSDMQVSFDHAPHNFGFRFFYLHYKLKHEGPFKRKTCKQEQTTETTSCLLQNVSPGDYIIELVDDTNTTRKVMHYALKPVHSPWAGPIRAVAITVPLVVISAFATLFTVMCRKKQQENIYSHLDEESSESSTYTAALPRERLRPRPKVFLCYSSKDGQNHMNVVQCFAYFLQDFCGCEVALDLWEDFSLCREGQREWVIQKIHESQFIIVVCSKGMKYFVDKKNYKHKGGGRGSGKGELFLVAVSAIAEKLRQAKQSSSAALSKFIAVYFDYSCEGDVPGILDLSTKYRLMDNLPQLCSHLHSRDHGLQEPGQHTRQGSRRNYFRSKSGRSLYVAICNMHQFIDEEPDWFEKQFVPFHPPPLRYREPVLEKFDSGLVLNDVMCKPGPESDFCLKVEAAVLGATGPADSQHESQHGGLDQDGEARPALDGSAALQPLLHTVKAGSPSDMPRDSGIYDSSVPSSELSLPLMEGLSTDQTETSSLTESVSSSSGLGEEEPPALPSKLLSSGSCKADLGCRSYTDELHAVAPL

SEQ ID NO: 50196 - protein, 595 aa, Homo sapiens; identical to SEQ ID NO: 50194

SEQ ID NO: 50197 - protein, 73 aa, Homo sapiens
MESQPFLNMKFETDYFVKVVPFPSIKNESNYHPFFFRTRACDLLLQPDNLACKPFWKPRNLNISQHGSDMQVS

SEQ ID NO: 50198 - protein, 541 aa, Homo sapiens
MNCRELPLTLWVLISVSTAESCTSRPHITVVEGEPFYLKHCSCSLAHEIETTTKSWYKSSGSQEHVELNPRSSSRIALHDCVLEFWPVELNDTGSYFFQMKNYTQKWKLNVIRRNKHSCFTERQVTSKIVEVKKFFQITCENSYYQTLVNSTSLYKNCKKLLLENNKNPTIKKNAEFEDQGYYSCVHFLHHNGKLFNITKTFNITIVEDRSNIVPVLLGPKLNHVAVELGKNVRLNCSALLNEEDVIYWMFGEENGSDPNIHEEKEMRIMTPEGKWHASKVLRIENIGESNLNVLYNCTVASTGGTDTKSFILVRKADMADIPGHVFTRGMIIAVLILVAVVCLVTVCVIYRVDLVLFYRHLTRRDETLTDGKTYDAFVSYLKECRPENGEEHTFAVEILPRVLEKHFGYKLCIFERDVVPGGAVVDEIHSLIEKSRRLIIVLSKSYMSNEVRYELESGLHEALVERKIKIILIEFTPVTDFTFLPQSLKLLKSHRVLKWKADKSLSYNSRFWKNLLYLMPAKTVKPGRDEPEVLPVLSES

SEQ ID NO: 50199 - protein, 170 aa, Homo sapiens
MNCRELPLTLWVLISVSTAESCTSRPHITVVEGEPFYLKHCSCSLAHEIETTTKSWYKSSGSQEHVELNPRSSSRIALHDCVLEFWPVELNDTGSYFFQMKNYTQKWKLNVIRRNKHSCFTERQVTSKIVEVKKFFQITCENSYYQTLVNSTSLYKIGPPICRKTSSGLH

SEQ ID NO: 50200 - protein, 541 aa, Homo sapiens; identical to SEQ ID NO: 50198

SEQ ID NO: 50201 - protein, 541 aa, Homo sapiens; identical to SEQ ID NO: 50198

SEQ ID NO: 50202 - protein, 599 aa, Homo sapiens
MLCLGWIFLWLVAGERIKGFNISGCSTKKLLWTYSTRSEEEFVLFCDLPEPQKSHFCHRNRLSPKQVPEHLPFMGSNDLSDVQWYQQPSNGDPLEDIRKSYPHIIQDKCTLHFLTPGVNNSGSYICRPKMIKSPYDVACCVKMILEVKPQTNASCEYSASHKQDLLLGSTGSISCPSLSCQSDAQSPAVTWYKNGKLLSVERSNRIVVDEVYDYHQGTYVCDYTQSDTVSSWTVRAVVQVRTIVGDTKLKPDILDPVEDTLEVELGKPLTISCKARFGFERVFNPVIKWYIKDSDLEWEVSVPEAKSIKSTLKDEIIERNIILEKVTQRDLRRKFVCFVQNSIGNTTQSVQLKEKRGVVLLYILLGTIGTLVAVLAASALLYRHWIEIVLLYRTYQSKDQTLGDKKDFDAFVSYAKWSSFPSEATSSLSEEHLALSLFPDVLENKYGYSLCLLERDVAPGGVYAEDIVSIIKRSRRGIFILSPNYVNGPSIFELQAAVNLALDDQTLKLILIKFCYFQEPESLPHLVKKALRVLPTVTWRGLKSVPPNSRFWAKMRYHMPVKNSQGFTWNQLRITSRIFQWKGLSRTETTGRSSQPKEW

SEQ ID NO: 50203 - protein, 457 aa, Homo sapiens
MILEVKPQTNASCEYSASHKQDLLLGSTGSISCPSLSCQSDAQSPAVTWYKNGKLLSVERSNRIVVDEVYDYHQGTYVCDYTQSDTVSSWTVRAVVQVRTIVGDTKLKPDILDPVEDTLEVELGKPLTISCKARFGFERVFNPVIKWYIKDSDLEWEVSVPEAKSIKSTLKDEIIERNIILEKVTQRDLRRKFVCFVQNSIGNTTQSVQLKEKRGVVLLYILLGTIGTLVAVLAASALLYRHWIEIVLLYRTYQSKDQTLGDKKDFDAFVSYAKWSSFPSEATSSLSEEHLALSLFPDVLENKYGYSLCLLERDVAPGGVYAEDIVSIIKRSRRGIFILSPNYVNGPSIFELQAAVNLALDDQTLKLILIKFCYFQEPESLPHLVKKALRVLPTVTWRGLKSVPPNSRFWAKMRYHMPVKNSQGFTWNQLRITSRIFQWKGLSRTETTGRSSQPKEW

SEQ ID NO: 50204 - protein, 44 aa, Homo sapiens
MLCLGWIFLWLVAGERIKGFNISGCSTKKLLWTYSTRSEEEFVL

SEQ ID NO: 50205 - protein, 177 aa, Homo sapiens
MKLQCVSLWLLGTILILCSVDNHGLRRCLISTDMHHIEESFQEIKRAIQAKDTFPNVTILSTLETLQIIKPLDVCCVTKNLLAFYVDRVFKDHQEPNPKILRKISSIANSFLYMQKTLRQCQEQRQCHCRQEATNATRVIHDNYDQLEVHAAAIKSLGELDVFLAWINKNHEVMFSA

SEQ ID NO: 50206 - protein, 215 aa, Homo sapiens
MCTEGAFPHRSACSLPLTHVHTHIHVCVPVLWGSVPRGMKLQCVSLWLLGTILILCSVDNHGLRRCLISTDMHHIEESFQEIKRAIQAKDTFPNVTILSTLETLQIIKPLDVCCVTKNLLAFYVDRVFKDHQEPNPKILRKISSIANSFLYMQKTLRQCQEQRQCHCRQEATNATRVIHDNYDQLEVHAAAIKSLGELDVFLAWINKNHEVMFSA

SEQ ID NO: 50207 - protein, 263 aa, Homo sapiens
MDSYLLMWGLLTFIMVPGCQAELCDDDPPEIPHATFKAMAYKEGTMLNCECKRGFRRIKSGSLYMLCTGNSSHSSWDNQCQCTSSATRNTTKQVTPQPEEQKERKTTEMQSPMQPVDQASLPGHCREPPPWENEATERIYHFVVGQMVYYQCVQGYRALHRGPAESVCKMTHGKTRWTQPQLICTGEEKPQASPEGRPESETSCLVTTTDFQIQTEMAATMETSIFTTEYQVAVAGCVFLLISVLLLSGLTWQRRQRKSRRTI

SEQ ID NO: 50208 - protein, 200 aa, Homo sapiens
MDSYLLMWGLLTFIMVPGCQAELCDDDPPEIPHATFKAMAYKEGTMLNCECKRGFRRIKSGSLYMLCTGNSSHSSWDNQCQCTSSATRNTTKQVTPQPEEQKERKTTEMQSPMQPVDQASLPGEEKPQASPEGRPESETSCLVTTTDFQIQTEMAATMETSIFTTEYQVAVAGCVFLLISVLLLSGLTWQRRQRKSRRTI

SEQ ID NO: 50209 - protein, 272 aa, Homo sapiens
MDSYLLMWGLLTFIMVPGCQAELCDDDPPEIPHATFKAMAYKEGTMLNCECKRGFRRIKSGSLYMLCTGNSSHSSWDNQCQCTSSATRNTTKQVTPQPEEQKERKTTEMQSPMQPVDQASLPGHCREPPPWENEATERIYHFVVGQMVYYQCVQGYRALHRGPAESVCKMTHGKTRWTQPQLICTGEMETSQFPGEEKPQASPEGRPESETSCLVTTTDFQIQTEMAATMETSIFTTEYQVAVAGCVFLLISVLLLSGLTWQRRQRKSRRTI

SEQ ID NO: 50210 - protein, 162 aa, Homo sapiens
MVPGCQAELCDDDPPEIPHATFKAMAYKEGTMLNCECKRGFRRIKSGSLYMLCTGNSSHSSWDNQCQCTSSATRNTTKQVTPQPEEQKERKTTEMQSPMQPVDQASLPDFQIQTEMAATMETSIFTTEYQVAVAGCVFLLISVLLLSGLTWQRRQRKSRRTI

SEQ ID NO: 50211 - protein, 109 aa, Homo sapiens
  VARIANT 1: note = MOD_RES - Any amino acid
XIPHATFKAMAYKEGTMLNCECKRGFRRIKSGSLYMLCTGNSSHSSWDNQCQCTSSATRNTTKQVTPQPEEQKERKTTEMQSPMQPVDQASLPDFQIQTEMAATMETSI

SEQ ID NO: 50212 - protein, 551 aa, Homo sapiens
MAAPALSWRLPLLILLLPLATSWASAAVNGTSQFTCFYNSRANISCVWSQDGALQDTSCQVHAWPDRRRWNQTCELLPVSQASWACNLILGAPDSQKLTTVDIVTLRVLCREGVRWRVMAIQDFKPFENLRLMAPISLQVVHVETHRCNISWEISQASHYFERHLEFEARTLSPGHTWEEAPLLTLKQKQEWICLETLTPDTQYEFQVRVKPLQGEFTTWSPWSQPLAFRTKPAALGKDTIPWLGHLLVGLSGAFGFIILVYLLINCRNTGPWLKKVLKCNTPDPSKFFSQLSSEHGGDVQKWLSSPFPSSSFSPGGLAPEISPLEVLERDKVTQLLLQQDKVPEPASLSSNHSLTSCFTNQGYFFFHLPDALEIEACQVYFTYDPYSEEDPDEGVAGAPTGSSPQPLQPLSGEDDAYCTFPSRDDLLLFSPSLLGGPSPPSTAPGGSGAGEERMPPSLQERVPRDWDPQPLGPPTPGVPDLVDFQPPPELVLREAGEEVPDAGPREGVSFPWSRPPGQGEFRALNARLPLNTDAYLSLQELQGQDPTHLV

SEQ ID NO: 50213 - protein, 146 aa, Homo sapiens
MAAPALSWRLPLLILLLPLATSWASAAVNGTSQFTCFYNSRANISCVWSQDGALQDTSCQVHAWPDRRRWNQTCELLPVSQASWACNLILGAPDSQKLTTVDIVTLRVLCREGVRWRVMAIQDFKPFENLRLMAPISLQVVHVETH

SEQ ID NO: 50214 - protein, 88 aa, Homo sapiens
MAAPALSWRLPLLILLLPLATSWASAAVNGTSQFTCFYNSRANISCVWSQDGALQDTSCQVHAWPDRRRWNQTCELLPVSQASWACNL

SEQ ID NO: 50215 - protein, 188 aa, Homo sapiens
MAAPALSWRLPLLILLLPLATSWASAAVNGTSQFTCFYNSRANISCVWSQDGALQDTSCQVHAWPDRRRWNQTCELLPVSQASWACNLILGAPDSQKLTTVDIVTLRVLCREGVRWRVMAIQDFKPFENLRLMAPISLQVVHVETHRCNISWEISQASHYFERHLEFEARTLSPGHTWEEAPLLTLKQ

SEQ ID NO: 50216 - protein, 98 aa, Homo sapiens
MEPPNPLGEQYFKRTMPRIPTLKNLEDLVTEYHGNFSAWSGVSKGLAESLQPDYSERLCLVSEIPPKGGALGEGPGASPCNQHSPYWAPPCYTLKPET

SEQ ID NO: 50217 - protein, 157 aa, Homo sapiens
MLKPSLPFTSLLFLQLPLLGVGLNTTILTPNGNEDTTADFFLTTMPTDSLSVSTLPLPEVQCFVFNVEYMNCTWNSSSEPQPTNLTLHYWYKNSDNDKVQKCSHYLFSEEITSGCQLQKKEIHLYQTFVVQLQDPREPRRQATQMLKLQNLGTISGL

SEQ ID NO: 50218 - protein, 369 aa, Homo sapiens
MLKPSLPFTSLLFLQLPLLGVGLNTTILTPNGNEDTTADFFLTTMPTDSLSVSTLPLPEVQCFVFNVEYMNCTWNSSSEPQPTNLTLHYWYKNSDNDKVQKCSHYLFSEEITSGCQLQKKEIHLYQTFVVQLQDPREPRRQATQMLKLQNLVIPWAPENLTLHKLSESQLELNWNNRFLNHCLEHLVQYRTDWDHSWTEQSVDYRHKFSLPSVDGQKRYTFRVRSRFNPLCGSAQHWSEWSHPIHWGSNTSKENPFLFALEAVVISVGSMGLIISLLCVYFWLERTMPRIPTLKNLEDLVTEYHGNFSAWSGVSKGLAESLQPDYSERLCLVSEIPPKGGALGEGPGASPCNQHSPYWAPPCYTLKPET

SEQ ID NO: 50219 - protein, 179 aa, Homo sapiens
MGMKTPQLEQSVDYRHKFSLPSVDGQKRYTFRVRSRFNPLCGSAQHWSEWSHPIHWGSNTSKENPFLFALEAVVISVGSMGLIISLLCVYFWLERTMPRIPTLKNLEDLVTEYHGNFSAWSGVSKGLAESLQPDYSERLCLVSEIPPKGGALGEGPGASPCNQHSPYWAPPCYTLKPET

SEQ ID NO: 50220 - protein, 553 aa, Homo sapiens
MRAPGRPALRPLPLPPLLLLLLAAPWGRAVPCVSGGLPKPANITFLSINMKNVLQWTPPEGLQGVKVTYTVQYFIYGQKKWLNKSECRNINRTYCDLSAETSDYEHQYYAKVKAIWGTKCSKWAESGRFYPFLETQIGPPEVALTTDEKSISVVLTAPEKWKRNPEDLPVSMQQIYSNLKYNVSVLNTKSNRTWSQCVTNHTLVLTWLEPNTLYCVHVESFVPGPPRRAQPSEKQCARTLKDQSSEFKAKIIFWYVLPVSITVFLFSVMGYSIYRYIHVGKEKHPANLILIYGNEFDKRFFVPAEKIVINFITLNISDDSKISHQDMSLLGKSSDVSSLNDPQPSGNLRPPQEEEEVKHLGYASHLMEIFCDSEENTEGTSLTQQESLSRTIPPDKTVIEYEYDVRTTDICAGPEEQELSLQEEVSTQGTLLESQAALAVLGPQTLQYSYTPQLQDLDPLAQEHTDSEEGPEEEPSTTLVDWDPQTGRLCIPSLSSFDQDSEGCEPSEGDGLGEEGLLSRLYEEPAPDRPPGENETYLMQFMEEWGLYVQMEN

SEQ ID NO: 50221 - protein, 209 aa, Homo sapiens
MRAPGRPALRPLPLPPLLLLLLAAPWGRAVPCVSGGLPKPANITFLSINMKNVLQWTPPEGLQGVKVTYTVQYFIYGQKKWLNKSECRNINRTYCDLSAETSDYEHQYYAKVKAIWGTKCSKWAESGRFYPFLETQIGPPEVALTTDEKSISVVLTAPEKWKRNPEDLPVSMQQIYSNLKYNVSVLNTKSNRTVSLKWNGAYIHVPLCS

SEQ ID NO: 50222 - protein, 442 aa, Homo sapiens
MSYNGLHQRVFKELKLLTLCSISSQIGPPEVALTTDEKSISVVLTAPEKWKRNPEDLPVSMQQIYSNLKYNVSVLNTKSNRTWSQCVTNHTLVLTWLEPNTLYCVHVESFVPGPPRRAQPSEKQCARTLKDQSSEFKAKIIFWYVLPVSITVFLFSVMGYSIYRYIHVGKEKHPANLILIYGNEFDKRFFVPAEKIVINFITLNISDDSKISHQDMSLLGKSSDVSSLNDPQPSGNLRPPQEEEEVKHLGYASHLMEIFCDSEENTEGTSLTQQESLSRTIPPDKTVIEYEYDVRTTDICAGPEEQELSLQEEVSTQGTLLESQAALAVLGPQTLQYSYTPQLQDLDPLAQEHTDSEEGPEEEPSTTLVDWDPQTGRLCIPSLSSFDQDSEGCEPSEGDGLGEEGLLSRLYEEPAPDRPPGENETYLMQFMEEWGLYVQMEN

SEQ ID NO: 50223 - protein, 504 aa, Homo sapiens
MKNVLQWTPPEGLQGVKVTYTVQYFIYGQKKWLNKSECRNINRTYCDLSAETSDYEHQYYAKVKAIWGTKCSKWAESGRFYPFLETQIGPPEVALTTDEKSISVVLTAPEKWKRNPEDLPVSMQQIYSNLKYNVSVLNTKSNRTWSQCVTNHTLVLTWLEPNTLYCVHVESFVPGPPRRAQPSEKQCARTLKDQSSEFKAKIIFWYVLPVSITVFLFSVMGYSIYRYIHVGKEKHPANLILIYGNEFDKRFFVPAEKIVINFITLNISDDSKISHQDMSLLGKSSDVSSLNDPQPSGNLRPPQEEEEVKHLGYASHLMEIFCDSEENTEGTSLTQQESLSRTIPPDKTVIEYEYDVRTTDICAGPEEQELSLQEEVSTQGTLLESQAALAVLGPQTLQYSYTPQLQDLDPLAQEHTDSEEGPEEEPSTTLVDWDPQTGRLCIPSLSSFDQDSEGCEPSEGDGLGEEGLLSRLYEEPAPDRPPGENETYLMQFMEEWGLYVQMEN

SEQ ID NO: 50224 - protein, 538 aa, Homo sapiens
MPRGWAAPLLLLLLQGGWGCPDLVCYTDYLQTVICILEMWNLHPSTLTLTWQDQYEELKDEATSCSLHRSAHNATHATYTCHMDVFHFMADDIFSVNITDQSGNYSQECGSFLLAESIKPAPPFNVTVTFSGQYNISWRSDYEDPAFYMLKGKLQYELQYRNRGDPWAVSPRRKLISVDSRSVSLLPLEFRKDSSYELQVRAGPMPGSSYQGTWSEWSDPVIFQTQSEELKEGWNPHLLLLLLLVIVFIPAFWSLKTHPLWRLWKKIWAVPSPERFFMPLYKGCSGDFKKWVGAPFTGSSLELGPWSPEVPSTLEVYSCHPPRSPAKRLQLTELQEPAELVESDGVPKPSFWPTAQNSGGSAYSEERDRPYGLVSIDTVTVLDAEGPCTWPCSCEDDGYPALDLDAGLEPSPGLEDPLLDAGTTVLSCGCVSAGSPGLGGPLGSLLDRLKPPLADGEDWAGGLPWGGRSPGGVSESEAGSPLAGLDMDTFDSGFVGSDCSSPVECDFTSPGDEGPPRSYLRQWVVIPPPLSSPGPQAS

SEQ ID NO: 50225 - protein, 538 aa, Homo sapiens; identical to SEQ ID NO: 50224

SEQ ID NO: 50226 - protein, 538 aa, Homo sapiens; identical to SEQ ID NO: 50224

SEQ ID NO: 50227 - protein, 263 aa, Homo sapiens
MMPKHCFLGFLISFFLTGVAGTQSTHESLKPQRVQFQSRNFHNILQWQPGRALTGNSSVYFVQYKIMFSCSMKSSHQKPSGCWQHISCNFPGCRTLAKYGQRQWKNKEDCWGTQELSCDLTSETSDIQEPYYGRVRAASAGSYSEWSMTPRFTPWWETKIDPPVMNITQVNGSLLVILHAPNLPYRYQKEKNVSIEDYYELLYRVFIINNSLEKEQKVYEGAHRAVEIEALTPHSSYCVVAEIYQPMLDRRSQRSEERCVEIP

SEQ ID NO: 50228 - protein, 130 aa, Homo sapiens
MMPKHCFLGFLISFFLTGVAGTQSTHESLKPQRVQFQSRNFHNILQWQPGRALTGNSSVYFVQYKIYGQRQWKNKEDCWGTQELSCDLTSETSDIQEPYYGRVRAASAGSYSEWSMTPRFTPWWERAKGL

SEQ ID NO: 50229 - protein, 231 aa, Homo sapiens
MMPKHCFLGFLISFFLTGVAGTQSTHESLKPQRVQFQSRNFHNILQWQPGRALTGNSSVYFVQYKIYGQRQWKNKEDCWGTQELSCDLTSETSDIQEPYYGRVRAASAGSYSEWSMTPRFTPWWETKIDPPVMNITQVNGSLLVILHAPNLPYRYQKEKNVSIEDYYELLYRVFIINNSLEKEQKVYEGAHRAVEIEALTPHSSYCVVAEIYQPMLDRRSQRSEERCVEIP

SEQ ID NO: 50230 - protein, 520 aa, Homo sapiens
MAGPERWGPLLLCLLQAAPGRPRLAPPQNVTLLSQNFSVYLTWLPGLGNPQDVTYFVAYQSSPTRRRWREVEECAGTKELLCSMMCLKKQDLYNKFKGRVRTVSPSSKSPWVESEYLDYLFEVEPAPPVLVLTQTEEILSANATYQLPPCMPPLDLKYEVAFWKEGAGNKTLFPVTPHGQPVQITLQPAASEHHCLSARTIYTFSVPKYSKFSKPTCFLLEVPEANWAFLVLPSLLILLLVIAAGGVIWKTLMGNPWFQRAKMPRALDFSGHTHPVATFQPSRPESVNDLFLCPQKELTRGVRPTPRVRAPATQQTRWKKDLAEDEEEEDEEDTEDGVSFQPYIEPPSFLGQEHQAPGHSEAGGVDSGRPRAPLVPSEGSSAWDSSDRSWASTVDSSWDRAGSSGYLAEKGPGQGPGGDGHQESLPPPEFSKDSGFLEELPEDNLSSWATWGTLPPEPNLVPGGPPVSLQTLTFCWESSPEEEEEARESEIEDSDAGSWGAESTQRTEDRGRTLGHYMAR

SEQ ID NO: 50231 - protein, 244 aa, Homo sapiens
MAGPERWGPLLLCLLQAAPGRPRLAPPQNVTLLSQNFSVYLTWLPGLGNPQDVTYFVAYQSSPTRRRWREVEECAGTKELLCSMMCLKKQDLYNKFKGRVRTVSPSSKSPWVESEYLDYLFEVEPAPPVLVLTQTEEILSANATYQLPPCMPPLDLKYEVAFWKEGAGNKTLFPVTPHGQPVQITLQPAASEHHCLSARTIYTFSVPKYSKFSKPTCFLLEVPGLFWTHTPCGNLSAQQTRVRE

SEQ ID NO: 50232 - protein, 211 aa, Homo sapiens
MAGPERWGPLLLCLLQAAPGRPRLAPPQNVTLLSQNFSVYLTWLPGLGNPQDVTYFVAYQSSPTRRRWREVEECAGTKELLCSMMCLKKQDLYNKFKGRVRTVSPSSKSPWVESEYLDYLFEVEPAPPVLVLTQTEEILSANATYQLPPCMPPLDLKYEVAFWKEGAGNKVGSSFPAPRLGPLLHPFLLRFFSPSQPAPAPLLQEVFPVHS

SEQ ID NO: 50233 - protein, 185 aa, Homo sapiens
MMCLKKQDLYNKFKGRVRTVSPSSKSPWVESEYLDYLFEVEPAPPVLVLTQTEEILSANATYQLPPCMPPLDLKYEVAFWKEGAGNKTLFPVTPHGQPVQITLQPAASEHHCLSARTIYTFSVPKYSKFSKPTCFLLEVPEANWAFLVLPSLLILLLVIAAGGVIWKTLMGNPWFQRAKMPRALV

SEQ ID NO: 50234 - protein, 491 aa, Homo sapiens
MAGPERWGPLLLCLLQAAPGRPRLAPPQNVTLLSQNFSVYLTWLPGLGNPQDVTYFVAYQSSPTRRRWREVEECAGTKELLCSMMCLKKQDLYNKFKGRVRTVSPSSKSPWVESEYLDYLFEVEPAPPVLVLTQTEEILSANATYQLPPCMPPLDLKYEVAFWKEGAGNKTLFPVTPHGQPVQITLQPAASEHHCLSARTIYTFSVPKYSKFSKPTCFLLEVPEANWAFLVLPSLLILLLVIAAGGVIWKTLMGNPWFQRAKMPRALELTRGVRPTPRVRAPATQQTRWKKDLAEDEEEEDEEDTEDGVSFQPYIEPPSFLGQEHQAPGHSEAGGVDSGRPRAPLVPSEGSSAWDSSDRSWASTVDSSWDRAGSSGYLAEKGPGQGPGGDGHQESLPPPEFSKDSGFLEELPEDNLSSWATWGTLPPEPNLVPGGPPVSLQTLTFCWESSPEEEEEARESEIEDSDAGSWGAESTQRTEDRGRTLGHYMAR

SEQ ID NO: 50235 - protein, 152 aa, Homo sapiens
MSRLPVLLLLQLLVRPGLQAPMTQTTPLKTSWVNCSNMIDEIITHLKQPPLPLLDFNNLNGEDQDILMENNLRRPNLEAFNRAVKSLQNASAIESILKNLLPCLPLATAAPTRHPIHIKDGDWNEFRRKLTFYLKTLENAQAQQTTLSLAIF

SEQ ID NO: 50236 - protein, 378 aa, Homo sapiens
MVLLWLTLLLIALPCLLQTKEDPNPPITNLRMKAKAQQLTWDLNRNVTDIECVKDADYSMPAVNNSYCQFGAISLCEVTNYTVRVANPPFSTWILFPENSGKPWAGAENLTCWIHDVDFLSCSWAVGPGAPADVQYDLYLNVANRRQQYECLHYKTDAQGTRIGCRFDDISRLSSGSQSSHILVRGRSAAFGIPCTDKFVVFSQIEILTPPNMTAKCNKTHSFMHWKMRSHFNRKFRYELQIQKRMQPVITEQVRDRTSFQLLNPGTYTVQIRARERVYEFLSAWSTPQRFECDQEEGANTRAWRTSLLIALGTLLALVCVFVICRRYLVMQRLFPRIPHMKDPIGDSFQNDKLVVWEAGKAGLEECLVTEVQVVQKT

SEQ ID NO: 50237 - protein, 300 aa, Homo sapiens
MVLLWLTLLLIALPCLLQTKEGGKPWAGAENLTCWIHDVDFLSCSWAVGPGAPADVQYDLYLNVANRRQQYECLHYKTDAQGTRIGCRFDDISRLSSGSQSSHILVRGRSAAFGIPCTDKFVVFSQIEILTPPNMTAKCNKTHSFMHWKMRSHFNRKFRYELQIQKRMQPVITEQVRDRTSFQLLNPGTYTVQIRARERVYEFLSAWSTPQRFECDQEEGANTRAWRTSLLIALGTLLALVCVFVICRRYLVMQRLFPRIPHMKDPIGDSFQNDKLVVWEAGKAGLEECLVTEVQVVQKT

SEQ ID NO: 50238 - protein, 164 aa, Homo sapiens
MVLLWLTLLLIALPCLLQTKEGGKPWAGAENLTCWIHDVDFLSCSWAVGPGAPADVQYDLYLNVANRRQQYECLHYKTDAQGTRIGCRFDDISRLSSGSQSSHILVRGRSAAFGIPCTDKFVVFSQIEILTPPNMTAKCNKTHSFMHWKMRSHFNRKFRYELQI

SEQ ID NO: 50239 - protein, 440 aa, Homo sapiens
MTYWRLENIAKTEPPKIFRVKPVLGIKRMIQIEWIKPELAPVSSDLKYTLRFRTVNSTSWMEVNFAKNRKDKNQTYNLTGLQPFTEYVIALRCAVKESKFWSDWSQEKMGMTEEEAPCGLELWRVLKPAEADGRRPVRLLWKKARGAPVLEKTLGYNIWYYPESNTNLTETMNTTNQQLELHLGGESFWVSMISYNSLGKSPVATLRIPAIQEKSFQCIEVMQACVAEDQLVVKWQSSALDVNTWMIEWFPDVDSEPTTLSWESVSQATNWTIQQDKLKPFWCYNISVYPMLHDKVGEPYSIQAYAKEGVPSEGPETKVENIGVKTVTITWKEIPKSERKGIICNYTIFYQAEGGKGFCKHAHSEVEKNPKPQIDAMDRPVVGMAPPSHCDLQPGMNHLASLNLSENGAKSTHLLGFWGLNESEVTVPERRVLRKWKELL

SEQ ID NO: 50240 - protein, 662 aa, Homo sapiens
MKLSPQPSCVNLGMMWTWALWMLPSLCKFSLAALPAKPENISCVYYYRKNLTCTWSPGKETSYTQYTVKRTYAFGEKHDNCTTNSSTSENRASCSFFLPRITIPDNYTIEVEAENGDGVIKSHMTYWRLENIAKTEPPKIFRVKPVLGIKRMIQIEWIKPELAPVSSDLKYTLRFRTVNSTSWMEVNFAKNRKDKNQTYNLTGLQPFTEYVIALRCAVKESKFWSDWSQEKMGMTEEEAPCGLELWRVLKPAEADGRRPVRLLWKKARGAPVLEKTLGYNIWYYPESNTNLTETMNTTNQQLELHLGGESFWVSMISYNSLGKSPVATLRIPAIQEKSFQCIEVMQACVAEDQLVVKWQSSALDVNTWMIEWFPDVDSEPTTLSWESVSQATNWTIQQDKLKPFWCYNISVYPMLHDKVGEPYSIQAYAKEGVPSEGPETKVENIGVKTVTITWKEIPKSERKGIICNYTIFYQAEGGKGFSKTVNSSILQYGLESLKRKTSYIVQVMASTSAGGTNGTSINFKTLSFSVFEIILITSLIGGGLLILIILTVAYGLKKPNKLTHLCWPTVPNPAESSIATWHGDDFKDKLNLKESDDSVNTEDRILKPCSTPSDKLVIDKLVVNFGNVLQEIFTDEARTGQENNLGGEKNGTRILSSCPTSI

SEQ ID NO: 50241 - protein, 681 aa, Homo sapiens
MCIRQLKFFTTACVCECPQNILSPQPSCVNLGMMWTWALWMLPSLCKFSLAALPAKPENISCVYYYRKNLTCTWSPGKETSYTQYTVKRTYAFGEKHDNCTTNSSTSENRASCSFFLPRITIPDNYTIEVEAENGDGVIKSHMTYWRLENIAKTEPPKIFRVKPVLGIKRMIQIEWIKPELAPVSSDLKYTLRFRTVNSTSWMEVNFAKNRKDKNQTYNLTGLQPFTEYVIALRCAVKESKFWSDWSQEKMGMTEEEAPCGLELWRVLKPAEADGRRPVRLLWKKARGAPVLEKTLGYNIWYYPESNTNLTETMNTTNQQLELHLGGESFWVSMISYNSLGKSPVATLRIPAIQEKSFQCIEVMQACVAEDQLVVKWQSSALDVNTWMIEWFPDVDSEPTTLSWESVSQATNWTIQQDKLKPFWCYNISVYPMLHDKVGEPYSIQAYAKEGVPSEGPETKVENIGVKTVTITWKEIPKSERKGIICNYTIFYQAEGGKGFSKTVNSSILQYGLESLKRKTSYIVQVMASTSAGGTNGTSINFKTLSFSVFEIILITSLIGGGLLILIILTVAYGLKKPNKLTHLCWPTVPNPAESSIATWHGDDFKDKLNLKESDDSVNTEDRILKPCSTPSDKLVIDKLVVNFGNVLQEIFTDEARTGQENNLGGEKNGTRILSSCPTSI

SEQ ID NO: 50242 - protein, 662 aa, Homo sapiens; identical to SEQ ID NO: 50240

SEQ ID NO: 50243 - protein, 582 aa, Homo sapiens
MCIRQLKFFTTACVCECPQNILSPQPSCVNLGMMWTWALWMLPSLCKFSLAALPAKPENISCVYYYRKNLTCTWSPGKETSYTQYTVKRTYAFGEKHDNCTTNSSTSENRASCSFFLPRITIPDNYTIEVEAENGDGVIKSHMTYWRLENIAKTEPPKIFRVKPVLGIKRMIQIEWIKPELAPVSSDLKYTLRFRTVNSTSWMEVNFAKNRKDKNQTYNLTGLQPFTEYVIALRCAVKESKFWSDWSQEKMGMTEEEAPCGLELWRVLKPAEADGRRPVRLLWKKARGAPVLEKTLGYNIWYYPESNTNLTETMNTTNQQLELHLGGESFWVSMISYNSLGKSPVATLRIPAIQEKSFQCIEVMQACVAEDQLVVKWQSSALDVNTWMIEWFPDVDSEPTTLSWESVSQATNWTIQQDKLKPFWCYNISVYPMLHDKVGEPYSIQAYAKEGVPSEGPETKVENIGVKTVTITWKEIPKSERKGIICNYTIFYQAEGGKGFCKHAHSEVEKNPKPQIDAMDRPVVGMAPPSHCDLQPGMNHLASLNLSENGAKSTHLLGFWGLNESEVTVPERRVLRKWKELL

SEQ ID NO: 50244 - protein, 764 aa, Homo sapiens
MCIRQLKFFTTACVCECPQNILSPQPSCVNLGMMWTWALWMLPSLCKFSLAALPAKPENISCVYYYRKNLTCTWSPGKETSYTQYTVKRTYAFGEKHDNCTTNSSTSENRASCSFFLPRITIPDNYTIEVEAENGDGVIKSHMTYWRLENIAKTEPPKIFRVKPVLGIKRMIQIEWIKPELAPVSSDLKYTLRFRTVNSTSWMEVNFAKNRKDKNQTYNLTGLQPFTEYVIALRCAVKESKFWSDWSQEKMGMTEEEAPCGLELWRVLKPAEADGRRPVRLLWKKARGAPVLEKTLGYNIWYYPESNTNLTETMNTTNQQLELHLGGESFWVSMISYNSLGKSPVATLRIPAIQEKSFQCIEVMQACVAEDQLVVKWQSSALDVNTWMIEWFPDVDSEPTTLSWESVSQATNWTIQQDKLKPFWCYNISVYPMLHDKVGEPYSIQAYAKEGVPSEGPETKVENIGVKTVTITWKEIPKSERKGIICNYTIFYQAEGGKGFSKTVNSSILQYGLESLKRKTSYIVQVMASTSAGGTNGTSINFKTLSFSVFEIILITSLIGGGLLILIILTVAYGLKKPNKLTHLCWPTVPNPAESSIATWHGDDFKDKLNLKESDDSVNTEDRILKPCSTPSDKLVIDKLVVNFGNVLQEIFTDEARTGQENNLGGEKNGYVTCPFRPDCPLGKSFEELPVSPEIPPRKSQYLRSRMPEGTRPEAKEQLLFSGQSLVPDHLCEEGAPNPYLKNSVTAREFLVSEKLPEHTKGEV

SEQ ID NO: 50245 - protein, 622 aa, Homo sapiens
MTYWRLENIAKTEPPKIFRVKPVLGIKRMIQIEWIKPELAPVSSDLKYTLRFRTVNSTSWMEVNFAKNRKDKNQTYNLTGLQPFTEYVIALRCAVKESKFWSDWSQEKMGMTEEEAPCGLELWRVLKPAEADGRRPVRLLWKKARGAPVLEKTLGYNIWYYPESNTNLTETMNTTNQQLELHLGGESFWVSMISYNSLGKSPVATLRIPAIQEKSFQCIEVMQACVAEDQLVVKWQSSALDVNTWMIEWFPDVDSEPTTLSWESVSQATNWTIQQDKLKPFWCYNISVYPMLHDKVGEPYSIQAYAKEGVPSEGPETKVENIGVKTVTITWKEIPKSERKGIICNYTIFYQAEGGKGFSKTVNSSILQYGLESLKRKTSYIVQVMASTSAGGTNGTSINFKTLSFSVFEIILITSLIGGGLLILIILTVAYGLKKPNKLTHLCWPTVPNPAESSIATWHGDDFKDKLNLKESDDSVNTEDRILKPCSTPSDKLVIDKLVVNFGNVLQEIFTDEARTGQENNLGGEKNGYVTCPFRPDCPLGKSFEELPVSPEIPPRKSQYLRSRMPEGTRPEAKEQLLFSGQSLVPDHLCEEGAPNPYLKNSVTAREFLVSEKLPEHTKGEV

SEQ ID NO: 50246 - protein, 155 aa, Homo sapiens
MVLSGALCFRMKDSALKVLYLHNNQLLAGGLHAGKVIKGEEISVVPNRWLDASLSPVILGVQGGSQCLSCGVGQEPTLTLEPVNIMELYLGAKESKSFTFYRRDMGLTSSFESAAYPGWFLCTVPEADQPVRLTQLPENGGWNAPITDFYFQQCD

SEQ ID NO: 50247 - protein, 155 aa, Homo sapiens; identical to SEQ ID NO: 50246

SEQ ID NO: 50248 - protein, 117 aa, Homo sapiens
MVLSGALCFRMKDSALKVLYLHNNQLLAGGLHAGKVIKGEEISVVPNRWLDASLSPVILGVQGGSQCLSCGVGQEPTLTLEPVNIMELYLGAKESKSFTFYRRDMGLTSSFESAAYP

SEQ ID NO: 50249 - protein, 825 aa, Homo sapiens
MGWLCSGLLFPVSCLVLLQVASSGNMKVLQEPTCVSDYMSISTCEWKMNGPTNCSTELRLLYQLVFLLSEAHTCIPENNGGAGCVCHLLMDDVVSADNYTLDLWAGQQLLWKGSFKPSEHVKPRAPGNLTVHTNVSDTLLLTWSNPYPPDNYLYNHLTYAVNIWSENDPADFRIYNVTYLEPSLRIAASTLKSGISYRARVRAWAQCYNTTWSEWSPSTKWHNSYREPFEQHLLLGVSVSCIVILAVCLLCYVSITKIKKEWWDQIPNPARSRLVAIIIQDAQGSQWEKRSRGQEPAKCPHWKNCLTKLLPCFLEHNMKRDEDPHKAAKEMPFQGSGKSAWCPVEISKTVLWPESISVVRCVELFEAPVECEEEEEVEEEKGSFCASPESSRDDFQEGREGIVARLTESLFLDLLGEENGGFCQQDMGESCLLPPSGSTSAHMPWDEFPSAGPKEAPPWGKEQPLHLEPSPPASPTQSPDNLTCTETPLVIAGNPAYRSFSNSLSQSPCPRELGPDPLLARHLEEVEPEMPCVPQLSEPTTVPQPEPETWEQILRRNVLQHGAAAAPVSAPTSGYQEFVHAVEQGGTQASAVVGLGPPGEAGYKAFSSLLASSAVSPEKCGFGASSGEEGYKPFQDLIPGCPGDPAPVPVPLFTFGLDREPPRSPQSSHLPSSSPEHLGLEPGEKVEDMPKPPLPQEQATDPLVDSLGSGIVYSALTCHLCGHLKQCHGQEDGGQTPVMASPCCGCCCGDRSSPPTTPLRAPDPSPGGVPLEASLCPASLAPSGISEKSKSSSSFHPAPGNAQSSSQTPKIVNFVSVGPTYMRVS

SEQ ID NO: 50250 - protein, 810 aa, Homo sapiens
MQKDARREGNMKVLQEPTCVSDYMSISTCEWKMNGPTNCSTELRLLYQLVFLLSEAHTCIPENNGGAGCVCHLLMDDVVSADNYTLDLWAGQQLLWKGSFKPSEHVKPRAPGNLTVHTNVSDTLLLTWSNPYPPDNYLYNHLTYAVNIWSENDPADFRIYNVTYLEPSLRIAASTLKSGISYRARVRAWAQCYNTTWSEWSPSTKWHNSYREPFEQHLLLGVSVSCIVILAVCLLCYVSITKIKKEWWDQIPNPARSRLVAIIIQDAQGSQWEKRSRGQEPAKCPHWKNCLTKLLPCFLEHNMKRDEDPHKAAKEMPFQGSGKSAWCPVEISKTVLWPESISVVRCVELFEAPVECEEEEEVEEEKGSFCASPESSRDDFQEGREGIVARLTESLFLDLLGEENGGFCQQDMGESCLLPPSGSTSAHMPWDEFPSAGPKEAPPWGKEQPLHLEPSPPASPTQSPDNLTCTETPLVIAGNPAYRSFSNSLSQSPCPRELGPDPLLARHLEEVEPEMPCVPQLSEPTTVPQPEPETWEQILRRNVLQHGAAAAPVSAPTSGYQEFVHAVEQGGTQASAVVGLGPPGEAGYKAFSSLLASSAVSPEKCGFGASSGEEGYKPFQDLIPGCPGDPAPVPVPLFTFGLDREPPRSPQSSHLPSSSPEHLGLEPGEKVEDMPKPPLPQEQATDPLVDSLGSGIVYSALTCHLCGHLKQCHGQEDGGQTPVMASPCCGCCCGDRSSPPTTPLRAPDPSPGGVPLEASLCPASLAPSGISEKSKSSSSFHPAPGNAQSSSQTPKIVNFVSVGPTYMRVS

SEQ ID NO: 50251 - protein, 227 aa, Homo sapiens
MGWLCSGLLFPVSCLVLLQVASSGNMKVLQEPTCVSDYMSISTCEWKMNGPTNCSTELRLLYQLVFLLSEAHTCIPENNGGAGCVCHLLMDDVVSADNYTLDLWAGQQLLWKGSFKPSEHVKPRAPGNLTVHTNVSDTLLLTWSNPYPPDNYLYNHLTYAVNIWSENDPADFRIYNVTYLEPSLRIAASTLKSGISYRARVRAWAQCYNTTWSEWSPSTKWHNFSVC

SEQ ID NO: 50252 - protein, 825 aa, Homo sapiens; identical to SEQ ID NO: 50249

SEQ ID NO: 50253 - protein, 227 aa, Homo sapiens
MGWLCSGLLFPVSCLVLLQVASSGNMKVLQEPTCVSDYMSISTCEWKMNGPTNCSTELRLLYQLVFLLSEAHTCIPENNGGAGCVCHLLMDDVVSADNYTLDLWAGQQLLWKGSFKPSEHVKPRAPGNLTVHTNVSDTLLLTWSNPYPPDNYLYNHLTYAVNIWSENDPADFRIYNVTYLEPSLRIAASTLKSGISYRARVRAWAQCYNTTWSEWSPSTKWHNSNIC

SEQ ID NO: 50254 - protein, 825 aa, Homo sapiens; identical to SEQ ID NO: 50249

SEQ ID NO: 50255 - protein, 420 aa, Homo sapiens
MIIVAHVLLILLGATEILQADLLPDEKISLLPPVNFTIKVTGLAQVLLQWKPNPDQEQRNVNLEYQVKINAPKEDDYETRITESKCVTILHKGFSASVRTILQNDHSLLASSWASAELHAPPGSPGTSIVNLTCTTNTTEDNYSRLRSYQVSLHCTWLVGTDAPEDTQYFLYYRYGSWTEECQEYSKDTLGRNIACWFPRTFILSKGRDWLAVLVNGSSKHSAIRPFDQLFALHAIDQINPPLNVTAEIEGTRLSIQWEKPVSAFPIHCFDYEVKIHNTRNGYLQIEKLMTNAFISIIDDLSKYDVQVRAAVSSMCREAGLWSEWSQPIYVGNDEHKPLREWFVIVIMATICFILLILSLICKICHLWIKLFPPIPAPKSNIKDLFVTTNYEKAGSSETEIEVICYIEKPGVETLEDSVF

SEQ ID NO: 50256 - protein, 335 aa, Homo sapiens
MIIVAHVLLILLGATEILQADLLPDEKISLLPPVNFTIKVTGLAQVLLQWKPNPDQEQRNVNLEYQVKINAPKEDDYETRITESKCVTILHKGFSASVRTILQNDHSLLASSWASAELHAPPGSPGTSIVNLTCTTNTTEDNYSRLRSYQVSLHCTWLVGTDAPEDTQYFLYYRYGSWTEECQEYSKDTLGRNIACWFPRTFILSKGRDWLAVLVNGSSKHSAIRPFDQLFALHAIDQINPPLNVTAEIEGTRLSIQWEKPVSAFPIHCFDYEVKIHNTRNGYLQIEKLMTNAFISIIDDLSKYDVQVRAAVSSMCREAGLWSEWSQPIYVGFSR

SEQ ID NO: 50257 - protein, 150 aa, Homo sapiens
MTNAFISIIDDLSKYDVQVRAAVSSMCREAGLWSEWSQPIYVGNDEHKPLREWFVIVIMATICFILLILSLICKICHLWIKLFPPIPAPKSNIKDLFVTTNYEVLCIFIYILDSADNFLQKKKAGSSETEIEVICYIEKPGVETLEDSVF

SEQ ID NO: 50258 - protein, 335 aa, Homo sapiens; identical to SEQ ID NO: 50256

SEQ ID NO: 50259 - protein, 325 aa, Homo sapiens
MIIVAHVLLILLGATEILQADLLPDEKISLLPPVNFTIKVTGLAQVLLQWKPNPDQEQRNVNLEYQVKINAPKEDDYETRITESKCVTILHKGFSASVRTILQNDHSLLASSWASAELHAPPGSPGTSIVNLTCTTNTTEDNYSRLRSYQVSLHCTWLVGTDAPEDTQYFLYYRYGSWTEECQEYSKDTLGRNIACWFPRTFILSKGRDWLAVLVNGSSKHSAIRPFDQLFALHAIGNDEHKPLREWFVIVIMATICFILLILSLICKICHLWIKLFPPIPAPKSNIKDLFVTTNYEKAGSSETEIEVICYIEKPGVETLEDSVF

SEQ ID NO: 50260 - protein, 109 aa, Homo sapiens
MIIVAHVLLILLGATEILQADLLPDEKISLLPPVNFTIKVTGLAQVLLQWKPNPDQEQRNVNLEYQVKINAPKEDDYETRITESKCVTILHKGFSASVRTILQNDHSLL

SEQ ID NO: 50261 - protein, 333 aa, Homo sapiens
MIIVAHVLLILLGATEILQADLLPDEKISLLPPVNFTIKVTGLAQVLLQWKPNPDQEQRNVNLEYQVKINAPKEDDYETRITESKCVTILHKGFSASVRTILQNDHSLLASSWASAELHAPPGSPGTSIVNLTCTTNTTEDNYSRLRSYQVSLHCTWLVGTDAPEDTQYFLYYRYGSWTEECQEYSKDTLGRNIACWFPRTFILSKGRDWLAVLVNGSSKHSAIRPFDQLFALHAIDQINPPLNVTAEIEGTRLSIQWEKPVSAFPIHCFDYEVKIHNTRNGYLQIEKLMTNAFISIIDDLSKYDVQVRAAVSSMCREAGLWSEWSQPIYVGK

SEQ ID NO: 50262 - protein, 378 aa, Homo sapiens
MIIVAHVLLILLGATEILQADLLPDEKISLLPPVNFTIKVTGLAQVLLQWKPNPDQEQRNVNLEYQVKINAPKEDDYETRITESKCVTILHKGFSASVRTILQNDHSLLASSWASAELHAPPGSPGTSIVNLTCTTNTTEDNYSRLRSYQVSLHCTWLVGTDAPEDTQYFLYYRYGSWTEECQEYSKDTLGRNIACWFPRTFILSKGRDWLAVLVNGSSKHSAIRPFDQLFALHAIDQINPPLNVTAEIEGTRLSIQWEKPVSAFPIHCFDYEVKIHNTRNGYLQIEKLMTNAFISIIDDLSKYDVQVRAAVSSMCREAGLWSEWSQPIYVGNDEHKPLREWFVIVIMATICFILLILSLICKIKLGPVRRKLKSSVI

SEQ ID NO: 50263 - protein, 196 aa, Homo sapiens
MIIVAHVLLILLGATEILQADLLPDEKISLLPPVNFTIKVTGLAQVLLQWKPNPDQEQRNVNLEYQVKINAPKEDDYETRITESKCVTILHKGFSASVRTILQNDHSLLASSWASAELHAPPGSPGTSIVNLTCTTNTTEDNYSRLRSYQVSLHCTWLVGTDAPEDTQYFLYYRYGSWTEECQEYSKDTLGRNIAC

SEQ ID NO: 50264 - protein, 211 aa, Homo sapiens
MIIVAHVLLILLGATEILQADLLPDEKISLLPPVNFTIKVTGLAQVLLQWKPNPDQEQRNVNLEYQVKINAPKEDDYETRITESKCVTILHKGFSASVRTILQNDHSLLASSWASAELHAPPGNDEHKPLREWFVIVIMATICFILLILSLICKICHLWIKLFPPIPAPKSNIKDLFVTTNYEKAGSSETEIEVICYIEKPGVETLEDSVF

SEQ ID NO: 50265 - protein, 420 aa, Homo sapiens; identical to SEQ ID NO: 50255

SEQ ID NO: 50266 - protein, 333 aa, Homo sapiens; identical to SEQ ID NO: 50261

SEQ ID NO: 50267 - protein, 365 aa, Homo sapiens [sequence omitted]

SEQ ID NO: 50268 - protein, 468 aa, Homo sapiens
MLAVGCALLAALLAAPGAALAPRRCPAQEVARGVLTSLPGDSVTLTCPGVEPEDNATVHWVLRKPAAGSHPSRWAGMGRRLLLRSVQLHDSGNYSCYRAGRPAGTVHLLVDVPPEEPQLSCFRKSPLSNVVCEWGPRSTPSLTTKAVLLVRKFQNSPAEDFQEPCQYSQESQKFSCQLAVPEGDSSFYIVSMCVASSVGSKFSKTQTFQGCGILQPDPPANITVTAVARNPRWLSVTWQDPHSWNSSFYRLRFELRYRAERSKTFTTWMVKDLQHHCVIHDAWSGLRHVVQLRAQEEFGQGEWSEWSPEAMGTPWTESRSPPAENEVSTPMQALTTNKDDDNILFRDSANATSLPVQDSSSVPLPTFLVAGGSLAFGTLLCIAIVLRFKKTWKLRALKEGKTSMHPPYSLGQLVPERPRPTPVLVPLISPPVSPSSLGSDNTSSHNRPDARDPRSPYDISNTDYFFPR

SEQ ID NO: 50269 - protein, 918 aa, Homo sapiens
MLTLQTWLVQALFIFLTTESTGELLDPCGYISPESPVVQLHSNFTAVCVLKEKCMDYFHVNANYIVWKTNHFTIPKEQYTIINRTASSVTFTDIASLNIQLTCNILTFGQLEQNVYGITIISGLPPEKPKNLSCIVNEGKKMRCEWDGGRETHLETNFTLKSEWATHKFADCKAKRDTPTSCTVDYSTVYFVNIEVWVEAENALGKVTSDHINFDPVYKVKPNPPHNLSVINSEELSSILKLTWTNPSIKSVIILKYNIQYRTKDASTWSQIPPEDTASTRSSFTVQDLKPFTEYVFRIRCMKEDGKGYWSDWSEEASGITYEDRPSKAPSFWYKIDPSHTQGYRTVQLVWKTLPPFEANGKILDYEVTLTRWKSHLQNYTVNATKLTVNLTNDRYLATLTVRNLVGKSDAAVLTIPACDFQATHPVMDLKAFPKDNMLWVEWTTPRESVKKYILEWCVLSDKAPCITDWQQEDGTVHRTYLRGNLAESKCYLITVTPVYADGPGSPESIKAYLKQAPPSKGPTVRTKKVGKNEAVLEWDQLPVDVQNGFIRNYTIFYRTIIGNETAVNVDSSHTEYTLSSLTSDTLYMVRMAAYTDEGGKDGPEFTFTTPKFAQGEIEAIVVPVCLAFLLTTLLGVLFCFNKRDLIKKHIWPNVPDPSKSHIAQWSPHTPPRHNFNSKDQMYSDGNFTDVSVVEIEANDKKPFPEDLKSLDLFKKEKINTEGHSSGIGGSSCMSSSRPSISSSDENESSQNTSSTVQYSTVVHSGYRHQVPSVQVFSRSESTQPLLDSEERPEDLQLVDHVDGGDGILPRQQYFKQNCSQHESSPDISHFERSKQVSSVNEEDFVRLKQQISDHISQSCGSGQMKMFQEVSAADAFGPGTEGQVERFETVGMEAATDEGMPKSYLPQTVRQGGYMPQ

SEQ ID NO: 50270 - protein, 329 aa, Homo sapiens
MLTLQTWLVQALFIFLTTESTGELLDPCGYISPESPVVQLHSNFTAVCVLKEKCMDYFHVNANYIVWKTNHFTIPKEQYTIINRTASSVTFTDIASLNIQLTCNILTFGQLEQNVYGITIISGLPPEKPKNLSCIVNEGKKMRCEWDGGRETHLETNFTLKSEWATHKFADCKAKRDTPTSCTVDYSTVYFVNIEVWVEAENALGKVTSDHINFDPVYKVKPNPPHNLSVINSEELSSILKLTWTNPSIKSVIILKYNIQYRTKDASTWSQIPPEDTASTRSSFTVQDLKPFTEYVFRIRCMKEDGKGYWSDWSEEASGITYEDNIASF

SEQ ID NO: 50271 - protein, 857 aa, Homo sapiens
MLTLQTWLVQALFIFLTTESTGELLDPCGYISPESPVVQLHSNFTAVCVLKEKCMDYFHVNANYIVWKTNHFTIPKEQYTIINRTASSVTFTDIASLNIQLTCNILTFGQLEQNVYGITIISGLPPEKPKNLSCIVNEGKKMRCEWDGGRETHLETNFTLKSEWATHKFADCKAKRDTPTSCTVDYSTVYFVNIEVWVEAENALGKVTSDHINFDPVYKVKPNPPHNLSVINSEELSSILKLTWTNPSIKSVIILKYNIQYRTKDASTWSQIPPEDTASTRSSFTVQDLKPFTEYVFRIRCMKEDGKGYWSDWSEEASGITYEDRPSKAPSFWYKIDPSHTQGYRTVQLVWKTLPPFEANGKILDYEVTLTRWKSHLQNYTVNATKLTVNLTNDRYLATLTVRNLVGKSDAAVLTIPACDFQGNLAESKCYLITVTPVYADGPGSPESIKAYLKQAPPSKGPTVRTKKVGKNEAVLEWDQLPVDVQNGFIRNYTIFYRTIIGNETAVNVDSSHTEYTLSSLTSDTLYMVRMAAYTDEGGKDGPEFTFTTPKFAQGEIEAIVVPVCLAFLLTTLLGVLFCFNKRDLIKKHIWPNVPDPSKSHIAQWSPHTPPRHNFNSKDQMYSDGNFTDVSVVEIEANDKKPFPEDLKSLDLFKKEKINTEGHSSGIGGSSCMSSSRPSISSSDENESSQNTSSTVQYSTVVHSGYRHQVPSVQVFSRSESTQPLLDSEERPEDLQLVDHVDGGDGILPRQQYFKQNCSQHESSPDISHFERSKQVSSVNEEDFVRLKQQISDHISQSCGSGQMKMFQEVSAADAFGPGTEGQVERFETVGMEAATDEGMPKSYLPQTVRQGGYMPQ

SEQ ID NO: 50272 - protein, 918 aa, Homo sapiens; identical to SEQ ID NO: 50269

SEQ ID NO: 50273 - protein, 329 aa, Homo sapiens; identical to SEQ ID NO: 50270

SEQ ID NO: 50274 - protein, 329 aa, Homo sapiens; identical to SEQ ID NO: 50270

SEQ ID NO: 50275 - protein, 329 aa, Homo sapiens
MLTLQTWLVQALFIFLTTESTGELLDPCGYISPESPVVQLHSNFTAVCVLKEKCMDYFHVNANYIVWKTNHFTIPKEQYTIINRTASSVTFTDIASLNIQLTCNILTFGQLEQNVYGITIISGLPPEKPKNLSCIVNEGKKMRCEWDGGRETHLETNFTLKSEWATHKFADCKAKRDTPTSCTVDYSTVYFVNIEVWVEAENALGKVTSDHINFDPVYKVKPNPPHNLSVINSEELSSILKLTWTNPSIKSVIILKYNIQYRTKDASTWSQIPPEDTASTRSSFTVQDLKPFTEYVFRIRCMKEDGKGYWSDWSEEASGITYEDTIFSF

SEQ ID NO: 50276 - protein, 459 aa, Homo sapiens
MTILGTTFGMVFSLLQVVSGESGYAQNGDLEDAELDDYSFSCYSQLEVNGSQHSLTCAFEDPDVNITNLEFEICGALVEVKCLNFRKLQEIYFIETKKFLLIGKSNICVKVGEKSLTCKKIDLTTIVKPEAPFDLSVVYREGANDFVVTFNTSHLQKKYVKVLMHDVAYRQEKDENKWTHVNLSSTKLTLLQRKLQPAAMYEIKVRSIPDHYFKGFWSEWSPSYYFRTPEINNSSGEMDPILLTISILSFFSVALLVILACVLWKKRIKPIVWPSLPDHKKTLEHLCKKPRKNLNVSFNPESFLDCQIHRVDDIQARDEVEGFLQDTFPQQLEESEKQRLGGDVQSPNCPSEDVVITPESFGRDSSLTCLAGNVSACDAPILSSSRSLDCRESGKNGPHVYQDLLLSLGTTNSTLPPPFSLQSGILTLNPVAQGQPILTSLGSNQEEAYVTMSSFYQNQ

SEQ ID NO: 50277 - protein, 262 aa, Homo sapiens
MTILGTTFGMVFSLLQVVSGESGYAQNGDLEDAELDDYSFSCYSQLEVNGSQHSLTCAFEDPDVNITNLEFEICGALVEVKCLNFRKLQEIYFIETKKFLLIGKSNICVKVGEKSLTCKKIDLTTIVKPEAPFDLSVVYREGANDFVVTFNTSHLQKKYVKVLMHDVAYRQEKDENKWTHVNLSSTKLTLLQRKLQPAAMYEIKVRSIPDHYFKGFWSEWSPSYYFRTPEINNSSGLSLSYGPVSPIIRRLWNIFVRNQEKI

SEQ ID NO: 50278 - protein, 261 aa, Homo sapiens
MTILGTTFGMVFSLLQVVSGESGYAQNGDLEDAELDDYSFSCYSQLEVNGSQHSLTCAFEDPDVNITNLEFEICGALVEVKCLNFRKLQEIYFIETKKFLLIGKSNICVKVGEKSLTCKKIDLTTIVKPEAPFDLSVVYREGANDFVVTFNTSHLQKKYVKVLMHDVAYRQEKDENKWTHVNLSSTKLTLLQRKLQPAAMYEIKVRSIPDHYFKGFWSEWSPSYYFRTPEINNSSGLSLSYGPVSPIIRRLWNIFVRNQEK

SEQ ID NO: 50279 - protein, 59 aa, Homo sapiens
MTILGTTFGMVFSLLQVVSGESGYAQNGDLEDAELDDYSFSCYSQLEVNGSQHSLTCAF

SEQ ID NO: 50280 - protein, 52 aa, Homo sapiens
MTILGTTFGMVFSLLQVVSGESGYAQNGDLEDAELDDYSFSCYSQLEVNGSQ

SEQ ID NO: 50281 - protein, 521 aa, Homo sapiens
MGLGRCIWEGWTLESEALRRDMGTWLLACICICTCVCLGVSVTGEGQGPRSRTFTCLTNNILRIDCHWSAPELGQGSSPWLLFTSNQAPGGTHKCILRGSECTVVLPPEAVLVPSDNFTITFHHCMSGREQVSLVDPEYLPRRHVKLDPPSDLQSNISSGHCILTWSISPALEPMTTLLSYELAFKKQEEAWEQAQHRDHIVGVTWLILEAFELDPGFIHEARLRVQMATLEDDVVEEERYTGQWSEWSQPVCFQAPQRQGPLIPPWGWPGNTLVAVSIFLLLTGPTYLLFKLSPRVKRIFYQNVPSPAMFFQPLYSVHNGNFQTWMGAHGAGVLLSQDCAGTPQGALEPCVQEATALLTCGPARPWKSVALEEEQEGPGTRLPGNLSSEDVLPAGCTEWRVQTLAYLPQEDWAPTSLTRPAPPDSEGSRSSSSSSSSNNNNYCALGCYGGWHLSALPGNTQSSGPIPALACGLSCDHQGLETQQGVAWVLAGHCQRPGLHEDLQGMLLPSVLSKARSWTF

SEQ ID NO: 50282 - protein, 342 aa, Homo sapiens
MPQTCDGTGQMHLGSNCCKNGQTLLQRTCHGVSCCGWWFQAARSILGKGPSAQSLAGWTLESEALRRDMGTWLLACICICTCVCLGVSVTGEGQGPRSRTFTCLTNNILRIDCHWSAPELGQGSSPWLLFTRLLAAHISASCGAVSAPSCCHLRQCSCHLTISPSLSTTACLGGSRSAWWTRSTCPGDTSNISSGHCILTWSISPALEPMTTLLSYELAFKKQEEAWEQAQHRDHIVGVTWLILEAFELDPGFIHEARLRVQMATLEDDVVEEERYTGQWSEWSQPVCFQAPQRQGPLIPPWGWPGNTLVAVSIFLLLTGPTYLLFKLSPRLGWGPTGPVCC

SEQ ID NO: 50283 - protein, 500 aa, Homo sapiens
MGTWLLACICICTCVCLGVSVTGEGQGPRSRTFTCLTNNILRIDCHWSAPELGQGSSPWLLFTSNQAPGGTHKCILRGSECTVVLPPEAVLVPSDNFTITFHHCMSGREQVSLVDPEYLPRRHVKLDPPSDLQSNISSGHCILTWSISPALEPMTTLLSYELAFKKQEEAWEQAQHRDHIVGVTWLILEAFELDPGFIHEARLRVQMATLEDDVVEEERYTGQWSEWSQPVCFQAPQRQGPLIPPWGWPGNTLVAVSIFLLLTGPTYLLFKLSPRVKRIFYQNVPSPAMFFQPLYSVHNGNFQTWMGAHGAGVLLSQDCAGTPQGALEPCVQEATALLTCGPARPWKSVALEEEQEGPGTRLPGNLSSEDVLPAGCTEWRVQTLAYLPQEDWAPTSLTRPAPPDSEGSRSSSSSSSSNNNNYCALGCYGGWHLSALPGNTQSSGPIPALACGLSCDHQGLETQQGVAWVLAGHCQRPGLHEDLQGMLLPSVLSKARSWTF

SEQ ID NO: 50284 - protein, 329 aa, Homo sapiens
MGTWLLACICICTCVCLGVSVTGEGQGPRSRTFTCLTNNILRIDCHWSAPELGQGSSPWLLFTSNQAPGGTHKCILRGSECTVVLPPEAVLVPSDNFTITFHHCMSGREQVSLVDPEYLPRRHVKLDPPSDLQSNISSGHCILTWSISPALEPMTTLLSYELAFKKQEEAWEQAQHRDHIVGVTWLILEAFELDPGFIHEARLRVQMATLEDDVVEEERYTGQWSEWSQPVCFQAPQRQGPLIPPWGWPGNTLVAVSIFLLLTGPTYLLFKLSPRVKRIFYQNVPSPAMFFQPLYSVHNGNFQVCAETTEGHGGQGLPRALACPRCWLS

SEQ ID NO: 50285 - protein, 332 aa, Homo sapiens
MHLGSNCCKNGQTLLQRTCHGVSCCGWWFQAARSILGKGPSAQSLAGWTLESEALRRDMGTWLLACICICTCVCLGVSVTGEGQGPRSRTFTCLTNNILRIDCHWSAPELGQGSSPWLLFTRLLAAHISASCGAVSAPSCCHLRQCSCHLTISPSLSTTACLGGSRSAWWTRSTCPGDTSNISSGHCILTWSISPALEPMTTLLSYELAFKKQEEAWEQAQHRDHIVGVTWLILEAFELDPGFIHEARLRVQMATLEDDVVEEERYTGQWSEWSQPVCFQAPQRQGPLIPPWGWPGNTLVAVSIFLLLTGPTYLLFKLSPRLGWGPTGPVCC

SEQ ID NO: 50286 - protein, 625 aa, Homo sapiens
MACYIYQLPSWVLDDLCRNMDALSEWDWMEFASYVITDLTQLRKIKSMERVQGVSITRELLWWWGMRQATVQQLVDLLCRLELYRAAQIILNWKPAPEIRCPIPAFPDSVKPEKPLAASVRKAEDEQEEGQPVRMATFPGPGSSPARAHQPAFLQPPEEDAPHSLRSDLPTSSDSKDFSTSIPKQEKLLSLAGDSLFWSEADVVQATDDFNQNRKISQGTFADVYRGHRHGKPFVFKKLRETACSSPGSIERFFQAELQICLRCCHPNVLPVLGFCAARQFHSFIYPYMANGSLQDRLQGQGGSDPLPWPQRVSICSGLLCAVEYLHGLEIIHSNVKSSNVLLDQNLTPKLAHPMAHLCPVNKRSKYTMMKTHLLRTSAAYLPEDFIRVGQLTKRVDIFSCGIVLAEVLTGIPAMDNNRSPVYLKDLLLSDIPSSTASLCSRKTGVENVMAKEICQKYLEKGAGRLPEDCAEALATAACLCLRRRNTSLQEVCGSVAAVEERLRGRETLLPWSGLSEGTGSSSNTPEETDDVDNSSLDASSSMSVAPWAGAATPLLPTENGEGRLRVIVGREADSSSEACVGLEPPQDVTETSWQIEINEAKRKLMENILLYKEEKVDSIELFGP

SEQ ID NO: 50287 - protein, 596 aa, Homo sapiens
MAGNCGARGALSAHTLLFDLPPALLGELCAVLDSCDGALGWRGLAERLSSSWLDVRHIEKYVDQGKSGTRELLWSWAQKNKTIGDLLQVLQEMGHRRAIHLITNYGAVLSPSEKSYQEGGFPNILFKETANVTVDNVLIPEHNEKGILLKSSISFQNIIEGTRNFHKDFLIGEGEIFEVYRVEIQNLTYAVKLFKQEKKMQCKKHWKRFLSELEVLLLFHHPNILELAAYFTETEKFCLIYPYMRNGTLFDRLQCVGDTAPLPWHIRIGILIGISKAIHYLHNVQPCSVICGSISSANILLDDQFQPKLTDFAMAHFRSHLEHQSCTINMTSSSSKHLWYMPEEYIRQGKLSIKTDVYSFGIVIMEVLTGCRVVLDDPKHIQLRDLLRELMEKRGLDSCLSFLDKKVPPCPRNFSAKLFCLAGRCAATRAKLRPSMDEVLNTLESTQASLYFAEDPPTSLKSFRCPSPLFLENVPSIPVEDDESQNNNLLPSDEGLRIDRMTQKTPFECSQSEVMFLSLDKKPESKRNEEACNMPSSSCEESWFPKYIVPSQDLRPYKVNIDPSSEAPGHSCRSRPVESSCSSKFSWDEYEQYKKE

SEQ ID NO: 50288 - protein, 535 aa, Homo sapiens
MAGNCGARGALSAHTLLFDLPPALLGELCAVLDSCDGALGWRGLGAVLSPSEKSYQEGGFPNILFKETANVTVDNVLIPEHNEKGILLKSSISFQNIIEGTRNFHKDFLIGEGEIFEVYRVEIQNLTYAVKLFKQEKKMQCKKHWKRFLSELEVLLLFHHPNILELAAYFTETEKFCLIYPYMRNGTLFDRLQCVGDTAPLPWHIRIGILIGISKAIHYLHNVQPCSVICGSISSANILLDDQFQPKLTDFAMAHFRSHLEHQSCTINMTSSSSKHLWYMPEEYIRQGKLSIKTDVYSFGIVIMEVLTGCRVVLDDPKHIQLRDLLRELMEKRGLDSCLSFLDKKVPPCPRNFSAKLFCLAGRCAATRAKLRPSMDEVLNTLESTQASLYFAEDPPTSLKSFRCPSPLFLENVPSIPVEDDESQNNNLLPSDEGLRIDRMTQKTPFECSQSEVMFLSLDKKPESKRNEEACNMPSSSCEESWFPKYIVPSQDLRPYKVNIDPSSEAPGHSCRSRPVESSCSSKFSWDEYEQYKKE

SEQ ID NO: 50289 - protein, 218 aa, Homo sapiens
MNKPITPSTYVRCLNVGLIRKLSDFIDPQEGWKKLAVAIKKPSGDDRYNQFHIRRFEALLQTGKSPTSELLFDWGTTNCTVGDLVDLLIQNEFFAPASLLLPDAVPKTANTLPSKEAITVQQKQMPFCDKDRTLMTPVQNLEQSYMPPDSSSPENKSLEVSDTRFHSFSFYELKNVTNNFDERPISVGGNKMGEGGFGVVYKGYVNNNCGSEEACSNG

SEQ ID NO: 50290 - protein, 336 aa, Homo sapiens
MPFCDKDRTLMTPVQNLEQSYMPPDSSSPENKSLEVSDTRFHSFSFYELKNVTNNFDERPISVGGNKMGEGGFGVVYKGYVNNTTVAVKKLAAMVDITTEELKQQFDQEIKVMAKCQHENLVELLGFSSDGDDLCLVYVYMPNGSLLDRLSCLDGTPPLSWHMRCKIAQGAANGINFLHENHHIHRDIKSANILLDEAFTAKISDFGLARASEKFAQTVMTSRIVGTTAYMAPEALRGEITPKSDIYSFGVVLLEIITGLPAVDEHREPQLLLDIKEEIEDEEKTIEDYIDKKMNDADSTSVEAMYSVASQCLHEKKNKRPDIKKVQQLLQEMTAS

SEQ ID NO: 50291 - protein, 336 aa, Homo sapiens; identical to SEQ ID NO: 50290

SEQ ID NO: 50292 - protein, 460 aa, Homo sapiens
MNKPITPSTYVRCLNVGLIRKLSDFIDPQEGWKKLAVAIKKPSGDDRYNQFHIRRFEALLQTGKSPTSELLFDWGTTNCTVGDLVDLLIQNEFFAPASLLLPDAVPKTANTLPSKEAITVQQKQMPFCDKDRTLMTPVQNLEQSYMPPDSSSPENKSLEVSDTRFHSFSFYELKNVTNNFDERPISVGGNKMGEGGFGVVYKGYVNNTTVAVKKLAAMVDITTEELKQQFDQEIKVMAKCQHENLVELLGFSSDGDDLCLVYVYMPNGSLLDRLSCLDGTPPLSWHMRCKIAQGAANGINFLHENHHIHRDIKSANILLDEAFTAKISDFGLARASEKFAQTVMTSRIVGTTAYMAPEALRGEITPKSDIYSFGVVLLEIITGLPAVDEHREPQLLLDIKEEIEDEEKTIEDYIDKKMNDADSTSVEAMYSVASQCLHEKKNKRPDIKKVQQLLQEMTAS

SEQ ID NO: 50293 - protein, 89 aa, Homo sapiens
MNKPITPSTYVRCLNVGLIRKLSDFIDPQEGWKKLAVAIKKPSGDDRYNQFHIRRFEALLQTGKSPTSELLFDWGTTNCTVGDLVDLLI

SEQ ID NO: 50294 - protein, 460 aa, Homo sapiens; identical to SEQ ID NO: 50292

SEQ ID NO: 50295 - protein, 797 aa, Homo sapiens
MYLETRRAIFVFWIFLQVQGTKDISINIYHSETKDIDNPPRNETTESTEKMYKMSTMRRIFDLAKHRTKRSAFFPTGVKVCPQESMKQILDSLQAYYRLRVCQEAVWEAYRIFLDRIPDTGEYQDWVSICQQETFCLFDIGKNFSNSQEHLDLLQQRIKQRSFPDRKDEISAEKTLGEPGETIVISTDVANVSLGPFPLTPDDTLLNEILDNTLNDTKMPTTERETEFAVLEEQRVELSVSLVNQKFKAELADSQSPYYQELAGKSQLQMQKIFKKLPGFKKIHVLGFRPKKEKDGSSSTEMQLTAIFKRHSAEAKSPASDLLSFDSNKIESEEVYHGTMEEDKQPEIYLTATDLKRLISKALEEEQSLDVGTIQFTDEIAGSLPAFGPDTQSELPTSFAVITEDATLSPELPPVEPQLETVDGAEHGLPDTSWSPPAMASTSLSEAPPFFMASSIFSLTDQGTTDTMATDQTMLVPGLTIPTSDYSAISQLALGISHPPASSDDSRSSAGGEDMVRHLDEMDLSDTPAPSEVPELSEYVSVPDHFLEDTTPVSALQYITTSSMTIAPKGRELVVFFSLRVANMAFSNDLFNKSSLEYRALEQQFTQLLVPYLRSNLTGFKQLEILNFRNGSVIVNSKMKFAKSVPYNLTKAVHGVLEDFRSAAAQQLHLEIDSYSLNIEPADQADPCKFLACGEFAQCVKNERTEEAECRCKPGYDSQGSLDGLEPGLCGPGTKECEVLQGKGAPCRLPDHSENQAYKTSVKKFQNQQNNKVISKRNSELLTVEYEEFNHQDWEGN

SEQ ID NO: 50296 - protein, 158 aa, Homo sapiens
ERPNGTSAQPAQVKPEFYRQAELKPCPWTGSNQRRCITFCPTPDQADPCKFLACGEFAQCVKNERTEEAECRCKPGYDSQGSLDGLEPGLCGPGTKECEVLQGKGAPCRLPDHSENQAYKTSVKKFQNQQNNKVISKRNSELLTVEYEEFNHQDWEGN

SEQ ID NO: 50297 - protein, 147 aa, Homo sapiens
MYLETRRAIFVFWIFLQVQGTKVCQEAVWEAYRIFLDRIPDTGEYQDWVSICQQETFCLFDIGKNFSNSQEHLDLLQQRIKQRSFPDRKDEISAEKTLGEPGETIVISTEKNKGKTKPFNILQFGNNHHEHLLPIFCLLSSIIYTYY

SEQ ID NO: 50298 - protein, 1241 aa, Homo sapiens
MIMFPLFGKISLGILIFVLIEGDFPSLTAQTYLSIEEIQEPKSAVSFLLPEESTDLSLATKKKQPLDRRETERQWLIRRRRSILFPNGVKICPDESVAEAVANHVKYFKVRVCQEAVWEAFRTFWDRLPGREEYHYWMNLCEDGVTSIFEMGTNFSESVEHRSLIMKKLTYAKETVSSSELSSPVPVGDTSTLGDTTLSVPHPEVDAYEGASESSLERPEESISNEIENVIEEATKPAGEQIAEFSIHLLGKQYREELQDSSSFHHQHLEEEFISEVENAFTGLPGYKEIRVLEFRSPKENDSGVDVYYAVTFNGEAISNTTWDLISLHSNKVENHGLVELDDKPTVVYTISNFRDYIAETLQQNFLLGNSSLNPDPDSLQLINVRGVLRHQTEDLVWNTQSSSLQATPSSILDNTFQAAWPSADESITSSIPPLDFSSGPPSATGRELWSESPLGDLVSTHKLAFPSKMGLSSSPEVLEVSSLTLHSVTPAVLQTGLPVASEERTSGSHLVEDGLANVEESEDFLSIDSLPSSSFTQPVPKETIPSMEDSDVSLTSSPYLTSSIPFGLDSLTSKVKDQLKVSPFLPDASMEKELIFDGGLGSGSGQKVDLITWPWSETSSEKSAEPLSKPWLEDDDSLLPAEIEDKKLVLVDKMDSTDQISKHSKYEHDDRSTHFPEEEPLSGPAVPIFADTAAESASLTLPKHISEVPGVDDYSVTKAPLILTSVAISASTDKSDQADAILREDMEQITESSNYEWFDSEVSMVKPDMQTLWTILPESERVWTRTSSLEKLSRDILASTPQSADRLWLSVTQSTKLPPTTISTLLEDEVIMGVQDISLELDRIGTDYYQPEQVQEQNGKVGSYVEMSTSVHSTEMVSVAWPTEGGDDLSYTQTSGALVVFFSLRVTNMMFSEDLFNKNSLEYKALEQRFLELLVPYLQSNLTGFQNLEILNFRNGSIVVNSRMKFANSVPPNVNNAVYMILEDFCTTAYNTMNLAIDKYSLDVESGDEANPCKFQACNEFSECLVNPWSGEAKCRCFPGYLSVEERPCQSLCDLQPDFCLNDGKCDIMPGHGAICRCRVGENWWYRGKHCEEFVSEPVIIGITIASVVGLLVIFSAIIYFFIRTLQAHHDRSERESPFSGSSRQPDSLSSIENAVKYNPVYESHRAGCEKYEGPYPQHPFYSSASGDVIGGLSREEIRQMYESSELSREEIQERMRVLELYANDPEFAAFVREQQVEEV

SEQ ID NO: 50299 - protein, 66 aa, Homo sapiens
GYLSVEERPCQSLCDLQPDFCLNDGKCDIMPGHGAICSGSSRQPDSLSSIENAVKYNPVYESHRAG

SEQ ID NO: 50300 - protein, 914 aa, Homo sapiens
MAQFPTPFGGSLDIWAITVEERAKHDQQFHSLKPISGFITGDQARNFFFQSGLPQPVLAQIWALADMNNDGRMDQVEFSIAMKLIKLKLQGYQLPSALPPVMKQQPVAISSAPAFGMGGIASMPPLTAVAPVPMGSIPVVGMSPTLVSSVPTAAVPPLANGAPPVIQPLPAFAHPAATLPKSSSFSRSGPGSQLNTKLQKAQSFDVASVPPVAEWAVPQSSRLKYRQLFNSHDKTMSGHLTGPQARTILMQSSLPQAQLASIWNLSDIDQDGKLTAEEFILAMHLIDVAMSGQPLPPVLPPEYIPPSFRRVRSGSGISVISSTSVDQRLPEEPVLEDEQQQLEKKLPVTFEDKKRENFERGNLELEKRRQALLEQQRKEQERLAQLERAEQERKERERQEQERKRQLELEKQLEKQRELERQREEERRKEIERREAAKRELERQRQLEWERNRRQELLNQRNKEQEDIVVLKAKKKTLEFELEALNDKKHQLEGKLQDIRCRLTTQRQEIESTNKSRELRIAEITHLQQQLQESQQMLGRLIPEKQILNDQLKQVQQNSLHRDSLVTLKRALEAKELARQHLRDQLDEVEKETRSKLQEIDIFNNQLKELREIHNKQQLQKQKSMEAERLKQKEQERKIIELEKQKEEAQRRAQERDKQWLEHVQQEDEHQRPRKLHEEEKLKREESVKKKDGEEKGKQEAQDKLGRLFHQHQEPAKPAVQAPWSTAEKGPLTISAQENVKVVYYRALYPFESRSHDEITIQPGDIVMVDESQTGEPGWLGGELKGKTGWFPANYAEKIPENEVPAPVKPVTDSTSAPAPKLALRETPAPLAVTSSEPSTTPNNWADFSSTWPTSTNEKPETDNWDAWAAQPSLTVPSAGQLRQRSAFTPATATGSSPSPVLGQHGFWFFRESC

SEQ ID NO: 50301 - protein, 317 aa, Homo sapiens
  VARIANT 1: note = MOD_RES - Any amino acid
XPLMESELLTEKEVAMIFVNWKELIMCNIKLLKALRVRKKMSGEKMPVKMIGDILSAQLPHMQPYIRFCSRQLNGAALIQQKTDEAPDFKEFVKRLAMDPRCKGMPLSSFILKPMQRVTRYPLIIKNQLVFNSVTNCLGPRKFLHSGKLYKAKSNKELYGFLFNDFLLLTQITKPLGSSGTDKVFSPKSNLQYKMYKTPIFLNEVLVKLPTDPSGDEPIFHISHIDRVYTLRAESINERTAWVQKIKAASELYIETEKKKREKAYLVRSQRATGIGRLMVNVVEGIELKPCRSHGKSNPYCEVTMGSQCHITKTIQD

SEQ ID NO: 50302 - protein, 1721 aa, Homo sapiens
MAQFPTPFGGSLDIWAITVEERAKHDQQFHSLKPISGFITGDQARNFFFQSGLPQPVLAQIWALADMNNDGRMDQVEFSIAMKLIKLKLQGYQLPSALPPVMKQQPVAISSAPAFGMGGIASMPPLTAVAPVPMGSIPVVGMSPTLVSSVPTAAVPPLANGAPPVIQPLPAFAHPAATLPKSSSFSRSGPGSQLNTKLQKAQSFDVASVPPVAEWAVPQSSRLKYRQLFNSHDKTMSGHLTGPQARTILMQSSLPQAQLASIWNLSDIDQDGKLTAEEFILAMHLIDVAMSGQPLPPVLPPEYIPPSFRRVRSGSGISVISSTSVDQRLPEEPVLEDEQQQLEKKLPVTFEDKKRENFERGNLELEKRRQALLEQQRKEQERLAQLERAEQERKERERQEQERKRQLELEKQLEKQRELERQREEERRKEIERREAAKRELERQRQLEWERNRRQELLNQRNKEQEDIVVLKAKKKTLEFELEALNDKKHQLEGKLQDIRCRLTTQRQEIESTNKSRELRIAEITHLQQQLQESQQMLGRLIPEKQILNDQLKQVQQNSLHRDSLVTLKRALEAKELARQHLRDQLDEVEKETRSKLQEIDIFNNQLKELREIHNKQQLQKQKSMEAERLKQKEQERKIIELEKQKEEAQRRAQERDKQWLEHVQQEDEHQRPRKLHEEEKLKREESVKKKDGEEKGKQEAQDKLGRLFHQHQEPAKPAVQAPWSTAEKGPLTISAQENVKVVYYRALYPFESRSHDEITIQPGDIVMVIGCWVDESQTGEPGWLGGELKGKTGWFPANYAEKIPENEVPAPVKPVTDSTSAPAPKLALRETPAPLAVTSSEPSTTPNNWADFSSTWPTSTNEKPETDNWDAWAAQPSLTVPSAGQLRQRSAFTPATATGSSPSPVLGQGEKVEGLQAQALYPWRAKKDNHLNFNKNDVITVLEQQDMWWFGEVQGQKGWFPKSYVKLISGPIRKSTSMDSGSSESPASLKRVASPAAKPVVSGEEFIAMYTYESSEQGDLTFQQGDVILVTKKDGDWWTGTVGDKAGVFPSNYVRLKDSEGSGTAGKTGSLGKKPEIAQVIASYTATGPEQLTLAPGQLILIRKKNPGGWWEGELQARGKKRQIGWFPANYVKLLSPGTSKITPTEPPKSTALAAVCQVIGMYDYTAQNDDELAFNKGQIINVLNKEDPDWWKGEVNGQVGLFPSNYVKLTTDMDPSQQWCSDLHLLDMLTPTERKRQGYIHELIVTEENYVNDLQLVTEIFQKPLMESELLTEKEVAMIFVNWKELIMCNIKLLKALRVRKKMSGEKMPVKMIGDILSAQLPHMQPYIRFCSRQLNGAALIQQKTDEAPDFKEFVKRLAMDPRCKGMPLSSFILKPMQRVTRYPLIIKNILENTPENHPDHSHLKHALEKAEELCSQVNEGVREKENSDRLEWIQAHVQCEGLSEQLVFNSVTNCLGPRKFLHSGKLYKAKSNKELYGFLFNDFLLLTQITKPLGSSGTDKVFSPKSNLQYKMYKTPIFLNEVLVKLPTDPSGDEPIFHISHIDRVYTLRAESINERTAWVQKIKAASELYIETEKKKREKAYLVRSQRATGIGRLMVNVVEGIELKPCRSHGKSNPYCEVTMGSQCHITKTIQDTLNPKWNSNCQFFIRDLEQEVLCITVFERDQFSPDDFLGRTEIRVADIKKDQGSKGPVTKCLLLHEVPTGEIVVRLDLQLFDEP

SEQ ID NO: 50303 - protein, 1650 aa, Homo sapiens
MAQFPTPFGGSLDIWAITVEERAKHDQQFHSLKPISGFITGDQARNFFFQSGLPQPVLAQIWALADMNNDGRMDQVEFSIAMKLIKLKLQGYQLPSALPPVMKQQPVAISSAPAFGMGGIASMPPLTAVAPVPMGSIPVVGMSPTLVSSVPTAAVPPLANGAPPVIQPLPAFAHPAATLPKSSSFSRSGPGSQLNTKLQKAQSFDVASVPPVAEWAVPQSSRLKYRQLFNSHDKTMSGHLTGPQARTILMQSSLPQAQLASIWNLSDIDQDGKLTAEEFILAMHLIDVAMSGQPLPPVLPPEYIPPSFRRVRSGSGISVISSTSVDQRLPEEPVLEDEQQQLEKKLPVTFEDKKRENFERGNLELEKRRQALLEQQRKEQERLAQLERAEQERKERERQEQERKRQLELEKQLEKQRELERQREEERRKEIERREAAKRELERQRQLEWERNRRQELLNQRNKEQEDIVVLKAKKKTLEFELEALNDKKHQLEGKLQDIRCRLTTQRQEIESTNKSRELRIAEITHLQQQLQESQQMLGRLIPEKQILNDQLKQVQQNSLHRDSLVTLKRALEAKELARQHLRDQLDEVEKETRSKLQEIDIFNNQLKELREIHNKQQLQKQKSMEAERLKQKEQERKIIELEKQKEEAQRRAQERDKQWLEHVQQEDEHQRPRKLHEEEKLKREESVKKKDGEEKGKQEAQDKLGRLFHQHQEPAKPAVQAPWSTAEKGPLTISAQENVKVVYYRALYPFESRSHDEITIQPGDIVMVIGCWVDESQTGEPGWLGGELKGKTGWFPANYAEKIPENEVPAPVKPVTDSTSAPAPKLALRETPAPLAVTSSEPSTTPNNWADFSSTWPTSTNEKPETDNWDAWAAQPSLTVPSAGQLRQRSAFTPATATGSSPSPVLGQGEKVEGLQAQALYPWRAKKDNHLNFNKNDVITVLEQQDMWWFGEVQGQKGWFPKSYVKLISGPIRKSTSMDSGSSESPASLKRVASPAAKPVVSGEEIAQVIASYTATGPEQLTLAPGQLILIRKKNPGGWWEGELQARGKKRQIGWFPANYVKLLSPGTSKITPTEPPKSTALAAVCQVIGMYDYTAQNDDELAFNKGQIINVLNKEDPDWWKGEVNGQVGLFPSNYVKLTTDMDPSQQWCSDLHLLDMLTPTERKRQGYIHELIVTEENYVNDLQLVTEIFQKPLMESELLTEKEVAMIFVNWKELIMCNIKLLKALRVRKKMSGEKMPVKMIGDILSAQLPHMQPYIRFCSRQLNGAALIQQKTDEAPDFKEFVKRLAMDPRCKGMPLSSFILKPMQRVTRYPLIIKNILENTPENHPDHSHLKHALEKAEELCSQVNEGVREKENSDRLEWIQAHVQCEGLSEQLVFNSVTNCLGPRKFLHSGKLYKAKSNKELYGFLFNDFLLLTQITKPLGSSGTDKVFSPKSNLQYKMYKTPIFLNEVLVKLPTDPSGDEPIFHISHIDRVYTLRAESINERTAWVQKIKAASELYIETEKKKREKAYLVRSQRATGIGRLMVNVVEGIELKPCRSHGKSNPYCEVTMGSQCHITKTIQDTLNPKWNSNCQFFIRDLEQEVLCITVFERDQFSPDDFLGRTEIRVADIKKDQGSKGPVTKCLLLHEVPTGEIVVRLDLQLFDEP

SEQ ID NO: 50304 - protein, 1078 aa, Homo sapiens
MAQFPTPFGGSLDIWAITVEERAKHDQQFHSLKPISGFITGDQARNFFFQSGLPQPVLAQIWALADMNNDGRMDQVEFSIAMKLIKLKLQGYQLPSALPPVMKQQPVAISSAPAFGMGGIASMPPLTAVAPVPMGSIPVVGMSPTLVSSVPTAAVPPLANGAPPVIQPLPAFAHPAATLPKSSSFSRSGPGSQLNTKLQKAQSFDVASVPPVAEWAVPQSSRLKYRQLFNSHDKTMSGHLTGPQARTILMQSSLPQAQLASIWNLSDIDQDGKLTAEEFILAMHLIDVAMSGQPLPPVLPPEYIPPSFRRVRSGSGISVISSTSVDQRLPEEPVLEDEQQQLEKKLPVTFEDKKRENFERGNLELEKRRQALLEQQRKEQERLAQLERAEQERKERERQEQERKRQLELEKQLEKQRELERQREEERRKEIERREAAKRELERQRQLEWERNRRQELLNQRNKEQEDIVVLKAKKKTLEFELEALNDKKHQLEGKLQDIRCRLTTQRQEIESTNKSRELRIAEITHLQQQLQESQQMLGRLIPEKQILNDQLKQVQQNSLHRDSLVTLKRALEAKELARQHLRDQLDEVEKETRSKLQEIDIFNNQLKELREIHNKQQLQKQKSMEAERLKQKEQERKIIELEKQKEEAQRRAQERDKQWLEHVQQEDEHQRPRKLHEEEKLKREESVKKKDGEEKGKQEAQDKLGRLFHQHQEPAKPAVQAPWSTAEKGPLTISAQENVKVVYYRALYPFESRSHDEITIQPGDIVMVDESQTGEPGWLGGELKGKTGWFPANYAEKIPENEVPAPVKPVTDSTSAPAPKLALRETPAPLAVTSSEPSTTPNNWADFSSTWPTSTNEKPETDNWDAWAAQPSLTVPSAGQLRQRSAFTPATATGSSPSPVLGQGEKVEGLQAQALYPWRAKKDNHLNFNKNDVITVLEQQDMWWFGEVQGQKGWFPKSYVKLISGPIRKSTSMDSGSSESPASLKRVASPAAKPVVSGEEFIAMYTYESSEQGDLTFQQGDVILVTKKDGDWWTGTVGDKAGVFPSNYVRLKDSEGSGTAGKTGSLGKKPGPSCNVK

SEQ ID NO: 50305 - protein, 1220 aa, Homo sapiens
MAQFPTPFGGSLDIWAITVEERAKHDQQFHSLKPISGFITGDQARNFFFQSGLPQPVLAQIWALADMNNDGRMDQVEFSIAMKLIKLKLQGYQLPSALPPVMKQQPVAISSAPAFGMGGIASMPPLTAVAPVPMGSIPVVGMSPTLVSSVPTAAVPPLANGAPPVIQPLPAFAHPAATLPKSSSFSRSGPGSQLNTKLQKAQSFDVASVPPVAEWAVPQSSRLKYRQLFNSHDKTMSGHLTGPQARTILMQSSLPQAQLASIWNLSDIDQDGKLTAEEFILAMHLIDVAMSGQPLPPVLPPEYIPPSFRRVRSGSGISVISSTSVDQRLPEEPVLEDEQQQLEKKLPVTFEDKKRENFERGNLELEKRRQALLEQQRKEQERLAQLERAEQERKERERQEQERKRQLELEKQLEKQRELERQREEERRKEIERREAAKRELERQRQLEWERNRRQELLNQRNKEQEDIVVLKAKKKTLEFELEALNDKKHQLEGKLQDIRCRLTTQRQEIESTNKSRELRIAEITHLQQQLQESQQMLGRLIPEKQILNDQLKQVQQNSLHRDSLVTLKRALEAKELARQHLRDQLDEVEKETRSKLQEIDIFNNQLKELREIHNKQQLQKQKSMEAERLKQKEQERKIIELEKQKEEAQRRAQERDKQWLEHVQQEDEHQRPRKLHEEEKLKREESVKKKDGEEKGKQEAQDKLGRLFHQHQEPAKPAVQAPWSTAEKGPLTISAQENVKVVYYRALYPFESRSHDEITIQPGDIVMVKGEWVDESQTGEPGWLGGELKGKTGWFPANYAEKIPENEVPAPVKPVTDSTSAPAPKLALRETPAPLAVTSSEPSTTPNNWADFSSTWPTSTNEKPETDNWDAWAAQPSLTVPSAGQLRQRSAFTPATATGSSPSPVLGQGEKVEGLQAQALYPWRAKKDNHLNFNKNDVITVLEQQDMWWFGEVQGQKGWFPKSYVKLISGPIRKSTSMDSGSSESPASLKRVASPAAKPVVSGEEFIAMYTYESSEQGDLTFQQGDVILVTKKDGDWWTGTVGDKAGVFPSNYVRLKDSEGSGTAGKTGSLGKKPEIAQVIASYTATGPEQLTLAPGQLILIRKKNPGGWWEGELQARGKKRQIGWFPANYVKLLSPGTSKITPTEPPKSTALAAVCQVIGMYDYTAQNDDELAFNKGQIINVLNKEDPDWWKGEVNGQVGLFPSNYVKLTTDMDPSQQ

SEQ ID NO: 50306 - protein, 1721 aa, Homo sapiens
MAQFPTPFGGSLDIWAITVEERAKHDQQFHSLKPISGFITGDQARNFFFQSGLPQPVLAQIWALADMNNDGRMDQVEFSIAMKLIKLKLQGYQLPSALPPVMKQQPVAISSAPAFGMGGIASMPPLTAVAPVPMGSIPVVGMSPTLVSSVPTAAVPPLANGAPPVIQPLPAFAHPAATLPKSSSFSRSGPGSQLNTKLQKAQSFDVASVPPVAEWAVPQSSRLKYRQLFNSHDKTMSGHLTGPQARTILMQSSLPQAQLASIWNLSDIDQDGKLTAEEFILAMHLIDVAMSGQPLPPVLPPEYIPPSFRRVRSGSGISVISSTSVDQRLPEEPVLEDEQQQLEKKLPVTFEDKKRENFERGNLELEKRRQALLEQQRKEQERLAQLERAEQERKERERQEQERKRQLELEKQLEKQRELERQREEERRKEIERREAAKRELERQRQLEWERNRRQELLNQRNKEQEDIVVLKAKKKTLEFELEALNDKKHQLEGKLQDIRCRLTTQRQEIESTNKSRELRIAEITHLQQQLQESQQMLGRLIPEKQILNDQLKQVQQNSLHRDSLVTLKRALEAKELARQHLRDQLDEVEKETRSKLQEIDIFNNQLKELREIHNKQQLQKQKSMEAERLKQKEQERKIIELEKQKEEAQRRAQERDKQWLEHVQQEDEHQRPRKLHEEEKLKREESVKKKDGEEKGKQEAQDKLGRLFHQHQEPAKPAVQAPWSTAEKGPLTISAQENVKVVYYRALYPFESRSHDEITIQPGDIVMVKGEWVDESQTGEPGWLGGELKGKTGWFPANYAEKIPENEVPAPVKPVTDSTSAPAPKLALRETPAPLAVTSSEPSTTPNNWADFSSTWPTSTNEKPETDNWDAWAAQPSLTVPSAGQLRQRSAFTPATATGSSPSPVLGQGEKVEGLQAQALYPWRAKKDNHLNFNKNDVITVLEQQDMWWFGEVQGQKGWFPKSYVKLISGPIRKSTSMDSGSSESPASLKRVASPAAKPVVSGEEFIAMYTYESSEQGDLTFQQGDVILVTKKDGDWWTGTVGDKAGVFPSNYVRLKDSEGSGTAGKTGSLGKKPEIAQVIASYTATGPEQLTLAPGQLILIRKKNPGGWWEGELQARGKKRQIGWFPANYVKLLSPGTSKITPTEPPKSTALAAVCQVIGMYDYTAQNDDELAFNKGQIINVLNKEDPDWWKGEVNGQVGLFPSNYVKLTTDMDPSQQWCSDLHLLDMLTPTERKRQGYIHELIVTEENYVNDLQLVTEIFQKPLMESELLTEKEVAMIFVNWKELIMCNIKLLKALRVRKKMSGEKMPVKMIGDILSAQLPHMQPYIRFCSRQLNGAALIQQKTDEAPDFKEFVKRLAMDPRCKGMPLSSFILKPMQRVTRYPLIIKNILENTPENHPDHSHLKHALEKAEELCSQVNEGVREKENSDRLEWIQAHVQCEGLSEQLVFNSVTNCLGPRKFLHSGKLYKAKSNKELYGFLFNDFLLLTQITKPLGSSGTDKVFSPKSNLQYKMYKTPIFLNEVLVKLPTDPSGDEPIFHISHIDRVYTLRAESINERTAWVQKIKAASELYIETEKKKREKAYLVRSQRATGIGRLMVNVVEGIELKPCRSHGKSNPYCEVTMGSQCHITKTIQDTLNPKWNSNCQFFIRDLEQEVLCITVFERDQFSPDDFLGRTEIRVADIKKDQGSKGPVTKCLLLHEVPTGEIVVRLDLQLFDEP

SEQ ID NO: 50307 - protein, 1015 aa, Homo sapiens
MAQFPTPFGGSLDIWAITVEERAKHDQQFHSLKPISGFITGDQARNFFFQSGLPQPVLAQIWALADMNNDGRMDQVEFSIAMKLIKLKLQGYQLPSALPPVMKQQPVAISSAPAFGMGGIASMPPLTAVAPVPMGSIPVVGMSPTLVSSVPTAAVPPLANGAPPVIQPLPAFAHPAATLPKSSSFSRSGPGSQLNTKLQKAQSFDVASVPPVAEWAVPQSSRLKYRQLFNSHDKTMSGHLTGPQARTILMQSSLPQAQLASIWNLSDIDQDGKLTAEEFILAMHLIDVAMSGQPLPPVLPPEYIPPSFRRVRSGSGISVISSTSVDQRLPEEPVLEDEQQQLEKKLPVTFEDKKRENFERGNLELEKRRQALLEQQRKEQERLAQLERAEQERKERERQEQERKRQLELEKQLEKQRELERQREEERRKEIERREAAKRELERQRQLEWERNRRQELLNQRNKEQEDIVVLKAKKKTLEFELEALNDKKHQLEGKLQDIRCRLTTQRQEIESTNKSRELRIAEITHLQQQLQESQQMLGRLIPEKQILNDQLKQVQQNSLHRDSLVTLKRALEAKELARQHLRDQLDEVEKETRSKLQEIDIFNNQLKELREIHNKQQLQKQKSMEAERLKQKEQERKIIELEKQKEEAQRRAQERDKQWLEHVQQEDEHQRPRKLHEEEKLKREESVKKKDGEEKGKQEAQDKLGRLFHQHQEPAKPAVQAPWSTAEKGPLTISAQENVKVVYYRALYPFESRSHDEITIQPGDIVMVDESQTGEPGWLGGELKGKTGWFPANYAEKIPENEVPAPVKPVTDSTSAPAPKLALRETPAPLAVTSSEPSTTPNNWADFSSTWPTSTNEKPETDNWDAWAAQPSLTVPSAGQLRQRSAFTPATATGSSPSPVLGQGEKVEGLQAQALYPWRAKKDNHLNFNKNDVITVLEQQDMWWFGEVQGQKGWFPKSYVKLISGPIRKSTSMDSGSSESPASLKRVASPAAKPVVSGEGLWNCWENREFRKKT

SEQ ID NO: 50308 - protein, 1020 aa, Homo sapiens
MAQFPTPFGGSLDIWAITVEERAKHDQQFHSLKPISGFITGDQARNFFFQSGLPQPVLAQIWALADMNNDGRMDQVEFSIAMKLIKLKLQGYQLPSALPPVMKQQPVAISSAPAFGMGGIASMPPLTAVAPVPMGSIPVVGMSPTLVSSVPTAAVPPLANGAPPVIQPLPAFAHPAATLPKSSSFSRSGPGSQLNTKLQKAQSFDVASVPPVAEWAVPQSSRLKYRQLFNSHDKTMSGHLTGPQARTILMQSSLPQAQLASIWNLSDIDQDGKLTAEEFILAMHLIDVAMSGQPLPPVLPPEYIPPSFRRVRSGSGISVISSTSVDQRLPEEPVLEDEQQQLEKKLPVTFEDKKRENFERGNLELEKRRQALLEQQRKEQERLAQLERAEQERKERERQEQERKRQLELEKQLEKQRELERQREEERRKEIERREAAKRELERQRQLEWERNRRQELLNQRNKEQEDIVVLKAKKKTLEFELEALNDKKHQLEGKLQDIRCRLTTQRQEIESTNKSRELRIAEITHLQQQLQESQQMLGRLIPEKQILNDQLKQVQQNSLHRDSLVTLKRALEAKELARQHLRDQLDEVEKETRSKLQEIDIFNNQLKELREIHNKQQLQKQKSMEAERLKQKEQERKIIELEKQKEEAQRRAQERDKQWLEHVQQEDEHQRPRKLHEEEKLKREESVKKKDGEEKGKQEAQDKLGRLFHQHQEPAKPAVQAPWSTAEKGPLTISAQENVKVVYYRALYPFESRSHDEITIQPGDIVMVDESQTGEPGWLGGELKGKTGWFPANYAEKIPENEVPAPVKPVTDSTSAPAPKLALRETPAPLAVTSSEPSTTPNNWADFSSTWPTSTNEKPETDNWDAWAAQPSLTVPSAGQLRQRSAFTPATATGSSPSPVLGQPDFLLHPSMRLGHMQPRIVLLFPDPLQCSTSRLLPMLRPRPGVPFLRSPSCQSPSHPSRPISDAAPSVKFTLMPPGRIHPCFLFIPAVNSRNSFLVYFILPGGTLGCFYLCLPHYL

SEQ ID NO: 50309 - protein, 1144 aa, Homo sapiens
MAQFPTPFGGSLDIWAITVEERAKHDQQFHSLKPISGFITGDQARNFFFQSGLPQPVLAQIWALADMNNDGRMDQVEFSIAMKLIKLKLQGYQLPSALPPVMKQQPVAISSAPAFGMGGIASMPPLTAVAPVPMGSIPVVGMSPTLVSSVPTAAVPPLANGAPPVIQPLPAFAHPAATLPKSSSFSRSGPGSQLNTKLQKAQSFDVASVPPVAEWAVPQSSRLKYRQLFNSHDKTMSGHLTGPQARTILMQSSLPQAQLASIWNLSDIDQDGKLTAEEFILAMHLIDVAMSGQPLPPVLPPEYIPPSFRRVRSGSGISVISSTSVDQRLPEEPVLEDEQQQLEKKLPVTFEDKKRENFERGNLELEKRRQALLEQQRKEQERLAQLERAEQERKERERQEQERKRQLELEKQLEKQRELERQREEERRKEIERREAAKRELERQRQLEWERNRRQELLNQRNKEQEDIVVLKAKKKTLEFELEALNDKKHQLEGKLQDIRCRLTTQRQEIESTNKSRELRIAEITHLQQQLQESQQMLGRLIPEKQILNDQLKQVQQNSLHRDSLVTLKRALEAKELARQHLRDQLDEVEKETRSKLQEIDIFNNQLKELREIHNKQQLQKQKSMEAERLKQKEQERKIIELEKQKEEAQRRAQERDKQWLEHVQQEDEHQRPRKLHEEEKLKREESVKKKDGEEKGKQEAQDKLGRLFHQHQEPAKPAVQAPWSTAEKGPLTISAQENVKVVYYRALYPFESRSHDEITIQPGDIVMVDESQTGEPGWLGGELKGKTGWFPANYAEKIPENEVPAPVKPVTDSTSAPAPKLALRETPAPLAVTSSEPSTTPNNWADFSSTWPTSTNEKPETDNWDAWAAQPSLTVPSAGQLRQRSAFTPATATGSSPSPVLGQGEKVEGLQAQALYPWRAKKDNHLNFNKNDVITVLEQQDMWWFGEVQGQKGWFPKSYVKLISGPIRKSTSMDSGSSESPASLKRVASPAAKPVVSGEEIAQVIASYTATGPEQLTLAPGQLILIRKKNPGGWWEGELQARGKKRQIGWFPANYVKLLSPGTSKITPTEPPKSTALAAVCQVIGMYDYTAQNDDELAFNKGQIINVLNKEDPDWWKGEVNGQVGLFPSNYVKLTTDMDPSQQ

SEQ ID NO: 50310 - protein, 1215 aa, Homo sapiens
MAQFPTPFGGSLDIWAITVEERAKHDQQFHSLKPISGFITGDQARNFFFQSGLPQPVLAQIWALADMNNDGRMDQVEFSIAMKLIKLKLQGYQLPSALPPVMKQQPVAISSAPAFGMGGIASMPPLTAVAPVPMGSIPVVGMSPTLVSSVPTAAVPPLANGAPPVIQPLPAFAHPAATLPKSSSFSRSGPGSQLNTKLQKAQSFDVASVPPVAEWAVPQSSRLKYRQLFNSHDKTMSGHLTGPQARTILMQSSLPQAQLASIWNLSDIDQDGKLTAEEFILAMHLIDVAMSGQPLPPVLPPEYIPPSFRRVRSGSGISVISSTSVDQRLPEEPVLEDEQQQLEKKLPVTFEDKKRENFERGNLELEKRRQALLEQQRKEQERLAQLERAEQERKERERQEQERKRQLELEKQLEKQRELERQREEERRKEIERREAAKRELERQRQLEWERNRRQELLNQRNKEQEDIVVLKAKKKTLEFELEALNDKKHQLEGKLQDIRCRLTTQRQEIESTNKSRELRIAEITHLQQQLQESQQMLGRLIPEKQILNDQLKQVQQNSLHRDSLVTLKRALEAKELARQHLRDQLDEVEKETRSKLQEIDIFNNQLKELREIHNKQQLQKQKSMEAERLKQKEQERKIIELEKQKEEAQRRAQERDKQWLEHVQQEDEHQRPRKLHEEEKLKREESVKKKDGEEKGKQEAQDKLGRLFHQHQEPAKPAVQAPWSTAEKGPLTISAQENVKVVYYRALYPFESRSHDEITIQPGDIVMVDESQTGEPGWLGGELKGKTGWFPANYAEKIPENEVPAPVKPVTDSTSAPAPKLALRETPAPLAVTSSEPSTTPNNWADFSSTWPTSTNEKPETDNWDAWAAQPSLTVPSAGQLRQRSAFTPATATGSSPSPVLGQGEKVEGLQAQALYPWRAKKDNHLNFNKNDVITVLEQQDMWWFGEVQGQKGWFPKSYVKLISGPIRKSTSMDSGSSESPASLKRVASPAAKPVVSGEEFIAMYTYESSEQGDLTFQQGDVILVTKKDGDWWTGTVGDKAGVFPSNYVRLKDSEGSGTAGKTGSLGKKPEIAQVIASYTATGPEQLTLAPGQLILIRKKNPGGWWEGELQARGKKRQIGWFPANYVKLLSPGTSKITPTEPPKSTALAAVCQVIGMYDYTAQNDDELAFNKGQIINVLNKEDPDWWKGEVNGQVGLFPSNYVKLTTDMDPSQQ

SEQ ID NO: 50311 - protein, 1178 aa, Homo sapiens
MAQFPTPFGGSLDIWAITVEERAKHDQQFHSLKPISGFITGDQARNFFFQSGLPQPVLAQIWALADMNNDGRMDQVEFSIAMKLIKLKLQGYQLPSALPPVMKQQPVAISSAPAFAAVPPLANGAPPVIQPLPAFAHPAATLPKSSSFSRSGPGSQLNTKLQKAQSFDVASVPPVAEWAVPQSSRLKYRQLFNSHDKTMSGHLTGPQARTILMQSSLPQAQLASIWNLSDIDQDGKLTAEEFILAMHLIDVAMSGQPLPPVLPPEYIPPSFRRVRSGSGISVISSTSVDQRLPEEPVLEDEQQQLEKKLPVTFEDKKRENFERGNLELEKRRQALLEQQRKEQERLAQLERAEQERKERERQEQERKRQLELEKQLEKQRELERQREEERRKEIERREAAKRELERQRQLEWERNRRQELLNQRNKEQEDIVVLKAKKKTLEFELEALNDKKHQLEGKLQDIRCRLTTQRQEIESTNKSRELRIAEITHLQQQLQESQQMLGRLIPEKQILNDQLKQVQQNSLHRDSLVTLKRALEAKELARQHLRDQLDEVEKETRSKLQEIDIFNNQLKELREIHNKQQLQKQKSMEAERLKQKEQERKIIELEKQKEEAQRRAQERDKQWLEHVQQEDEHQRPRKLHEEEKLKREESVKKKDGEEKGKQEAQDKLGRLFHQHQEPAKPAVQAPWSTAEKGPLTISAQENVKVVYYRALYPFESRSHDEITIQPGDIVMVDESQTGEPGWLGGELKGKTGWFPANYAEKIPENEVPAPVKPVTDSTSAPAPKLALRETPAPLAVTSSEPSTTPNNWADFSSTWPTSTNEKPETDNWDAWAAQPSLTVPSAGQLRQRSAFTPATATGSSPSPVLGQGEKVEGLQAQALYPWRAKKDNHLNFNKNDVITVLEQQDMWWFGEVQGQKGWFPKSYVKLISGPIRKSTSMDSGSSESPASLKRVASPAAKPVVSGEEFIAMYTYESSEQGDLTFQQGDVILVTKKDGDWWTGTVGDKAGVFPSNYVRLKDSEGSGTAGKTGSLGKKPEIAQVIASYTATGPEQLTLAPGQLILIRKKNPGGWWEGELQARGKKRQIGWFPANYVKLLSPGTSKITPTEPPKSTALAAVCQVIGMYDYTAQNDDELAFNKGQIINVLNKEDPDWWKGEVNGQVGLFPSNYVKLTTDMDPSQQ

SEQ ID NO: 50312 - protein, 1149 aa, Homo sapiens
MAQFPTPFGGSLDIWAITVEERAKHDQQFHSLKPISGFITGDQARNFFFQSGLPQPVLAQIWALADMNNDGRMDQVEFSIAMKLIKLKLQGYQLPSALPPVMKQQPVAISSAPAFGMGGIASMPPLTAVAPVPMGSIPVVGMSPTLVSSVPTAAVPPLANGAPPVIQPLPAFAHPAATLPKSSSFSRSGPGSQLNTKLQKAQSFDVASVPPVAEWAVPQSSRLKYRQLFNSHDKTMSGHLTGPQARTILMQSSLPQAQLASIWNLSDIDQDGKLTAEEFILAMHLIDVAMSGQPLPPVLPPEYIPPSFRRVRSGSGISVISSTSVDQRLPEEPVLEDEQQQLEKKLPVTFEDKKRENFERGNLELEKRRQALLEQQRKEQERLAQLERAEQERKERERQEQERKRQLELEKQLEKQRELERQREEERRKEIERREAAKRELERQRQLEWERNRRQELLNQRNKEQEDIVVLKAKKKTLEFELEALNDKKHQLEGKLQDIRCRLTTQRQEIESTNKSRELRIAEITHLQQQLQESQQMLGRLIPEKQILNDQLKQVQQNSLHRDSLVTLKRALEAKELARQHLRDQLDEVEKETRSKLQEIDIFNNQLKELREIHNKQQLQKQKSMEAERLKQKEQERKIIELEKQKEEAQRRAQERDKQWLEHVQQEDEHQRPRKLHEEEKLKREESVKKKDGEEKGKQEAQDKLGRLFHQHQEPAKPAVQAPWSTAEKGPLTISAQENVKVVYYRALYPFESRSHDEITIQPGDIVMVKGEWVDESQTGEPGWLGGELKGKTGWFPANYAEKIPENEVPAPVKPVTDSTSAPAPKLALRETPAPLAVTSSEPSTTPNNWADFSSTWPTSTNEKPETDNWDAWAAQPSLTVPSAGQLRQRSAFTPATATGSSPSPVLGQGEKVEGLQAQALYPWRAKKDNHLNFNKNDVITVLEQQDMWWFGEVQGQKGWFPKSYVKLISGPIRKSTSMDSGSSESPASLKRVASPAAKPVVSGEEIAQVIASYTATGPEQLTLAPGQLILIRKKNPGGWWEGELQARGKKRQIGWFPANYVKLLSPGTSKITPTEPPKSTALAAVCQVIGMYDYTAQNDDELAFNKGQIINVLNKEDPDWWKGEVNGQVGLFPSNYVKLTTDMDPSQQ

SEQ ID NO: 50313 - protein, 1716 aa, Homo sapiens
MAQFPTPFGGSLDIWAITVEERAKHDQQFHSLKPISGFITGDQARNFFFQSGLPQPVLAQIWALADMNNDGRMDQVEFSIAMKLIKLKLQGYQLPSALPPVMKQQPVAISSAPAFGMGGIASMPPLTAVAPVPMGSIPVVGMSPTLVSSVPTAAVPPLANGAPPVIQPLPAFAHPAATLPKSSSFSRSGPGSQLNTKLQKAQSFDVASVPPVAEWAVPQSSRLKYRQLFNSHDKTMSGHLTGPQARTILMQSSLPQAQLASIWNLSDIDQDGKLTAEEFILAMHLIDVAMSGQPLPPVLPPEYIPPSFRRVRSGSGISVISSTSVDQRLPEEPVLEDEQQQLEKKLPVTFEDKKRENFERGNLELEKRRQALLEQQRKEQERLAQLERAEQERKERERQEQERKRQLELEKQLEKQRELERQREEERRKEIERREAAKRELERQRQLEWERNRRQELLNQRNKEQEDIVVLKAKKKTLEFELEALNDKKHQLEGKLQDIRCRLTTQRQEIESTNKSRELRIAEITHLQQQLQESQQMLGRLIPEKQILNDQLKQVQQNSLHRDSLVTLKRALEAKELARQHLRDQLDEVEKETRSKLQEIDIFNNQLKELREIHNKQQLQKQKSMEAERLKQKEQERKIIELEKQKEEAQRRAQERDKQWLEHVQQEDEHQRPRKLHEEEKLKREESVKKKDGEEKGKQEAQDKLGRLFHQHQEPAKPAVQAPWSTAEKGPLTISAQENVKVVYYRALYPFESRSHDEITIQPGDIVMVDESQTGEPGWLGGELKGKTGWFPANYAEKIPENEVPAPVKPVTDSTSAPAPKLALRETPAPLAVTSSEPSTTPNNWADFSSTWPTSTNEKPETDNWDAWAAQPSLTVPSAGQLRQRSAFTPATATGSSPSPVLGQGEKVEGLQAQALYPWRAKKDNHLNFNKNDVITVLEQQDMWWFGEVQGQKGWFPKSYVKLISGPIRKSTSMDSGSSESPASLKRVASPAAKPVVSGEEFIAMYTYESSEQGDLTFQQGDVILVTKKDGDWWTGTVGDKAGVFPSNYVRLKDSEGSGTAGKTGSLGKKPEIAQVIASYTATGPEQLTLAPGQLILIRKKNPGGWWEGELQARGKKRQIGWFPANYVKLLSPGTSKITPTEPPKSTALAAVCQVIGMYDYTAQNDDELAFNKGQIINVLNKEDPDWWKGEVNGQVGLFPSNYVKLTTDMDPSQQWCSDLHLLDMLTPTERKRQGYIHELIVTEENYVNDLQLVTEIFQKPLMESELLTEKEVAMIFVNWKELIMCNIKLLKALRVRKKMSGEKMPVKMIGDILSAQLPHMQPYIRFCSRQLNGAALIQQKTDEAPDFKEFVKRLAMDPRCKGMPLSSFILKPMQRVTRYPLIIKNILENTPENHPDHSHLKHALEKAEELCSQVNEGVREKENSDRLEWIQAHVQCEGLSEQLVFNSVTNCLGPRKFLHSGKLYKAKSNKELYGFLFNDFLLLTQITKPLGSSGTDKVFSPKSNLQYKMYKTPIFLNEVLVKLPTDPSGDEPIFHISHIDRVYTLRAESINERTAWVQKIKAASELYIETEKKKREKAYLVRSQRATGIGRLMVNVVEGIELKPCRSHGKSNPYCEVTMGSQCHITKTIQDTLNPKWNSNCQFFIRDLEQEVLCITVFERDQFSPDDFLGRTEIRVADIKKDQGSKGPVTKCLLLHEVPTGEIVVRLDLQLFDEP

SEQ ID NO: 50314 - protein, 1660 aa, Homo sapiens
MAQFPTPFGGSLDIWAITVEERAKHDQQFHSLKPISGFITGDQARNFFFQSGLPQPVLAQIWALADMNNDGRMDQVEFSIAMKLIKLKLQGYQLPSALPPVMKQQPVAISSAPAFGMGGIASMPPLTAVAPVPMGSIPVVGMSPTLVSSVPTAAVPPLANGAPPVIQPLPAFAHPAATLPKSSSFSRSGPGSQLNTKLQKAQSFDVASVPPVAEWAVPQSSRLKYRQLFNSHDKTMSGHLTGPQARTILMQSSLPQAQLASIWNLSDIDQDGKLTAEEFILAMHLIDVAMSGQPLPPVLPPEYIPPSFRRVRSGSGISVISSTSVDQRLPEEPVLEDEQQQLEKKLPVTFEDKKRENFERGNLELEKRRQALLEQQRKEQERLAQLERAEQERKERERQEQERKRQLELEKQLEKQRELERQREEERRKEIERREAAKRELERQRQLEWERNRRQELLNQRNKEQEDIVVLKAKKKTLEFELEALNDKKHQLEGKLQDIRCRLTTQRQEIESTNKSRELRIAEITHLQQQLQESQQMLGRLIPEKQILNDQLKQVQQNSLHRDSLVTLKRALEAKELARQHLRDQLDEVEKETRSKLQEIDIFNNQLKELREIHNKQQLQKQKSMEAERLKQKEQERKIIELEKQKEEAQRRAQERDKQWLEHVQQEDEHQRPRKLHEEEKLKREESVKKKDGEEKGKQEAQDKLGRLFHQHQEPAKPAVQAPWSTAEKGPLTISAQENVKVVYYRALYPFESRSHDEITIQPGDIVMVDESQTGEPGWLGGELKGKTGWFPANYAEKIPENEVPAPVKPVTDSTSAPAPKLALRETPAPLAVTSSEPSTTPNNWADFSSTWPTSTNEKPETDNWDAWAAQPSLTVPSAGQLRQRSAFTPATATGSSPSPVLGQGEKVEGLQAQALYPWRAKKDNHLNFNKNDVITVLEQQDMWWFGEVQGQKGWFPKSYVKLISGPIRKSTSMDSGSSESPASLKRVASPAAKPVVSGEEFIAMYTYESSEQGDLTFQQGDVILVTKKDGDWWTGTVGDKAGVFPSNYVRLKDSEGSGTAGKTGSLGKKPEIAQVIASYTATGPEQLTLAPGQLILIRKKNPGGWWEGELQARGKKRQIGWFPANYVKLLSPGTSKITPTEPPKSTALAAVCQVIGMYDYTAQNDDELAFNKGQIINVLNKEDPDWWKGEVNGQVGLFPSNYVKLTTDMDPSQQWCSDLHLLDMLTPTERKRQGYIHELIVTEENYVNDLQLVTEIFQKPLMESELLTEKEVAMIFVNWKELIMCNIKLLKALRVRKKMSGEKMPVKMIGDILSAQLPHMQPYIRFCSRQLNGAALIQQKTDEAPDFKEFVKRLAMDPRCKGMPLSSFILKPMQRVTRYPLIIKNQLVFNSVTNCLGPRKFLHSGKLYKAKSNKELYGFLFNDFLLLTQITKPLGSSGTDKVFSPKSNLQYKMYKTPIFLNEVLVKLPTDPSGDEPIFHISHIDRVYTLRAESINERTAWVQKIKAASELYIETEKKKREKAYLVRSQRATGIGRLMVNVVEGIELKPCRSHGKSNPYCEVTMGSQCHITKTIQDTLNPKWNSNCQFFIRDLEQEVLCITVFERDQFSPDDFLGRTEIRVADIKKDQGSKGPVTKCLLLHEVPTGEIVVRLDLQLFDEP

SEQ ID NO: 50315 - protein, 115 aa, Homo sapiens
MAQFPTPFGGSLDIWAITVEERAKHDQQFHSLKPISGFITGDQARNFFFQSGLPQPVLAQIWALADMNNDGRMDQVEFSIAMKLIKLKLQGYQLPSALPPVMKQQPVAISSAPAF

SEQ ID NO: 50316 - protein, 78 aa, Homo sapiens
MAQFPTPFGGSLDIWAITVEERAKHDQQFHSLKPISGFITGDQARNFFFQSGLPQPVLAQIWALADMNNDGRMDQVEF

SEQ ID NO: 50317 - protein, 1697 aa, Homo sapiens
MMAQFPTAMNGGPNMWAITSEERTKHDRQFDNLKPSGGYITGDQARNFFLQSGLPAPVLAEIWALSDLNKDGKMDQQEFSIAMKLIKLKLQGQQLPVVLPPIMKQPPMFSPLISARFGMGSMPNLSIPQPLPPAAPITSLSSATSGTNLPPLMMPTPLVPSVSTSSLPNGTASLIQPLPIPYSSSTLPHGSSYSLMMGGFGGASIQKAQSLIDLGSSSSTSSTASLSGNSPKTGTSEWAVPQPTRLKYRQKFNTLDKSMSGYLSGFQARNALLQSNLSQTQLATIWTLADVDGDGQLKAEEFILAMHLTDMAKAGQPLPLTLPPELVPPSFRGGKQIDSINGTLPSYQKMQEEEPQKKLPVTFEDKRKANYERGNMELEKRRQALMEQQQREAERKAQKEKEEWERKQRELQEQEWKKQLELEKRLEKQRELERQREEERRKDIERREAAKQELERQRRLEWERIRRQELLNQKNREQEEIVRLNSKKKNLHLELEALNGKHQQISGRLQDVRLKKQTQKTELEVLDKQCDLEIMEIKQLQQELQEYQNKLIYLVPEKQLLNERIKNMQFSNTPDSGVSLLHKKSLEKEELCQRLKEQLDALEKETASKLSEMDSFNNQLKCGNMDDSVLQCLLSLLSCLNNLFLLLKELRETYNTQQLALEQLYKIKRDKLKEIERKRLELMQKKKLEDEAARKAKQGKENLWKENLRKEEEEKQKRLQEEKTQEKIQEEERKAEEKQRKDKDTLKAEEKKRETASVLVNYRALYPFEARNHDEMSFNSGDIIQVDEKTVGEPGWLYGSFQGNFGWFPCNYVEKMPSSENEKAVSPKKALLPPTVSLSATSTSSEPLSSNQPASVTDYQNVSFSNLTVNTSWQKKSAFTRTVSPGSVSPIHGQGQVVENLKAQALCSWTAKKDNHLNFSKHDIITVLEQQENWWFGEVHGGRGWFPKSYVKIIPGSEVKREEPEALYAAVNKKPTSAAYSVGEEYIALYPYSSVEPGDLTFTEGEEILVTQKDGEWWTGSIGDRSGIFPSNYVKPKDQESFGSASKSGASNKKPEIAQVTSAYVASGSEQLSLAPGQLILILKKNTSGWWQGELQARGKKRQKGWFPASHVKLLGPSSERATPAFHPVCQVIAMYDYAANNEDELSFSKGQLINVMNKDDPDWWQGEINGVTGLFPSNYVKMTTDSDPSQQWCADLQTLDTMQPIERKRQGYIHELIQTEERYMADLQLVVEVFQKRMAESGFLTEGEMALIFVNWKELIMSNTKLLKALRVRKKTGGEKMPVQMIGDILAAELSHMQAYIRFCSCQLNGAALLQQKTDEDTDFKEFLKKLASDPRCKGMPLSSFLLKPMQRITRYPLLIRSILENTPESHADHSSLKLALERAEELCSQVNEGVREKENSDRLEWIQAHVQCEGLAEQLIFNSLTNCLGPRKLLHSGKLYKTKSNKELHGFLFNDFLLLTYMVKQFAVSSGSEKLFSSKSNAQFKMYKTPIFLNEVLVKLPTDPSSDEPVFHISHIDRVYTLRTDNINERTAWVQKIKAASEQYIDTEKKKREKAYQARSQKTSGIGRLMVHVIEATELKACKPNGKSNPYCEISMGSQSYTTRTIQDTLNPKWNFNCQFFIKDLYQDVLCLTLFDRDQFSPDDFLGRTEIPVAKIRTEQESKGPMTRRLLLHEVPTGEVWVRFDLQLFEQKTLL

SEQ ID NO: 50318 - protein, 1670 aa, Homo sapiens
MMAQFPTAMNGGPNMWAITSEERTKHDRQFDNLKPSGGYITGDQARNFFLQSGLPAPVLAEIWALSDLNKDGKMDQQEFSIAMKLIKLKLQGQQLPVVLPPIMKQPPMFSPLISARFGMGSMPNLSIPQPLPPAAPITSLSSATSGTNLPPLMMPTPLVPSVSTSSLPNGTASLIQPLPIPYSSSTLPHGSSYSLMMGGFGGASIQKAQSLIDLGSSSSTSSTASLSGNSPKTGTSEWAVPQPTRLKYRQKFNTLDKSMSGYLSGFQARNALLQSNLSQTQLATIWTLADVDGDGQLKAEEFILAMHLTDMAKAGQPLPLTLPPELVPPSFRGGKQIDSINGTLPSYQKMQEEEPQKKLPVTFEDKRKANYERGNMELEKRRQALMEQQQREAERKAQKEKEEWERKQRELQEQEWKKQLELEKRLEKQRELERQREEERRKDIERREAAKQELERQRRLEWERIRRQELLNQKNREQEEIVRLNSKKKNLHLELEALNGKHQQISGRLQDVRLKKQTQKTELEVLDKQCDLEIMEIKQLQQELQEYQNKLIYLVPEKQLLNERIKNMQFSNTPDSGVSLLHKKSLEKEELCQRLKEQLDALEKETASKLSEMDSFNNQLKELRETYNTQQLALEQLYKIKRDKLKEIERKRLELMQKKKLEDEAARKAKQGKENLWKENLRKEEEEKQKRLQEEKTQEKIQEEERKAEEKQRKDKDTLKAEEKKRETASVLVNYRALYPFEARNHDEMSFNSGDIIQVDEKTVGEPGWLYGSFQGNFGWFPCNYVEKMPSSENEKAVSPKKALLPPTVSLSATSTSSEPLSSNQPASVTDYQNVSFSNLTVNTSWQKKSAFTRTVSPGSVSPIHGQGQVVENLKAQALCSWTAKKDNHLNFSKHDIITVLEQQENWWFGEVHGGRGWFPKSYVKIIPGSEVKREEPEALYAAVNKKPTSAAYSVGEEYIALYPYSSVEPGDLTFTEGEEILVTQKDGEWWTGSIGDRSGIFPSNYVKPKDQESFGSASKSGASNKKPEIAQVTSAYVASGSEQLSLAPGQLILILKKNTSGWWQGELQARGKKRQKGWFPASHVKLLGPSSERATPAFHPVCQVIAMYDYAANNEDELSFSKGQLINVMNKDDPDWWQGEINGVTGLFPSNYVKMTTDSDPSQQWCADLQTLDTMQPIERKRQGYIHELIQTEERYMADLQLVVEVFQKRMAESGFLTEGEMALIFVNWKELIMSNTKLLKALRVRKKTGGEKMPVQMIGDILAAELSHMQAYIRFCSCQLNGAALLQQKTDEDTDFKEFLKKLASDPRCKGMPLSSFLLKPMQRITRYPLLIRSILENTPESHADHSSLKLALERAEELCSQVNEGVREKENSDRLEWIQAHVQCEGLAEQLIFNSLTNCLGPRKLLHSGKLYKTKSNKELHGFLFNDFLLLTYMVKQFAVSSGSEKLFSSKSNAQFKMYKTPIFLNEVLVKLPTDPSSDEPVFHISHIDRVYTLRTDNINERTAWVQKIKAASEQYIDTEKKKREKAYQARSQKTSGIGRLMVHVIEATELKACKPNGKSNPYCEISMGSQSYTTRTIQDTLNPKWNFNCQFFIKDLYQDVLCLTLFDRDQFSPDDFLGRTEIPVAKIRTEQESKGPMTRRLLLHEVPTGEVWVRFDLQLFEQKTLL

SEQ ID NO: 50319 - protein, 1670 aa, Homo sapiens; identical to SEQ ID NO: 50318

SEQ ID NO: 50320 - protein, 611 aa, Homo sapiens
MAQFPTAMNGGPNMWAITSEERTKHDRQFDNLKPSGGYITGDQARNFFLQSGLPAPVLAEIWALSDLNKDGKMDQQEFSIAMKLIKLKLQGQQLPVVLPPIMKQPPMFSPLISARFGMGSMPNLSIPQPLPPAAPITSLSSATSGTNLPPLMMPTPLVPSVSTSSLPNGTASLIQPLPIPYSSSTLPHGSSYSLMMGGFGGASIQKAQSLIDLGSSRSWSSGSSAHSPATHRAPLSSPVPNSSTSSTASLSGNSPKTGTSEWAVPQPTRLKYRQKFNTLDKSMSGYLSGFQARNALLQSNLSQTQLATIWTLADVDGDGQLKAEEFILAMHLTDMAKAGQPLPLTLPPELVPPSFRGGKQIDSINGTLPSYQKMQEEEPQKKLPVTFEDKRKANYERGNMELEKRRQALMEQQQREAERKAQKEKEEWERKQRELQEQEWKKQLELEKRLEKQRELERQREEERRKDIERREAAKQELERQRRLEWERIRRQELLNQKNREQEEIVRLNSKKKNLHLELEALNGKHQQISGRLQDVRLKKQTQKTELEVLDKQCDLEIMEIKQLQQELQEYQNKLIYLVPEKQLLNERIKNMQFSNTPDSGVSLLHKKSLE

SEQ ID NO: 50321 - protein, 1249 aa, Homo sapiens
MMAQFPTAMNGGPNMWAITSEERTKHDRQFDNLKPSGGYITGDQARNFFLQSGLPAPVLAEIWALSDLNKDGKMDQQEFSIAMKLIKLKLQGQQLPVVLPPIMKQPPMFSPLISARFGMGSMPNLSIPQPLPPAAPITSLSSATSGTNLPPLMMPTPLVPSVSTSSLPNGTASLIQPLPIPYSSSTLPHGSSYSLMMGGFGGASIQKAQSLIDLGSSSSTSSTASLSGNSPKTGTSEWAVPQPTRLKYRQKFNTLDKSMSGYLSGFQARNALLQSNLSQTQLATIWTLADVDGDGQLKAEEFILAMHLTDMAKAGQPLPLTLPPELVPPSFRGGKQIDSINGTLPSYQKMQEEEPQKKLPVTFEDKRKANYERGNMELEKRRQALMEQQQREAERKAQKEKEEWERKQRELQEQEWKKQLELEKRLEKQRELERQREEERRKDIERREAAKQELERQRRLEWERIRRQELLNQKNREQEEIVRLNSKKKNLHLELEALNGKHQQISGRLQDVRLKKQTQKTELEVLDKQCDLEIMEIKQLQQELQEYQNKLIYLVPEKQLLNERIKNMQFSNTPDSGVSLLHKKSLEKEELCQRLKEQLDALEKETASKLSEMDSFNNQLKCGNMDDSVLQCLLSLLSCLNNLFLLLKELRETYNTQQLALEQLYKIKRDKLKEIERKRLELMQKKKLEDEAARKAKQGKENLWKENLRKEEEEKQKRLQEEKTQEKIQEEERKAEEKQRKDKDTLKAEEKKRETASVLVNYRALYPFEARNHDEMSFNSGDIIQVDEKTVGEPGWLYGSFQGNFGWFPCNYVEKMPSSENEKAVSPKKALLPPTVSLSATSTSSEPLSSNQPASVTDYQNVSFSNLTVNTSWQKKSAFTRTVSPGSVSPIHGQGQVVENLKAQALCSWTAKKDNHLNFSKHDIITVLEQQENWWFGEVHGGRGWFPKSYVKIIPGSEVKREEPEALYAAVNKKPTSAAYSVGEEYIALYPYSSVEPGDLTFTEGEEILVTQKDGEWWTGSIGDRSGIFPSNYVKPKDQESFGSASKSGASNKKPEIAQVTSAYVASGSEQLSLAPGQLILILKKNTSGWWQGELQARGKKRQKGWFPASHVKLLGPSSERATPAFHPVCQVIAMYDYAANNEDELSFSKGQLINVMNKDDPDWWQGEINGVTGLFPSNYVKMTTDSDPSQQWCADLQTLDTMQPIERKRQGYIHELIQTEERYMADLQLVVEVRRLLLASSRGICCLS

SEQ ID NO: 50322 - protein, 632 aa, Homo sapiens
MNRYTTIRQLGDGTYGSVLLGRSIESGELIAIKKMKRKFYSWEECMNLREVKSLKKLNHANVVKLKEVIRENDHLYFIFEYMKENLYQLIKERNKLFPESAIRNIMYQILQGLAFIHKHGFFHRDLKPENLLCMGPELVKIADFGLAREIRSKPPYTDYVSTRWYRAPEVLLRSTNYSSPIDVWAVGCIMAEVYTLRPLFPGASEIDTIFKICQVLGTPKKTDWPEGYQLSSAMNFRWPQCVPNNLKTLIPNASSEAVQLLRDMLQWDPKKRPTASQALRYPYFQVGHPLGSTTQNLQDSEKPQKGILEKAGPPPYIKPVPPAQPPAKPHTRISSRQHQASQPPLHLTYPYKAEVSRTDHPSHLQEDKPSPLLFPSLHNKHPQSKITAGLEHKNGEIKPKSRRRWGLISRSTKDSDDWADLDDLDFSPSLSRIDLKNKKRQSDDTLCRFESVLDLKPSEPVGTGNSAPTQTSYQRRDTPTLRSAAKQHYLKHSRYLPGISIRNGILSNPGKEFIPPNPWSSSGLSGKSSGTMSVISKVNSVGSSSTSSSGLTGNYVPSFLKKEIGSAMQRVHLAPIPDPSPGYSSLKAMRPHPGRPFFHTQPRSTPGLIPRPPAAQPVHGRTDWASKYASRR

SEQ ID NO: 50323 - protein, 632 aa, Homo sapiens; identical to SEQ ID NO: 50322

SEQ ID NO: 50324 - protein, 245 aa, Homo sapiens
MCAEVGPALCRGMERNSLGCCEAPKKLSLSFSIEAILKRPARRSDMDRPEGPGEEGPGEAAASGSGLEKPPKDQPQEGRKSKRRVRTTFTTEQLHELEKIFHFTHYPDVHIRSQLAARINLPEARVQIWFQNQRAKWRKQEKIGNLGAPQQLSEASVALPTNLDVAGPTWTSTALRRLAPPTSCCPSAQDQLASAWFPAWITLLPAHPWETQPVPGLPIHQTCIPVLCILPPPHPKWGSICATST

SEQ ID NO: 50325 - protein, 245 aa, Homo sapiens; identical to SEQ ID NO: 50324

SEQ ID NO: 50326 - protein, 582 aa, Homo sapiens
MANEDCPKAADSPFSSDKHAQLILAQINKMRNGQHFCDVQLQVGQESFKAHRLVLAASSPYFAALFTGGMKESSKDVVPILGIEAGIFQILLDFIYTGIVNIGVNNVQELIIAADMLQLTEVVHLCCEFLKGQIDPLNCIGIFQFSEQIACHDLLEFSENYIHVHFLEVHSGEEFLALTKDQLIKILRSEELSIEDEYQVFLAAMQWILKDLGKRRKHVVEVLDPIRFPLLPPQRLLKYIEGVSDFNLRVALQTLLKEYCEVCKSPKENKFCSFLQTSKVRPRKKARKYLYAVGGYTRLQGGRWSDSRALSCVERFDTFSQYWTTVSSLHQARSGLGVTVLGGMVYAIGGEKDSMIFDCTECYDPVTKQWTTVASMNHPRCGLGVCVCYGAIYALGGWVGAEIGNTIERFDPDENKWEVVGNMAVSRYYFGCCEMQGLIYVIGGISNEGIELRSFEVYDPLSKRWSPLPPMGTRRAYLGVAALNDCIYSVGGWNETQDALHTVEKYSFEEEKWVEVASMKVPRAGMCVVAVNGLLYVSGGRSSSHDFLAPDTHRYEVFRLKWENMCILFNDHKTLTKGIFNL

SEQ ID NO: 50327 - protein, 584 aa, Homo sapiens
MANEDCPKAADSPFSSDKHAQLILAQINKMRNGQHFCDVQLQVGQESFKAHRLVLAASSPYFAALFTGGMKESSKDVVPILGIEAGIFQILLDFIYTGIVNIGVNNVQELIIAADMLQLTEVVHLCCEFLKGQIDPLNCIGIFQFSEQIACHDLLEFSENYIHVHFLEVHSGEEFLALTKDQLIKILRSEELSIEDEYQVFLAAMQWILKDLGKRRKHVVEVLDPIRFPLLPPQRLLKYIEGVSDFNLRVALQTLLKEYCEVCKSPKENKFCSFLQTSKVRPRKKARKYLYAVGGYTRLQGGRWSDSRALSCVERFDTFSQYWTTVSSLHQARSGLGVTVLGGMVYAIGGEKDSMIFDCTECYDPVTKQWTTVASMNHPRCGLGVCVCYGAIYALGGWVGAEIGNTIERFDPDENKWEVVGNMAVSRYYFGCCEMQGLIYVIGGISNEGIELRSFEVYDPLSKRWSPLPPMGTRRAYLGVAALNDCIYSVGGWNETQDALHTVEKYSFEEEKWVEVASMKVPRAGMCVVAVNGLLYVSGGRSSSHDFLAPGTLDSVEVYNPHSDTWTEIGNMITSRCEGGVAVL

SEQ ID NO: 50328 - protein, 1292 aa, Homo sapiens
MRAVLTWRDKAEHCINDIAFKPDGTQLILAAGSRLLVYDTSDGTLLQPLKGHKDTVYCVAYAKDGKRFASGSADKSVIIWTSKLEGILKYTSWSVMSSLHLHLPFLGLHKTVRVTATDKAPKGQGGRIDCLRPSVQNQPGQKHNDAIQCVSYNPITHQLASCSSSDFGLWSPEQKSVSKHKSSSKIICCSWTNDGQYLALGMFNGIISIRNKNGEEKVKIERPGGSLSPIWSICWNPSSRWESFWMNRENEDAEDVIVNRYIQEIPSTLKSAVYSSQGSEAEEEEPEEEDDSPRDDNLEERNDILAVADWGQKVSFYQLSGKQIGKDRALNFDPCCISYFTKGEYILLGGSDKQVSLFTKDGVRLGTVGEQNSWVWTCQAKPDSNYVVVGCQDGTISFYQLIFSTVHGLYKDRYAYRDSMTDVIVQHLITEQKVRIKCKELVKKIAIYRNRLAIQLPEKILIYELYSEDLSDMHYRVKEKIIKKFECNLLVVCANHIILCQEKRLQCLSFSGVKEREWQMESLIRYIKVIGGPPGREGLLVGLKNGQILKIFVDNLFAIVLLKQATAVRCLDMSASRKKLAVVDENDTCLVYDIDTKELLFQEPNANSVAWNTQCEDMLCFSGGGYLNIKASTFPVHRQKLQGFVVGYNGSKIFCLHVFSISAVEVPQSAPMYQYLDRKLFKEAYQIACLGVTDTDWRELAMEALEGLDFETAKKAFIRVQDLRYLELISSIEERKKRGETNNDLFLADVFSYQGKFHEAAKLYKRSGHENLALEMYTDLCMFEYAKDFLGSGDPKETKMLITKQADWARNIKEPKAAVEMYISAGEHVKAIEICGDHGWVDMLIDIARKLDKAEREPLLLCATYLKKLDSPGYAAETYLKMGDLKSLVQLHVETQRWDEAFALGEKHPEFKDDIYMPYAQWLAENDRFEEAQKAFHKAGRQREAVQVLEQLTNNAVAESRFNDAAYYYWMLSMQCLDIAQDPAQKDTMLGKFYHFQRLAELYHGYHAIHRHTEDPFSVHRPETLFNISRFLLHSLPKDTPSGISKVKILFTLAKQSKALGAYRLARHAYDKLRGLYIPARFQKSIELGTLTIRAKPFHDSEELVPLCYRCSTNNPLLNNLGNVCINCRQPFIFSASSYDVLHLVEFYLEEGITDEEAISLIDLEVLRPKRDDRQLEIANNSSQILRLVETKDSIGDEDPFTAKLSFEQGGSEFVPVVVSRLVLRSMSRRDVLIKRWPPPLRWQYFRSLLPDASITMCPSCFQMFHSEDYELLVLQHGCCPYCRRCKDDPGP

SEQ ID NO: 50329 - protein, 1182 aa, Homo sapiens
MRAVLTWRDKAEHCINDIAFKPDGTQLILAAGSRLLVYDTSDGTLLQPLKGHKDTVYCVAYAKDGKRFASGSADKSVIIWTSKLEGILKYTHNDAIQCVSYNPITHQLASCSSSDFGLWSPEQKSVSKHKSSSKIICCSWTNDGQYLALGMFNGIISIRNKNGEEKVKIERPGGSLSPIWSICWNPSREERNDILAVADWGQKVSFYQLSGKQIGKDRALNFDPCCISYFTKGEYILLGGSDKQVSLFTKDGVRLGTVGEQNSWVWTCQAKPDSNYVVVGCQDGTISFYQLIFSTVHGLYKDRYAYRDSMTDVIVQHLITEQKVRIKCKELVKKIAIYRNRLAIQLPEKILIYELYSEDLSDMHYRVKEKIIKKFECNLLVVCANHIILCQEKRLQCLSFSGVKEREWQMESLIRYIKVIGGPPGREGLLVGLKNGQILKIFVDNLFAIVLLKQATAVRCLDMSASRKKLAVVDENDTCLVYDIDTKELLFQEPNANSVAWNTQCEDMLCFSGGGYLNIKASTFPVHRQKLQGFVVGYNGSKIFCLHVFSISAVEVPQSAPMYQYLDRKLFKEAYQIACLGVTDTDWRELAMEALEGLDFETAKKAFIRVQDLRYLELISSIEERKKRGETNNDLFLADVFSYQGKFHEAAKLYKRSGHENLALEMYTDLCMFEYAKDFLGSGDPKETKMLITKQADWARNIKEPKAAVEMYISAGEHVKAIEICGDHGWVDMLIDIARKLDKAEREPLLLCATYLKKLDSPGYAAETYLKMGDLKSLVQLHVETQRWDEAFALGEKHPEFKDDIYMPYAQWLAENDRFEEAQKAFHKAGRQREAVQVLEQLTNNAVAESRFNDAAYYYWMLSMQCLDIAQDPAQKDTMLGKFYHFQRLAELYHGYHAIHRHTEDPFSVHRPETLFNISRFLLHSLPKDTPSGISKVKILFTLAKQSKALGAYRLARHAYDKLRGLYIPARFQKSIELGTLTIRAKPFHDSEELVPLCYRCSTNNPLLNNLGNVCINCRQPFIFSASSYDVLHLVEFYLEEGITDEEAISLIDLEVLRPKRDDRQLEIANNSSQILRLVETKDSIGDEDPFTAKLSFEQGGSEFVPVVVSRLVLRSMSRRDVLIKRWPPPLRWQYFRSLLPDASITMCPSCFQMFHSEDYELLVLQHGCCPYCRRCKDDPGP

SEQ ID NO: 50330 - protein, 1241 aa, Homo sapiens
MRAVLTWRDKAEHCINDIAFKPDGTQLILAAGSRLLVYDTSDGTLLQPLKGHKDTVYCVAYAKDGKRFASGSADKSVIIWTSKLEGILKYTHNDAIQCVSYNPITHQLASCSSSDFGLWSPEQKSVSKHKSSSKIICCSWTNDGQYLALGMFNGIISIRNKNGEEKVKIERPGGSLSPIWSICWNPSSRWESFWMNRENEDAEDVIVNRYIQEIPSTLKSAVYSSQGSEAEEEEPEEEDDSPRDDNLEERNDILAVADWGQKVSFYQLSGKQIGKDRALNFDPCCISYFTKGEYILLGGSDKQVSLFTKDGVRLGTVGEQNSWVWTCQAKPDSNYVVVGCQDGTISFYQLIFSTVHGLYKDRYAYRDSMTDVIVQHLITEQKVRIKCKELVKKIAIYRNRLAIQLPEKILIYELYSEDLSDMHYRVKEKIIKKFECNLLVVCANHIILCQEKRLQCLSFSGVKEREWQMESLIRYIKVIGGPPGREGLLVGLKNGQILKIFVDNLFAIVLLKQATAVRCLDMSASRKKLAVVDENDTCLVYDIDTKELLFQEPNANSVAWNTQCEDMLCFSGGGYLNIKASTFPVHRQKLQGFVVGYNGSKIFCLHVFSISAVEVPQSAPMYQYLDRKLFKEAYQIACLGVTDTDWRELAMEALEGLDFETAKKAFIRVQDLRYLELISSIEERKKRGETNNDLFLADVFSYQGKFHEAAKLYKRSGHENLALEMYTDLCMFEYAKDFLGSGDPKETKMLITKQADWARNIKEPKAAVEMYISAGEHVKAIEICGDHGWVDMLIDIARKLDKAEREPLLLCATYLKKLDSPGYAAETYLKMGDLKSLVQLHVETQRWDEAFALGEKHPEFKDDIYMPYAQWLAENDRFEEAQKAFHKAGRQREAVQVLEQLTNNAVAESRFNDAAYYYWMLSMQCLDIAQDPAQKDTMLGKFYHFQRLAELYHGYHAIHRHTEDPFSVHRPETLFNISRFLLHSLPKDTPSGISKVKILFTLAKQSKALGAYRLARHAYDKLRGLYIPARFQKSIELGTLTIRAKPFHDSEELVPLCYRCSTNNPLLNNLGNVCINCRQPFIFSASSYDVLHLVEFYLEEGITDEEAISLIDLEVLRPKRDDRQLEIANNSSQILRLVETKDSIGDEDPFTAKLSFEQGGSEFVPVVVSRLVLRSMSRRDVLIKRWPPPLRWQYFRSLLPDASITMCPSCFQMFHSEDYELLVLQHGCCPYCRRCKDDPGP

SEQ ID NO: 50331 - protein, 1131 aa, Homo sapiens
MRAVLTWRDKAEHCINDIAFKPDGTQLILAAGSRLLVYDTSDGTLLQPLKGHKDTVYCVAYAKDGLWSPEQKSVSKHKSSSKIICCSWTNDGQYLALGMFNGIISIRNKNGEEKVKIERPGGSLSPIWSICWNPSREERNDILAVADWGQKVSFYQLSGKQIGKDRALNFDPCCISYFTKGEYILLGGSDKQVSLFTKDGVRLGTVGEQNSWVWTCQAKPDSNYVVVGCQDGTISFYQLIFSTVHGLYKDRYAYRDSMTDVIVQHLITEQKVRIKCKELVKKIAIYRNRLAIQLPEKILIYELYSEDLSDMHYRVKEKIIKKFECNLLVVCANHIILCQEKRLQCLSFSGVKEREWQMESLIRYIKVIGGPPGREGLLVGLKNGQILKIFVDNLFAIVLLKQATAVRCLDMSASRKKLAVVDENDTCLVYDIDTKELLFQEPNANSVAWNTQCEDMLCFSGGGYLNIKASTFPVHRQKLQGFVVGYNGSKIFCLHVFSISAVEVPQSAPMYQYLDRKLFKEAYQIACLGVTDTDWRELAMEALEGLDFETAKKAFIRVQDLRYLELISSIEERKKRGETNNDLFLADVFSYQGKFHEAAKLYKRSGHENLALEMYTDLCMFEYAKDFLGSGDPKETKMLITKQADWARNIKEPKAAVEMYISAGEHVKAIEICGDHGWVDMLIDIARKLDKAEREPLLLCATYLKKLDSPGYAAETYLKMGDLKSLVQLHVETQRWDEAFALGEKHPEFKDDIYMPYAQWLAENDRFEEAQKAFHKAGRQREAVQVLEQLTNNAVAESRFNDAAYYYWMLSMQCLDIAQADPAQKDTMLGKFYHFQRLAELYHGYHAIHRHTEDPFSVHRPETLFNISRFLLHSLPKDTPSGISKVKILFTLAKQSKALGAYRLARHAYDKLRGLYIPARFQKSIELGTLTIRAKPFHDSEELVPLCYRCSTNNPLLNNLGNVCINCRQPFIFSASSYDVLHLVEFYLEEGITDEEAISLIDLEVLRPKRDDRQLEIANNSSQILRLVETKDSIGDEDPFTAKLSFEQGGSEFVPVVVSRLVLRSMSRRDVLIKRWPPPLRWQYFRSLLPDASITMCPSCFQMFHSEDYELLVLQHGCCPYCRRCKDDPGP

SEQ ID NO: 50332 - protein, 1091 aa, Homo sapiens
MFNGIISIRNKNGEEKVKIERPGGSLSPIWSICWNPSSRWESFWMNRENEDAEDVIVNRYIQEIPSTLKSAVYSSQGSEAEEEEPEEEDDSPRDDNLEERNDILAVADWGQKVSFYQLSGKQIGKDRALNFDPCCISYFTKGEYILLGGSDKQVSLFTKDGVRLGTVGEQNSWVWTCQAKPDSNYVVVGCQDGTISFYQLIFSTVHGLYKDRYAYRDSMTDVIVQHLITEQKVRIKCKELVKKIAIYRNRLAIQLPEKILIYELYSEDLSDMHYRVKEKIIKKFECNLLVVCANHIILCQEKRLQCLSFSGVKEREWQMESLIRYIKVIGGPPGREGLLVGLKNGQILKIFVDNLFAIVLLKQATAVRCLDMSASRKKLAVVDENDTCLVYDIDTKELLFQEPNANSVAWNTQCEDMLCFSGGGYLNIKASTFPVHRQKLQGFVVGYNGSKIFCLHVFSISAVEVPQSAPMYQYLDRKLFKEAYQIACLGVTDTDWRELAMEALEGLDFETAKKAFIRVQDLRYLELISSIEERKKRGETNNDLFLADVFSYQGKFHEAAKLYKRSGHENLALEMYTDLCMFEYAKDFLGSGDPKETKMLITKQADWARNIKEPKAAVEMYISAGEHVKAIEICGDHGWVDMLIDIARKLDKAEREPLLLCATYLKKLDSPGYAAETYLKMGDLKSLVQLHVETQRWDEAFALGEKHPEFKDDIYMPYAQWLAENDRFEEAQKAFHKAGRQREAVQVLEQLTNNAVAESRFNDAAYYYWMLSMQCLDIAQDPAQKDTMLGKFYHFQRLAELYHGYHAIHRHTEDPFSVHRPETLFNISRFLLHSLPKDTPSGISKVKILFTLAKQSKALGAYRLARHAYDKLRGLYIPARFQKSIELGTLTIRAKPFHDSEELVPLCYRCSTNNPLLNNLGNVCINCRQPFIFSASSYDVLHLVEFYLEEGITDEEAISLIDLEVLRPKRDDRQLEIANNSSQILRLVETKDSIGDEDPFTAKLSFEQGGSEFVPVVVSRLVLRSMSRRDVLIKRWPPPLRWQYFRSLLPDASITMCPSCFQMFHSEDYELLVLQHGCCPYCRRCKDDPGP

SEQ ID NO: 50333 - protein, 1032 aa, Homo sapiens
MFNGIISIRNKNGEEKVKIERPGGSLSPIWSICWNPSREERNDILAVADWGQKVSFYQLSGKQIGKDRALNFDPCCISYFTKGEYILLGGSDKQVSLFTKDGVRLGTVGEQNSWVWTCQAKPDSNYVVVGCQDGTISFYQLIFSTVHGLYKDRYAYRDSMTDVIVQHLITEQKVRIKCKELVKKIAIYRNRLAIQLPEKILIYELYSEDLSDMHYRVKEKIIKKFECNLLVVCANHIILCQEKRLQCLSFSGVKEREWQMESLIRYIKVIGGPPGREGLLVGLKNGQILKIFVDNLFAIVLLKQATAVRCLDMSASRKKLAVVDENDTCLVYDIDTKELLFQEPNANSVAWNTQCEDMLCFSGGGYLNIKASTFPVHRQKLQGFVVGYNGSKIFCLHVFSISAVEVPQSAPMYQYLDRKLFKEAYQIACLGVTDTDWRELAMEALEGLDFETAKKAFIRVQDLRYLELISSIEERKKRGETNNDLFLADVFSYQGKFHEAAKLYKRSGHENLALEMYTDLCMFEYAKDFLGSGDPKETKMLITKQADWARNIKEPKAAVEMYISAGEHVKAIEICGDHGWVDMLIDIARKLDKAEREPLLLCATYLKKLDSPGYAAETYLKMGDLKSLVQLHVETQRWDEAFALGEKHPEFKDDIYMPYAQWLAENDRFEEAQKAFHKAGRQREAVQVLEQLTNNAVAESRFNDAAYYYWMLSMQCLDIAQDPAQKDTMLGKFYHFQRLAELYHGYHAIHRHTEDPFSVHRPETLFNISRFLLHSLPKDTPSGISKVKILFTLAKQSKALGAYRLARHAYDKLRGLYIPARFQKSIELGTLTIRAKPFHDSEELVPLCYRCSTNNPLLNNLGNVCINCRQPFIFSASSYDVLHLVEFYLEEGITDEEAISLIDLEVLRPKRDDRQLEIANNSSQILRLVETKDSIGDEDPFTAKLSFEQGGSEFVPVVVSRLVLRSMSRRDVLIKRWPPPLRWQYFRSLLPDASITMCPSCFQMFHSEDYELLVLQHGCCPYCRRCKDDPGP

SEQ ID NO: 50334 - protein, 1083 aa, Homo sapiens
MRAVLTWRDKAEHCINDIAFKPDGTQLILAAGSRLLVYDTSDGTLLQPLKGHKDTVYCVAYAKDGLWSPEQKSVSKHKSSSKIICCREERNDILAVADWGQKVSFYQLSGKQIGKDRALNFDPCCISYFTKGEYILLGGSDKQVSLFTKDGVRLGTVGEQNSWVWTCQAKPDSNYVVVGCQDGTISFYQLIFSTVHGLYKDRYAYRDSMTDVIVQHLITEQKVRIKCKELVKKIAIYRNRLAIQLPEKILIYELYSEDLSDMHYRVKEKIIKKFECNLLVVCANHIILCQEKRLQCLSFSGVKEREWQMESLIRYIKVIGGPPGREGLLVGLKNGQILKIFVDNLFAIVLLKQATAVRCLDMSASRKKLAVVDENDTCLVYDIDTKELLFQEPNANSVAWNTQCEDMLCFSGGGYLNIKASTFPVHRQKLQGFVVGYNGSKIFCLHVFSISAVEVPQSAPMYQYLDRKLFKEAYQIACLGVTDTDWRELAMEALEGLDFETAKKAFIRVQDLRYLELISSIEERKKRGETNNDLFLADVFSYQGKFHEAAKLYKRSGHENLALEMYTDLCMFEYAKDFLGSGDPKETKMLITKQADWARNIKEPKAAVEMYISAGEHVKAIEICGDHGWVDMLIDIARKLDKAEREPLLLCATYLKKLDSPGYAAETYLKMGDLKSLVQLHVETQRWDEAFALGEKHPEFKDDIYMPYAQWLAENDRFEEAQKAFHKAGRQREAVQVLEQLTNNAVAESRFNDAAYYYWMLSMQCLDIAQADPAQKDTMLGKFYHFQRLAELYHGYHAIHRHTEDPFSVHRPETLFNISRFLLHSLPKDTPSGISKVRKILFTLAKQSKALGAYRLARHAYDKLRGLYIPARFQKSIELGTLTIRAKPFHDSEELVPLCYRCSTNNPLLNNLGNVCINCRQPFIFSASSYDVLHLVEFYLEEGITDEEAISLIDLEVLRPKRDDRQLEIANNSSQILRLVETKDSIGDEDPFTAKLSFEQGGSEFVPVVVSRLVLRSMSRRDVLIKRWPPPLRWQYFRSLLPDASITMCPSCFQMFHSEDYELLVLQHGCCPYCRRCKDDPGP

SEQ ID NO: 50335 - protein, 961 aa, Homo sapiens
MRAVLTWRDKAEHCINDIAFKPDGTQLILAAGSRLLVYDTSDGTLLQPLKGHKDTVYCVAYAKDGKRFASGSADKSVIIWTSKLEGILKYTHNDAIQCVSYNPITHQLASCSSSDFGLWSPEQKSVSKHKSSSKIICCSWTNDGQYLALGMFNGIISIRNKNGEEKVKIERPGGSLSPIWSICWNPSREERNDILAVADWGQKVSFYQLSGKQIGKDRALNFDPCCISYFTKGEYILLGGSDKQVSLFTKDGVRLGTVGEQNSWVWTCQAKPDSNYVVVGCQDGTISFYQLIFSTVHGLYKDRYAYRDSMTDVIVQHLITEQKVRIKCKELVKKIAIYRNRLAIQLPEKILIYELYSEDLSDMHYRVKEKIIKKFECNLLVVCANHIILCQEKRLQCLSFSGVKEREWQMESLIRYIKVIGGPPGREGLLVGLKNGQILKIFVDNLFAIVLLKQATAVRCLDMSASRKKLAVVDENDTCLVYDIDTKELLFQEPNANSVAWNTQCEDMLCFSGGGYLNIKASTFPVHRQKLQGFVVGYNGSKIFCLHVFSISAVEVPQSAPMYQYLDRKLFKEAYQIACLGVTDTDWRELAMEALEGLDFETAKKAFIRVQDLRYLELISSIEERKKRGETNNDLFLADVFSYQGKFHEAAKLYKRSGHENLALEMYTDLCMFEYAKDFLGSGDPKETKMLITKQADWARNIKEPKAAVEMYISAGEHVKAIEICGDHGWVDMLIDIARKLDKAEREPLLLCATYLKKLDSPGYAAETYLKMGDLKSLVQLHVETQRWDEAFALGEKHPEFKDDIYMPYAQWLAENDRFEEAQKAFHKAGRQREAVQVLEQLTNNAVAESRFNDAAYYYWMLSMQCLDIAQDPAQKDTMLGKFYHFQRLAELYHGYHAIHRHTEDPFSVHRPETLFNISRFLLHSLPKDTPSGISKVCENTLHLGQAEQGPRCLQAGPARL

SEQ ID NO: 50336 - protein, 1118 aa, Homo sapiens
MRAVLTWRDKAEHCINDIAFKPDGTQLILAAGSRLLVYDTSDGTLLQPLKGHKDTVYCVAYAKDVLCIEGLWSPEQKSVSKHKSSSKIICCSWTNDGQYLALGMFNGIISIRNKNGEEKVKIERPGGSLSPIWSICWNPSREERNDILAVADWGQKVSFYQLSGKQIGKDRALNFDPCCISYFTKGEYILLGGSDKQVSLFTKDGVRLGTVGEQNSWVWTCQAKPDSNYVVVGCQDGTISFYQLIFSTVHGLYKDRYAYRDSMTDVIVQHLITEQKVRIKCKELVKKIAIYRNRLAIQLPEKILIYELYSEDLSDMHYRVKEKIIKKFECNLLVVCANHIILCQEKRLQCLSFSGVKEREWQMESLIRYIKVIGGPPGREGLLVGLKNGQILKIFVDNLFAIVLLKQATAVRCLDMSASRKKLAVVDENDTCLVYDIDTKELLFQEPNANSVAWNTQCEDMLCFSGGGYLNIKASTFPVHRQKLQGFVVGYNGSKIFCLHVFSISAVEVPQSAPMYQYLDRKLFKEAYQIACLGVTDTDWRELAMEALEGLDFETAKKERKKRGETNNDLFLADVFSYQGKFHEAAKLYKRSGHENLALEMYTDLCMFEYAKDFLGSGDPKETKMLITKQADWARNIKEPKAAVEMYISAGEHVKAIEICGDHGWVDMLIDIARKLDKAEREPLLLCATYLKKLDSPGYAAETYLKMGDLKSLVQLHVETQRWDEAFALGEKHPEFKDDIYMPYAQWLAENDRFEEAQKAFHKAGRQREAVQVLEQLTNNAVAESRFNDAAYYYWMLSMQCLDIAQADPAQKDTMLGKFYHFQRLAELYHGYHAIHRHTEDPFSVHRPETLFNISRFLLHSLPKDTPSGISKVKILFTLAKQSKALGAYRLARHAYDKLRGLYIPARFQKSIELGTLTIRAKPFHDSEELVPLCYRCSTNNPLLNNLGNVCINCRQPFIFSASSYDVLHLVEFYLEEGITDEEAISLIDLEVLRPKRDDRQLEIANNSSQILRLVETKDSIGDEDPFTAKLSFEQGGSEFVPVVVSRLVLRSMSRRDVLIKRWPPPLRWQYFRSLLPDASITMCPSCFQMFHSEDYELLVLQHGCCPYCRRCKDDPGP

SEQ ID NO: 50337 - protein, 1749 aa, Homo sapiens
MHLKHLRTLLSPQDGAAKVTCMAWSQNNAKFAVCTVDRVVLLYDEHGERRDKFSTKPADMKYGRKSYMVKGMAFSPDSTKIAIGQTDNIIYVYKIGEDWGDKKVICNKFIQTSAVTCLQWPAEYIIVFGLAEGKVRLANTKTNKSSTIYGTESYVVSLTTNCSGKGILSGHADGTIVRYFFDDEGSGESQGKLVNHPCPPYALAWATNSIVAAGCDRKIVAYGKEGHMLQTFDYSRDPQEREFTTAVSSPGGQSVVLGSYDRLRVFNWIPRRSIWEEAKPKEITNLYTITALAWKRDGSRLCVGTLCGGVEQFDCCLRRSIYKNKFELTYVGPSQVIVKNLSSGTRVVLKSHYGYEVEEVKILGKERYLVAHTSETLLLGDLNTNRLSEIAWQGSGGNEKYFFENENVCMIFNAGELTLVEYGNNDTLGSVRTEFMNPHLISVRINERCQRGTEDNKKLAYLIDIKTIAIVDLIGGYNIGTVSHESRVDWLELNETGHKLLFRDRKLRLHLYDIESCSKTMILNFCSYMQWVPGSDVLVAQNRNSLCVWYNIEAPERVTMFTIRGDVIGLERGGGKTEVMVMEGVTTVAYTLDEGLIEFGTAIDDGNYIRATAFLETLEMTPETEAMWKTLSKLALEARQLHIAERCFSALGQVAKARFLHETNEIADQVSREYGGEGTDFYQVRARLAMLEKNYKLAEMIFLEQNAVEEAMGMYQELHRWDECIAVAEAKGHPALEKLRRSYYQWLMDTQQEERAGELQESQGDGLAAISLYLKAGLPAKAARLVLTREELLANTELVEHITAALIKGELYERAGDLFEKIHNPQKALECYRKGNAFMKAVELARLAFPVEVVKLEEAWGDHLVQQKQLDAAINHYIEARCSIKAIEAALGARQWKKAIYILDLQDRNTASKYYPLVAQHYASLQEYEIAEELYTKGDRTKDAIDMYTQAGRWEQAHKLAMKCMRPEDVSVLYITQAQEMEKQGKYREAERLYVTVQEPDLAITMYKKHKLYDDMIRLVGKHHPDLLSDTHLHLGKELEAEGRLQEAEYHYLEAQEWKATVNMYRASGLWEEAYRVARTQGGANAHKHVAYLWAKSLGGEAAVRLLNKLGLLEAAVDHAADNCSFEFAFELSRLALKHKTPEVHLKYAMFLEDEGKFEEAEAEFIRAGKPKEAVLMFVHNQDWEAAQRVAEAHDPDSVAEVLVGQARGALEEKDFQKAEGLLLRAQRPGLALNYYKEAGLWSDALRICKDYVPSQLEALQEEYEREATKKGARGVEGFVEQARHWEQAGEYSRAVDCYLKVRDSGNSGLAEKCWMKAAELSIKFLPPQRNMEVVLAVGPQLIGIGKHSAAAELYLNLDLVKEAIDAFIEGEEWNKAKRVAKELDPRYEDYVDQHYKEFLKNQGKVDSLVGVDVIAALDLYVEQGQWDKCIETATKQNYKILHKYVALYATHLIREGSSAQALALYVQHGAPANPQNFNIYKRIFTDMVSSPGTNCAEAYHSWADLRDVLFNLCENLVKSSEANSPAHEEFKTMLLIAHYYATRSAAQSVKQLETVAARLSVSLLRHTQLLPVDKAFYEAGIAAKAVGWDNMAFIFLNRFLDLTDAIEEGTLDGLDHSDFQDTDIPFEVPLPAKQHVPEAEREEVRDWVLTVSMDQRLEQVLPRDERGAYEASLVAASTGVRALPCLITGYPILRNKIEFKRPGKAANKDNWNKFLMAIKTSHSPVCQDVLKFISQWCGGLPSTSFSFQ

SEQ ID NO: 50338 - protein, 511 aa, Homo sapiens
MAWSQNNAKFAVCTVDRVVLLYDEHGERRDKFSTKPADMKYGRKSYMVKGMAFSPDSTKIAIGQTDNIIYVYKIGEDWGDKKVICNKFIQTSAVTCLQWPAEYIIVFGLAEGKVRLANTKTNKSSTIYGTESYVVSLTTNCSGKGILSGHADGTIVRYFFDDEGSGESQGKLVNHPCPPYALAWATNSIVAAGCDRKIVAYGKEGHMLQTFDYSRDPQEREFTTAVSSPGGQSVVLGSYDRLRVFNWIPRRSIWEEAKPKEITNLYTITALAWKRDGSRLCVGTLCGGVEQFDCCLRRSIYKNKFELTYVGPSQVIVKNLSSGTRVVLKSHYGYEVEEVKILGKERYLVAHTSETLLLGDLNTNRLSEIAWQGSGGNEKYFFENENVCMIFNAGELTLVEYGNNDTLGSVRTEFMNPHLISVRINERCQRGTEDNKKLAYLIDIKTIAIVDLIGGYNIGTVSHESRVDWLELNETGHKLLFRDRKLRVRRATKALGIGWPTEGVRQAATRD

SEQ ID NO: 50339 - protein, 122 aa, Homo sapiens
MTHLLLTATVTPSEQNSSREPGWETAMAKDILGEAGLHFDELNKLRVLDPEVTQQTIELKEECKDFVDKIGQFQKIVGGLIELVDQLAKEAENEKMKVRSACLPPTSWPGTLVHYPLIPLPS

SEQ ID NO: 50340 - protein, 148 aa, Homo sapiens
MAKDILGEAGLHFDELNKLRVLDPEVTQQTIELKEECKDFVDKIGQFQKIVGGLIELVDQLAKEAENEKMKSLAVSPRLECTGAISAHCKLCLSDSSDSPTSPSRVGGTTGHRCSELAQIYSKAERSSTAATSSPNSRKENAARKVSG

SEQ ID NO: 50341 - protein, 132 aa, Homo sapiens
MAKDILGEAGLHFDELNKLRVLDPEVTQQTIELKEECKDFVDKIGQFQKIVGGLIELVDQLAKEAENEKMKAIGARNLLKSIAKQREAQQQQLQALIAEKKMQLERYRVEYEALCKVEAEQNEFIDQFIFQK

SEQ ID NO: 50342 - protein, 71 aa, Homo sapiens
DILGEAGLHFDELNKLRVLDPEVTQQTIELKEECKDFVDKIGQFQKIVGGLIELVDQLAKEAENEKMKVSG

SEQ ID NO: 50343 - protein, 114 aa, Homo sapiens
MAKDILGEAGLHFDELNKLRVLDPEVTQQTIELKEECKDFVDKIGQFQKIVGGLIELVDQLAKEAENEKMKAIGARNLLKSIAKQREAQQQQLQALIAEKKMQLERNELKISLL

SEQ ID NO: 50344 - protein, 158 aa, Homo sapiens
MTHLLLTATVTPSEQNSSREPGWETAMAKDILGEAGLHFDELNKLRVLDPEVTQQTIELKEECKDFVDKIGQFQKIVGGLIELVDQLAKEAENEKMKAIGARNLLKSIAKQREAQQQQLQALIAEKKMQLERYRVEYEALCKVEAEQNEFIDQFIFQK

SEQ ID NO: 50345 - protein, 132 aa, Homo sapiens; identical to SEQ ID NO: 50341

SEQ ID NO: 50346 - protein, 213 aa, Homo sapiens
MEDLLDLDEELRYSLATSRAKMGRRAQQESAQAENHLNGKNSSLTLTGETSSAKLPRCRQGGWAGDSVKASNGTQTGKQQLDLNACYHKTHHRDLGLASLEEADIPIIPDLEEVQEEDFVLQVAAPPSIQIKRVMTYRDLDNDLMKYSAIQTLDGEIDLKLLTKVLAPEHEVREDDVGWDWDHLFTEVSSEVLTEWDPLQTEKEDPAGQARHT

SEQ ID NO: 50347 - protein, 208 aa, Homo sapiens
MEDLLDLDEELRYSLATSRAKMGRRAQQESAQAENHLNGKNSSLTLTGETSSAKLPRCRQGGWAGDSVKASKFRRKASEEIEDFRLRPQSLNGSDYGGDIPIIPDLEEVQEEDFVLQVAAPPSIQIKRVMTYRDLDNDLMKYSAIQTLDGEIDLKLLTKVLAPEHEVREDDVGWDWDHLFTEVSSEVLTEWDPLQTEKEDPAGQARHT

SEQ ID NO: 50348 - protein, 113 aa, Homo sapiens
MEDLLDLDEELRYSLATSRAKMGRRAQQESAQAENHLNGKNSSLTLTGETSSAKLPRCRQGGWAGDSVKASKFRRKASEEIEEYVSSILILMVSYVDLGQQCSLGGHDLFHLC

SEQ ID NO: 50349 - protein, 429 aa, Homo sapiens
MTAALAVVTTSGLEDGVPRSRGEGTGEVVLERGPGAAYHMFVVMEDLVEKLKLLRYEEEFLRKSNLKAPSRHYFALPTNPGEQFYMFCTLAAWLINKAGRPFEQPQEYDDPNATISNILSELRSFGRTADFPPSKLKSGYGEHVCYVLDCFAEEALKYIGFTWKRPIYPVEELEEESVAEDDAELTLNKVDEEFVEEETDNEENFIDLNVLKAQTYHLDMNETAKQEDILESTTDAAEWSLEVERVLPQLKVTIRTDNKDWRIHVDQMHQHRSGIESALKETKGFLDKLHNEITRTLEKISSREKYINNQLENLVQEYRAAQAQLSEAKERYQQGNGGVTERTRLLSEVMEELEKVKQEMEEKGSSMTDGAPLVKIKQSLTKLKQETVEMDIRIGIVEHTLLQSKLKEKSNMTRNMHATVIPEPATGFY

SEQ ID NO: 50350 - protein, 777 aa, Homo sapiens
MRLKISLLKEPKHQELVSCVGWTTAEELYSCSDDHQIVKWNLLTSETTQIVKLPDDIYPIDFHWFPKSLGVKKQTQAESFVLTSSDGKFHLISKLGRVEKSVEAHCGAVLAGRWNYEGTALVTVGEDGQIKIWSKTGMLRSTLAQQGTPVYSVAWGPDSEKVLYTAGKQLIIKPLQPNAKVLQWKAHDGIILKVDWNSVNDLILSAGEDCKYKVWDSYGRPLYNSQPHEHPITSVAWAPDGELFAVGSFHTLRLCDKTGWSYALEKPNTGSIFNIAWSIDGTQIAGACGNGHVVFAHVVEQHWEWKNFQVTLTKRRAMQVRNVLNDAVDLLEFRDRVIKASLNYAHLVVSTSLQCYVFSTKNWNTPIIFDLKEGTVSLILQAERHFLLVDGSSIYLYSYEGRFISSPKFPGMRTDILNAQTVSLSNDTIAIRDKADEKIIFLFEASTGKPLGDGKFLSHKNEILEIALDQKGLTNDRKIAFIDKNRDLCITSVKRFGKEEQIIKLGTMVHTLAWNDTCNILCGLQDTRFIVWYYPNTVYVDRDILPKTLYERDASEFSKNPHIVSFVGNQVTIRRADGSLVHISITPYPAILHEYVSSSKWEDAVRLCRFVKEQTMWACLAAMAVANRDMTTAEIAYAAIGEIDKVQYINSIKNLPSKESKMAHILLFSGNIQEAEIVLLQAGLVYQAIQININLYNWERALELAVKYKTHVDTVLAYRQKFLETFGKQETNKRYLHYAEGLQIDWEKIKAKIEMEITKEREQSSSSQSSKSIGLKP

SEQ ID NO: 50351 - protein, 64 aa, Homo sapiens
MRLKISLLKEPKHQELVSCVGWTTAEELYSCSDDHQIVKWNLLTSETTQIVKLPDDIYPIDFHW

SEQ ID NO: 50352 - protein, 640 aa, Homo sapiens
MLRSTLAQQGTPVYSVAWGPDSEKVLYTAGKQLIIKPLQPNAKVLQWKAHDGIILKVDWNSVNDLILSAGEDCKYKVWDSYGRPLYNSQPHEHPITSVAWAPDGELFAVGSFHTLRLCDKTGWSYALEKPNTGSIFNIAWSIDGTQIAGACGNGHVVFAHVVEQHWEWKNFQVTLTKRRAMQVRNVLNDAVDLLEFRDRVIKASLNYAHLVVSTSLQCYVFSTKNWNTPIIFDLKEGTVSLILQAERHFLLVDGSSIYLYSYEGRFISSPKFPGMRTDILNAQTVSLSNDTIAIRDKADEKIIFLFEASTGKPLGDGKFLSHKNEILEIALDQKGLTNDRKIAFIDKNRDLCITSVKRFGKEEQIIKLGTMVHTLAWNDTCNILCGLQDTRFIVWYYPNTVYVDRDILPKTLYERDASEFSKNPHIVSFVGNQVTIRRADGSLVHISITPYPAILHEYVSSSKWEDAVRLCRFVKEQTMWACLAAMAVANRDMTTAEIAYAAIGEIDKVQYINSIKNLPSKESKMAHILLFSGNIQEAEIVLLQAGLVYQAIQININLYNWERALELAVKYKTHVDTVLAYRQKFLETFGKQETNKRYLHYAEGLQIDWEKIKAKIEMEITKEREQSSSSQSSKSIGLKP

SEQ ID NO: 50353 - protein, 121 aa, Homo sapiens
MRLKISLLKEPKHQELVSCVGWTTAEELYSCSDDHQIVKWNLLTSETTQIVKLPDDIYPIDFHWFPKSLGVKKQTQAESFVLTSSDGKFHLISKLGRVEKSVEAHCGAVLAGRWNYEGTAL

SEQ ID NO: 50354 - protein, 640 aa, Homo sapiens; identical to SEQ ID NO: 50352

SEQ ID NO: 50355 - protein, 179 aa, Homo sapiens
MRLKISLLKEPKHQELVSCVGWTTAEELYSCSDDHQIVKWNLLTSETTQIVKLPDDIYPIDFHWFPKSLGVKKQTQAESFVLTSSDGKFHLISKLGRVEKSVEAHCGAVLAGRWNYEGTALVTVGEDGQIKIWSKTGMLRSTLAQQGTPVYSVAWGPDSEKVLYTAGKQLIIKPLQPNA

SEQ ID NO: 50356 - protein, 408 aa, Homo sapiens
MASVASCDSRPSSDELPGDPSSQEEDEDYDFEDRVSDSGSYSSASSDYDDLEPEWLDSVQKNGELFYLELSEDEEESLLPETPTVNHVRFSENEIIIEDDYKERKKYEPKLKQFTKILRRKRLLPKRCNKKNSNDNGPVSILKHQSNQKTGVIVQQRYKDVNVYVNPKKLTVIKAKEQLKLLEVLVGIIHQTKWSWRRTGKQGDGERLVVHGLLPGGSAMKSGQVLIGDVLVAVNDVDVTTENIERVLSCIPGPMQVKLTFENAYDVKRETSHPRQKKTQSNTSDLVKLLWGEEVEGIQQSGLNTPHIIMYLTLQLDSETSKEEQEILYHYPMSEASQKLKSVRGIFLTLCDMLENVTGTQVTSSSLLLNGKQIHVAYWKESDKLLLIGLPAEEIELPSSAHTHGERN

SEQ ID NO: 50357 - protein, 942 aa, Homo sapiens
MASVASCDSRPSSDELPGDPSSQEEDEDYDFEDRVSDSGSYSSASSDYDDLEPEWLDSVQKNGELFYLELSEDEEESLLPETPTVNHVRFSENEIIIEDDYKERKKYEPKLKQFTKILRRKRLLPKRCNKKNSNDNGPVSILKHQSNQKTGVIVQQRYKDVNVYVNPKKLTVIKAKEQLKLLEVLVGIIHQTKWSWRRTGKQGDGERLVVHGLLPGGSAMKSGQVLIGDVLVAVNDVDVTTENIERVLSCIPGPMQVKLTFENAYDVKRETSHPRQKKTQSNTSDLVKLLWGEEVEGIQQSGLNTPHIIMYLTLQLDSETSKEEQEILYHYPMSEASQKLKSVRGIFLTLCDMLENVTGTQVTSSSLLLNGKQIHVAYWKESDKLLLIGLPAEEVPLPRLRNMIENVIQTLKFMYGSLDSAFCQIENVPRLDHFFNLFFQRALQPAKLHSSASPSAQQYDASSAVLLDNLPGVRWLTLPLEIKMELDMALSDLEAADFAELSEDYYDMRRLYTILGSSLFYKGYLICSHLPKDDLIDIAVYCRHYCLLPLAAKQRIGQLIIWREVFPQHHLRPLADSSTEVFPEPEGRYFLLVVGLKHYMLCVLLEAGGCASKAIGSPGPDCVYVDQVKTTLHQLDGVDSRIDERLASSPVPCLSCADWFLTGSREKTDSLTTSPILSRLQGTSKVATSPTCRRTLFGDYSLKTRKPSPSCSSGGSDNGCEGGEDDGFSPHTTPDAVRKQRESQGSDGLEESGTLLKVTKKKSTLPNPFHLGNLKKDLPEKELEIYNTVKLTSGPENTLFHYVALETVQGIFITPTLEEVAQLSGSIHPQLIKNFHQCCLSIRAVFQQTLVEEKKKGLNSGDHSDSAKSVSSLNPVKEHGVLFECSPGNWTDQKKAPPVMAYWVVGRLFLHPKPQELYVCFHDSVTEIAIEIAFKLFFGLTL

SEQ ID NO: 50358 - protein, 895 aa, Homo sapiens
MNKSENLLFAGSSLASQVHAAAVNGDKGALQRLIVGNSALKDKEDQFGRTPLMYCVLADRLDCADALLKAGADVNKTDHSQRTALHLAAQKGNYRFMKLLLTRRANWMQKDLEEMTPLHLTTRHRSPKCLALLLKFMAPGEVDTQDKNKQTALHWSAYYNNPEHVKLLIKHDSNIGIPDVEGKIPLHWAANHKDPSAVHTVRCILDAAPTESLLNWQDYEGRTPLHFAVADGNVTVVDVLTSYESCNITSYDNLFRTPLHWAALLGHAQIVHLLLERNKSGTIPSDSQGATPLHYAAQSNFAETVKVFLKHPSVKDDSDLEGRTSFMWAAGKGSDDVLRTMLSLKSDIDINMADKYGGTALHAAALSGHVSTVKLLLENNAQVDATDVMKHTPLFRACEMGHKDVIQTLIKGGARVDLVDQDGHSLLHWAALGGNADVCQILIENKINPNVQDYAGRTPLQCAAYGGYINCMAVLMENNADPNIQDKEGRTALHWSCNNGYLDAIKLLLDFAAFPNQMENNEERYTPLDYALLGERHEVIQFMLEHGALSIAAIQDIAAFKIQAVYKGYKVRKAFRDRKNLLMKHEQLRKDAAAKKREEENKRKEAEQQKGRRSPDSCRPQALPCLPSTQDVPSRQSRAPSKQPPAGNVAQGPEPRDSRGSPGGSLGGALQKEQHVSSDLQGTNSRRPNETAREHSKGQSACVHFRPNEGSDGSRHPGVPSVEKSRELRLQIIQRERRRKELFRKKNKAAAVIQRAWRSYQLRKHLSHLRHMKQLGAGDVDRWRQESTALLLQVWRKELELKFPQTTAVSKAPKSPSKGTSGTKSTKHSVLKQIYGCSHEGKIHHPTRSVKASSVLRLNSVSNLQCIHLLENSGRSKNFSYNLQSATQPKNKTKP

SEQ ID NO: 50359 - protein, 1065 aa, Homo sapiens
MNKSENLLFAGSSLASQVHAAAVNGDKGALQRLIVGNSALKDKEDQFGRTPLMYCVLADRLDCADALLKAGADVNKTDHSQRTALHLAAQKGNYRFMKLLLTRRANWMQKDLEEMTPLHLTTRHRSPKCLALLLKFMAPGEVDTQDKNKQTALHWSAYYNNPEHVKLLIKHDSNIGIPDVEGKIPLHWAANHKDPSAVHTVRCILDAAPTESLLNWQDYEGRTPLHFAVADGNVTVVDVLTSYESCNITSYDNLFRTPLHWAALLGHAQIVHLLLERNKSGTIPSDSQGATPLHYAAQSNFAETVKVFLKHPSVKDDSDLEGRTSFMWAAGKGSDDVLRTMLSLKSDIDINMADKYGGTALHAAALSGHVSTVKLLLENNAQVDATDVMKHTPLFRACEMGHKDVIQTLIKGGARVDLVDQDGHSLLHWAALGGNADVCQILIENKINPNVQDYAGRTPLQCAAYGGYINCMAVLMENNADPNIQDKEGRTALHWSCNNGYLDAIKLLLDFAAFPNQMENNEERYTPLDYALLGERHEVIQFMLEHGALSIAAIQDIAAFKIQAVYKGYKVRKAFRDRKNLLMKHEQLRKDAAAKKREEENKRKEAEQQKGRRSPDSCRPQALPCLPSTQDVPSRQSRAPSKQPPAGNVAQGPEPRDSRGSPGGSLGGALQKEQHVSSDLQGTNSRRPNETAREHSKGQSACVHFRPNEGSDGSRHPGVPSVEKSRGETAGDERCAKGKGFVKQPSCIRVAGPDEKGEDSRRAAASLPPHDSHWKPSRRHDTEPKAKCAPQKRRTQELRGGRCSPAGSSRPGSARGEAVHAGQNPPHHRTPRNKVTQAKLTGGLYSHLPQSTEELRSGARRLETSTLSEDFQVSKETDPAPGPLSGQSVNIDLLPVELRLQIIQRERRRKELFRKKNKAAAVIQRAWRSYQLRKHLSHLRHMKQLGAGDVDRWRQESTALLLQVWRKELELKFPQTTAVSKAPKSPSKGTSGTKSTKHSVLKQIYGCSHEGKIHHPTRSVKASSVLRLNSVSNLQCIHLLENSGRSKNFSYNLQSATQPKNKTKP

SEQ ID NO: 50360 - protein, 101 aa, Homo sapiens
MNKSENLLFAGSSLASQVHAAAVNGDKGALQRLIVGNSALKDKEDQFGRTPLMYCVLADRLDCADALLKAGADVNKTDHSQRTALHLAAQKALRTISTGRI

SEQ ID NO: 50361 - protein, 988 aa, Homo sapiens
MKLLLTRRANWMQKDLEEMTPLHLTTRHRSPKCLALLLKFMAPGEVDTQDKNKQTALHWSAYYNNPEHVKLLIKHDSNIGIPDVEGKIPLHWAANHKDPSAVHTVRCILDAAPTESLLNWQDYEGRTPLHFAVADGNVTVVDVLTSYESCNITSYDNLFRTPLHWAALLGHAQIVHLLLERNKSGTIPSDSQGATPLHYAAQSNFAETVKVFLKHPSVKDDSDLEGRTSFMWAAGKGSDDVLRTMLSLKSDIDINMADKYGGTALHAAALSGHVSTVKLLLENNAQVDATDVMKHTPLFRACEMGHKDVIQTLIKGGARVDLVDQDGHSLLHWAALGGNADVCQILIENKINPNVQDYAGRTPLQCAAYGGYINCMAVLMENNADPNIQDKEGRTALHWSCNNGYLDAIKLLLDFAAFPNQMENNEERYTPLDYALLGERHEVIQFMLEHGALSIAAIQDIAAFKIQAVYKGYKVRKAFRDRKNLLMKHEQLRKDAAAKKREEENKRKEAEQQKGRRSPDSCRPQALPCLPSTQDVPSRQSRAPSKQPPAGNVAQGPEPRDSRGSPGGSLGGALQKEQHVSSDLQGTNSRRPNETAREHSKGQSACVHFRPNEGSDGSRHPGVPSVEKSRGETAGDERCAKGKGFVKQPSCIRVAGPDEKGEDSRRAAASLPPHDSHWKPSRRHDTEPKAKCAPQKRRTQELRGGRCSPAGSSRPGSARGEAVHAGQNPPHHRTPRNKVTQAKLTGGLYSHLPQSTEELRSGARRLETSTLSEDFQVSKETDPAPGPLSGQSVNIDLLPVELRLQIIQRERRRKELFRKKNKAAAVIQRAWRSYQLRKHLSHLRHMKQLGAGDVDRWRQESTALLLQVWRKELELKFPQTTAVSKAPKSPSKGTSGTKSTKHSVLKQIYGCSHEGKIHHPTRSVKASSVLRLNSGKAATAKQMVGKNMGKHFPLFHPQRQKTLEQIWPGFSNGHLISWDYYCSQHLSP

SEQ ID NO: 50362 - protein, 1240 aa, Homo sapiens
MSVKEGAQRKWAALKEKLGPQDSDPTEANLESADPELCIRLLQMPSVVNYSGLRKRLEGSDGGWMVQFLEQSGLDLLLEALARLSGRGVARISDALLQLTCVSCVRAVMNSRQGIEYILSNQGYVRQLSQALDTSNVMVKKQVFELLAALCIYSPEGHVLTLDALDHYKTVCSQQYRFSIVMNELSGSDNVPYVVTLLSVINAVILGPEDLRARTQLRNEFIGLQLLDVLARLRDLEDADLLIQLEAFEEAKAEDEEELLRVSGGVDMSSHQEVFASLFHKVSCSPVSAQLLSVLQGLLHLEPTLRSSQLLWEALESLVNRAVLLASDAQECTLEEVVERLLSVKGRPRPSPLVKAHKSVQANLDQSQRGSSPQNTTTPKPSVEGQQPAAAAACEPVDHAQSESILKVSQPRALEQQASTPPPPPPPPLLPGSSAEPPPPPPPPPLPSVGAKALPTAPPPPPLPGLGAMAPPAPPLPPPLPGSCEFLPPPPPPLPGLGCPPPPPPLLPGMGWGPPPPPPPLLPCTCSPPVAGGMEEVIVAQVDHGLGSAWVPSHRRVNPPTLRMKKLNWQKLPSNVAREHNSMWASLSSPDAEAVEPDFSSIERLFSFPAAKPKEPTMVAPRARKEPKEITFLDAKKSLNLNIFLKQFKCSNEEVAAMIRAGDTTKFDVEVLKQLLKLLPEKHEIENLRAFTEERAKLASADHFYLLLLAIPCYQLRIECMLLCEGAAAVLDMVRPKAQLVLAACESLLTSRQLPIFCQLILRIGNFLNYGSHTGDADGFKISTLLKLTETKSQQNRVTLLHHVLEEAEKSHPDLLQLPRDLEQPSQAAGINLEIIRSEASSNLKKLLETERKVSASVAEVQEQYTERLQASISAFRALDELFEAIEQKQRELADYLCEDAQQLSLEDTFSTMKAFRDLFLRALKENKDRKEQAAKAERRKQQLAEEEARRPRGEDGKPVRKGPGKQEEVCVIDALLADIRKGFQLRKTARGRGDTDGGSKAASMDPPRATEPVATSNPAGDPVGSTRCPASEPGLDATTASESRGWDLVDAVTPGPQPTLEQLEEGGPRPLERRSSWYVDASDVLTTEDPQCPQPLEGAWPVTLGDAQALKPLKFSSNQPPAAGSSRQDAKDPTSLLGVLQAEADSTSEGLEDAVHSRGARPPAAGPGGDEDEDEEDTAPESALDTSLDKSFSEDAVTDSSGSGTLPRARGRASKGTGKRRKKRPSRSQEGLRPRPKAK

SEQ ID NO: 50363 - protein, 1249 aa, Homo sapiens
MSVKEGAQRKWAALKEKLGPQDSDPTEANLESADPELCIRLLQMPSVVNYSGLRKRLEGSDGGWMVQFLEQSGLDLLLEALARLSGRGVARISDALLQLTCVSCVRAVMNSRQGIEYILSNQGYVRQLSQALDTSNVMVKKQVFELLAALCIYSPEGHVLTLDALDHYKTVCSQQYRFSIVMNELSGSDNVPYVVTLLSVINAVILGPEDLRARTQLRNEFIGLQLLDVLARLRDLEDADLLIQLEAFEEAKAEDEEELLRVSGGVDMSSHQEVFASLFHKVSCSPVSAQLLSVLQGLLHLEPTLRSSQLLWEALESLVNRAVLLASDAQECTLEEVVERLLSVKGRPRPSPLVKAHKSVQANLDQSQRGSSPQNTTTPKPSVEGQQPAAAAACEPVDHAQSESILKVSQPRALEQQASTPPPPPPPPLLPGSSAEPPPPPPPPPLPSVGAKALPTAPPPPPLPGLGAMAPPAPPLPPPLPGSCEFLPPPPPPLPGLGCPPPPPPLLPGMGWGPPPPPPPLLPCTCSPPVAGGMEEVIVAQVDHGLGSAWVPSHRRVNPPTLRMKKLNWQKLPSNVAREHNSMWASLSSPDAEAVEPDFSSIERLFSFPAAKPKEPTMVAPRARKEPKEITFLDAKKSLNLNIFLKQFKCSNEEVAAMIRAGDTTKFDVEVLKQLLKLLPEKHEIENLRAFTEERAKLASADHFYLLLLAIPCYQLRIECMLLCEGAAAVLDMVRPKAQLVLAACESLLTSRQLPIFCQLILRIGNFLNYGSHTGDADGFKISTLLKLTETKSQQNRVTLLHHVLEEAEKSHPDLLQLPRDLEQPSQAAGINLEIIRSEASSNLKKLLETERKVSASVAEVQEQYTERLQASISAFRALDELFEAIEQKQRELADYLCEDAQQLSLEDTFSTMKAFRDLFLRALKENKDRKEQAAKAERRKQQLAEEEARRPRGEDGKPVRKGPGKQEEVCVIDALLADIRKGFQLRKTARGRGDTDGGSKAASMDPPRATEPVATSNPAGDPVGSTRCPASEPGLDATTASESRGWDLVDAVTPGPQPTLEQLEEGGPRPLERRSSWYVDASDVLTTEDPQCPQPLEGAWPVTLGDAQALKPLKFSSNQPPAAGSSRQDAKDPTSLLGVLQAEADSTSEGLEDAVHSRGARPPAAGPGGDEDEDEEDTAPESALDTSLDKSFSEDAVTDSSGSGTLPRARGRASKGTGKRRKKRPSRSQEEVPPDSDDNKTKKLCVIQ

SEQ ID NO: 50364 - protein, 234 aa, Homo sapiens
MSVKEGAQRKWAALKEKLGPQDSDPTEANLESADPELCIRLLQMPSVVNYSGLRKRLEGSDGGWMVQFLEQSGLDLLLEALARLSGRGVARISDALLQLTCVSCVRAVMNSRQGIEYILSNQGYVRQLSQALDTSNVMVKKQVFELLAALCIYSPEGHVLTLDALDHYKTVCSQQYRFSIVMNELSGSDNVPYVVTLLSVINAVILGPEDLRARTQLRNEFIGLQLLDVLARLR

SEQ ID NO: 50365 - protein, 585 aa, Homo sapiens
MSQQHTLPVTLSPALSQELLKTVPPPVNTHQEQMKQPTPLPPPCQKVPVELPVEVPSKQEEKHMTAVKGLPEQECEQQQKEPQEQELQQQHWEQHEEYQKAENPEQQLKQEKTQRDQQLNKQLEEEKKLLDQQLDQELVKRDEQLGMKKEQLLELPEQQEGHLKHLEQQEGQLKHPEQQEGQLELPEQQEGQLELPEQQEGQLELPEQQEGQLELPEQQEGQLELPEQQEGQLELPQQQEGQLELSEQQEGQLELSEQQEGQLKHLEHQEGQLEVPEEQMGQLKYLEQQEGQLKHLDQQEKQPELPEQQMGQLKHLEQQEGQPKHLEQQEGQLEQLEEQEGQLKHLEQQEGQLEHLEHQEGQLGLPEQQVLQLKQLEKQQGQPKHLEEEEGQLKHLVQQEGQLKHLVQQEGQLEQQERQVEHLEQQVGQLKHLEEQEGQLKHLEQQQGQLEVPEQQVGQPKNLEQEEKQLELPEQQEGQVKHLEKQEAQLELPEQQVGQPKHLEQQEKHLEHPEQQDGQLKHLEQQEGQLKDLEQQKGQLEQPVFAPAPGQVQDIQPALPTKGEVLLPVEHQQQKQEVQWPPKHK

SEQ ID NO: 50366 - protein, 439 aa, Homo sapiens
MKKEQLLELPEQQEGHLKHLEQQEGQLKHPEQQEGQLELPEQQEGQLELPEQQEGQLELPEQQEGQLELPEQQEGQLELPEQQEGQLELPQQQEGQLELSEQQEGQLELSEQQEGQLKHLEHQEGQLEVPEEQMGQLKYLEQQEGQLKHLDQQEKQPELPEQQMGQLKHLEQQEGQPKHLEQQEGQLEQLEEQEGQLKHLEQQEGQLEHLEHQEGQLGLPEQQVLQLKQLEKQQGQPKHLEEEEGQLKHLVQQEGQLKHLVQQEGQLEQQERQVEHLEQQVGQLKHLEEQEGQLKHLEQQQGQLEVPEQQVGQPKNLEQEEKQLELPEQQEGQVKHLEKQEAQLELPEQQVGQPKHLEQQEKHLEHPEQQDGQLKHLEQQEGQLKDLEQQKGQLEQPVFAPAPGQVQDIQPALPTKGEVLLPVEHQQQKQEVQWPPKHK

SEQ ID NO: 50367 - protein, 293 aa, Homo sapiens
MYFLTPILVAILCILVVWIFKNADRSMEKKKGEPRTRAEARPWVDEDLKDSSDLHQAEEDADEWQESEENVEHIPFSHNHYPEKEMVKRSQEFYELLNKRRSVRFISNEQVPMEVIDNVIRTAGTAPSGAHTEPWTFVVVKDPDVKHKIRKIIEEEEEINYMKRMGHRWVTDLKKLRTNWIKEYLDTAPILILIFKQVHGFAANGKKKVHYYNEISVSIACGILLAALQVNNGITMRHQTARHRHLIEGPGRSSEACSKLSSQGCPECRSGDCHYHSSQLWPSTEGAPGPPRT

SEQ ID NO: 50368 - protein, 289 aa, Homo sapiens
MYFLTPILVAILCILVVWIFKNADRSMEKKKGEPRTRAEARPWVDEDLKDSSDLHQAEEDADEWQESEENVEHIPFSHNHYPEKEMVKRSQEFYELLNKRRSVRFISNEQVPMEVIDNVIRTAGTAPSGAHTEPWTFVVVKDPDVKHKIRKIIEEEEEINYMKRMGHRWVTDLKKLRTNWIKEYLDTAPILILIFKQVHGFAANGKKKVHYYNEISVSIACGILLAALQNAGLVTVTTTPLNCGPRLRVLLGRPAHEKLLMLLPVGYPSKEATVPDLKRKPLDQIMVTV

SEQ ID NO: 50369 - protein, 270 aa, Homo sapiens
MYFLTPILVAILCILVVWIFKNADRSMEKKKGEPRTRAEARPWVDEDLKDSSDLHQAEEDADEWQESEENVEHIPFSHNHYPEKEMVKRSQEFYELLNKRRSVRFISNEQVPMEVIDNVIRTAGTAPSGAHTEPWTFVVVKDPDVKHKIRKIIEEEEEINYMKRMGHRWVTDLKKLRTNWIKEYLDTAPILILIFKQVHGFAANGKKKVHYYNEISVSIACGILLAALQVNNGITMRHQTARHRHLIEGPGRSSEACSKLSSQGCPGFYC

SEQ ID NO: 50370 - protein, 247 aa, Homo sapiens
MYFLTPILVAILCILVVWIFKNADRSMEKKKGEPRTRAEARPWVDEDLKDSSDLHQAEEDADEWQESEENVEHIPFSHNHYPEKEMVKRSQEFYELLNKRRSVRFISNEQVPMEVIDNVIRTAGTAPSGAHTEPWTFVVVKDPDVKHKIRKIIEEEEEINYMKRMGHRWVTDLKKLRTNWIKEYLDTAPILILIFKQVHGFAANGKKKVHYYNEISVSIACGILLAALQVFGKIILKELALISFLNL

SEQ ID NO: 50371 - protein, 284 aa, Homo sapiens
MYFLTPILVAILCILVVWIFKNADRSMEKKKGEPRTRAEARPWVDEDLKDSSDLHQAEEDADEWQESEENVEHIPFSHNHYPEKEMVKRSQEFYELLNKRRSVRFISNEQVPMEVIDNVIRTAGTAPSGAHTEPWTFVVVKDPDVKHKIRKIIEEEEEINYMKRMGHRWVTDLKKLRTNWIKEYLDTAPILILIFKQVHGFAANGKKKVHYYNEISVSIACGILLAALQVNNGITMRHQTARHRHLIEGPGRSSEACSKLSSQGCPGASAAGSLFHFAIEFAAP

SEQ ID NO: 50372 - protein, 949 aa, Homo sapiens
MEPPGRSSRSTASHTLHQYCCPTQVLDSMKLTPSGRLAESSVEGDAPGSDLSTAVDSPGSQPPYRLSQLPPSSSHMGGPPAGVGLPWAQRARLQPASVALRKQEEEEIKRSKALSDSYELSTDLQDKKVEMLERKYGGSFLSRRAARTIQTAFRQYRMNKNFERLRSSASESRMSRRIILSNMRMQFSFEEYEKAQNPAYFEGKPASLDEGAMAGARSHRLERGLPYGGSCGGGIDGGGSSVTTSGEFSNDITELEDSFSKQVKSLAESIDEALNCHPSGPMSEEPGSAQLEKRESKEQQEDSSATSFSDLPLYLDDTVPQQSPERLPSTEPPPQGRPEFWAPAPLPPVPPPVPSGTREDGSREEGTRRGPGCLECRDFRLRAAHLPLLTIEPPSDSSVDLSDRSDRGSVHRQLVYEADGCSPHGTLKHKGPPGRAPIPHRHYPAPEGPAPAPPGPLPPAPNSGTGPSGVAGGRRLGKCEAAGENSDGGDNESLESSSNSNETINCSSGSSSRDSLREPPATGLCKQTYQRETRHSWDSPAFNNDVVQRRHYRIGLNLFNKKPEKGIQYLIERGFLSDTPVGVAHFILERKGLSRQMIGEFLGNRQKQFNRDVLDCVVDEMDFSSMDLDDALRKFQSHIRVQGEAQKVERLIEAFSQRYCVCNPALVRQFRNPDTIFILAFAIILLNTDMYSPSVKAERKMKLDDFIKNLRGVDNGEDIPRDLLVGIYQRIQGRELRTNDDHVSQVQAVERMIVGKKPVLSLPHRRLVCCCQLYEVPDPNRPQRLGLHQREVFLFNDLLVVTKIFQKKKILVTYSFRQSFPLVEMHMQLFQNSYYQFGIKLLSAVPGGERKVLIIFNAPSLQDRLRFTSDLRESIAEVQEMEKYRVESELEKQKGMMRPNASQPGGAKDSVNGTMARSSLEDTYGAGDGLKRGALSSSLRDLSDAGVCY

SEQ ID NO: 50373 - protein, 1478 aa, Homo sapiens
MEAGSGPPGGPGSESPNRAVEYLLELNNIIESQQQLLETQRRRIEELEGQLDQLTQENRDLREESQLHRGELHRDPHGARDSPGRESQYQNLRETQFHHRELRESQFHQAARDVGYPNREGAYQNREAVYRDKERDASYPLQDTTGYTARERDVAQCHLHHENPALGRERGGREAGPAHPGREKEAGYSAAVGVGPRPPRERGQLSRGASRSSSPGAGGGHSTSTSTSPATTLQRNVEGDAPGSDLSTAVDSPGSQPPYRLSQLPPSSSHMGGPPAGVGLPWAQRARLQPASVALRKQEEEEIKRSKALSDSYELSTDLQDKKVEMLERKYGGSFLSRRAARTIQTAFRQYRMNKNFERLRSSASESRMSRRIILSNMRMQFSFEEYEKAQNPAYFEGKPASLDEGAMAGARSHRLERGLPYGGSCGGGIDGGGSSVTTSGEFSNDITELEDSFSKQVKSLAESIDEALNCHPSGPMSEEPGSAQLEKRESKEQQEDSSATSFSDLPLYLDDTVPQQSPERLPSTEPPPQGRPEFWAPAPLPPVPPPVPSGTREDGSREEGTRRGPGCLECRDFRLRAAHLPLLTIEPPSDSSVDLSDRSDRGSVHRQLVYEADGCSPHGTLKHKGPPGRAPIPHRHYPAPEGPAPAPPGPLPPAPNSGTGPSGVAGGRRLGKCEAAGENSDGGDNESLESSSNSNETINCSSGSSSRDSLREPPATGLCKQTYQRETRHSWDSPAFNNDVVQRRHYRIGLNLFNKKPEKGIQYLIERGFLSDTPVGVAHFILERKGLSRQMIGEFLGNRQKQFNRDVLDCVVDEMDFSSMDLDDALRKFQSHIRVQGEAQKVERLIEAFSQRYCVCNPALVRQFRNPDTIFILAFAIILLNTDMYSPSVKAERKMKLDDFIKNLRGVDNGEDIPRDLLVGIYQRIQGRELRTNDDHVSQVQAVERMIVGKKPVLSLPHRRLVCCCQLYEVPDPNRPQRLGLHQREVFLFNDLLVVTKIFQKKKILVTYSFRQSFPLVEMHMQLFQNSYYQFGIKLLSAVPGGERKVLIIFNAPSLQDRLRFTSDLRESIAEVQEMEKYRVESELEKQKGMMRPNASQPGGAKDSVNGTMARSSLEDTYGAGDGLKRGALSSSLRDLSDAGKRGRRNSVGSLDSTIEGSVISSPRPHQRMPPPPPPPPPEEYKSQRPVSNSSSFLGSLFGSKRGKGPFQMPPPPTGQASASSSSASSTHHHHHHHHHGHSHGGLGVLPDGQSKLQALHAQYCQGPGPAPPPYLPPQQPSLPPPPQQPPPLPQLGSIPPPPASAPPVGPHRHFHAHGPVPGPQHYTLGRPGRAPRRGAGGHPQFAPHGRHPLHQPTSPLPLYSPAPQHPPAHKQGPKHFIFSHHPQMMPAAGAAGGPGSRPPGGSYSHPHHPQSPLSPHSPIPPHPSYPPLPPPSPHTPHSPLPPTSPHGPLHASGPPGTANPPSANPKAKPSRISTVV

SEQ ID NO: 50374 - protein, 1488 aa, Homo sapiens
MEAGSGPPGGPGSESPNRAVEYLLELNNIIESQQQLLETQRRRIEELEGQLDQLTQENRDLREESQLHRGELHRDPHGARDSPGRESQYQNLRETQFHHRELRESQFHQAARDVGYPNREGAYQNREAVYRDKERDASYPLQDTTGYTARERDVAQCHLHHENPALGRERGGREAGPAHPGREKEAGYSAAVGVGPRPPRERGQLSRGASRSSSPGAGGGHSTSTSTSPATTLQRKSDGENSRTVSVEGDAPGSDLSTAVDSPGSQPPYRLSQLPPSSSHMGGPPAGVGLPWAQRARLQPASVALRKQEEEEIKRSKALSDSYELSTDLQDKKVEMLERKYGGSFLSRRAARTIQTAFRQYRMNKNFERLRSSASESRMSRRIILSNMRMQFSFEEYEKAQNPAYFEGKPASLDEGAMAGARSHRLERGLPYGGSCGGGIDGGGSSVTTSGEFSNDITELEDSFSKQVKSLAESIDEALNCHPSGPMSEEPGSAQLEKRESKEQQEDSSATSFSDLPLYLDDTVPQQSPERLPSTEPPPQGRPEFWAPAPLPPVPPPVPSGTREDGSREEGTRRGPGCLECRDFRLRAAHLPLLTIEPPSDSSVDLSDRSDRGSVHRQLVYEADGCSPHGTLKHKGPPGRAPIPHRHYPAPEGPAPAPPGPLPPAPNSGTGPSGVAGGRRLGKCEAAGENSDGGDNESLESSSNSNETINCSSGSSSRDSLREPPATGLCKQTYQRETRHSWDSPAFNNDVVQRRHYRIGLNLFNKKPEKGIQYLIERGFLSDTPVGVAHFILERKGLSRQMIGEFLGNRQKQFNRDVLDCVVDEMDFSSMDLDDALRKFQSHIRVQGEAQKVERLIEAFSQRYCVCNPALVRQFRNPDTIFILAFAIILLNTDMYSPSVKAERKMKLDDFIKNLRGVDNGEDIPRDLLVGIYQRIQGRELRTNDDHVSQVQAVERMIVGKKPVLSLPHRRLVCCCQLYEVPDPNRPQRLGLHQREVFLFNDLLVVTKIFQKKKILVTYSFRQSFPLVEMHMQLFQNSYYQFGIKLLSAVPGGERKVLIIFNAPSLQDRLRFTSDLRESIAEVQEMEKYRVESELEKQKGMMRPNASQPGGAKDSVNGTMARSSLEDTYGAGDGLKRGALSSSLRDLSDAGKRGRRNSVGSLDSTIEGSVISSPRPHQRMPPPPPPPPPEEYKSQRPVSNSSSFLGSLFGSKRGKGPFQMPPPPTGQASASSSSASSTHHHHHHHHHGHSHGGLGVLPDGQSKLQALHAQYCQGPGPAPPPYLPPQQPSLPPPPQQPPPLPQLGSIPPPPASAPPVGPHRHFHAHGPVPGPQHYTLGRPGRAPRRGAGGHPQFAPHGRHPLHQPTSPLPLYSPAPQHPPAHKQGPKHFIFSHHPQMMPAAGAAGGPGSRPPGGSYSHPHHPQSPLSPHSPIPPHPSYPPLPPPSPHTPHSPLPPTSPHGPLHASGPPGTANPPSANPKAKPSRISTVV

SEQ ID NO: 50375 - protein, 1182 aa, Homo sapiens
MESLLENPVRAVLYLKELTAIVQNQQSLIHTQRERIDELERRLDELSAENRSLWEHQQLLQAQPPPGLVPPSSAPLPAAPATAPAAAARAQEPLQDQGQRSAAAPHPAPDRPPRQHHGQLLEQPQRGPGSRAHTPQSPHKHLGTQGAVTDKEKERPPSCCAAAGALLQHKSPSALGKGVLSRRPENETVLHQFCCPAADACSDLASQSDGSCTQAGGGMEDSVVAAAAVAAGRPSAHAPKAQAQELQEEEERPGAGAASPRAGPQHKASPGRQQPALATALCPHAPAASDYELSLDLKNKQIEMLEHKYGGHLVSRRAACTIQTAFRQYQLSKNFEKIRNSLLESRLPRRISLRKVRSPTAESLAAEKALMEGYGLVGLPLVRSPSLPPTFAGTLTELEDSFTEQVQSLAKSIDDALSTWSLKTMCSLRESGAYQLHQALQAAAGPPGLEAEGRAPESAGPGPGDDAAETPGLPPAHSGTLMMAFRDVTVQIANQNISVSSSTALSVANCLGAQTVQAPAEPAAGKAEQGETSGREAPEAPAVGREDASAEDSCAEAAASGAADGATAPKTEEEEEEEETAEVGRGAEAEAGDLEQLSSSSTSTKSAKSGSEASASASKDALQAMILSLPRYHCENPASCKSPTLSTDTLRKRLYRIGLNLFNINPDKGIQFLISRGFIPDTPIGVAHFLLQRKGLSRQMIGEFLGNSKKQFNRDVLDCVVDEMDFSSMELDEALRKFQAHIRVQGEAQKVERLIEAFSQRYCMCNPEVVQQFHNPDTIFILAFAIILLNTDMYSPNIKPDRKMMLEDFIRNLRGVDDGADIPRELVVGIYERIQQKELKSNEDHVTYVTKVEKSIVGMKTVLSVPHRRLVCCSRLFEVTDVNKLQKQAAHQREVFLFNDLLVILKLCPKKKSSSTYTFCKSVGLLGMQFQLFENEYYSHGITLVTPLSGSEKKQVLHFCALGSDEMQKFVEDLKESIAEVTELEQIRIEWELEKQQGTKTLSFKPCGAQGDPQSKQGSPTAKREAALRERPAESTVEVSIHNRLQTSQHNSGLGAERGAPVPPPDLQPSPPRQQTPPLPPPPPTPPGTLVQCQQIVKVIVLDKPCLARMEPLLSQALSCYTSSSSDSCGSTPLGGPGSPVKVTHQPPLPPPPPPYNHPHQFCPPGSLLHGHRYSSGSRSLV

SEQ ID NO: 50376 - protein, 759 aa, Homo sapiens
MLEHKYGGHLVSRRAACTIQTAFRQYQLSKNFEKIRNSLLESRLPRRISLRKVRSPTAESLAAEKALMEGYGLVGLPLVRSPSLPPTFAGTLTELEDSFTEQVQSLAKSIDDALSTWSLKTMCSLRESGAYQLHQALQAAAGPPGLEAEGRAPESAGPGPGDDAAETPGLPPAHSGTLMMAFRDVTVQIANQNISVSSSTALSVANCLGAQTVQAPAEPAAGKAEQGETSGREAPEAPAVGREDASAEDSCAEAAASGAADGATAPKTEEEEEEEETAEVGRGAEAEAGDLEQLSSSSTSTKSAKSGSEASASASKDALQAMILSLPRYHCENPASCKSPTLSTDTLRKRLYRIGLNLFNINPDKGIQFLISRGFIPDTPIGVAHFLLQRKGLSRQMIGEFLGNSKKQFNRDVLDCVVDEMDFSSMELDEALRKFQAHIRVQGEAQKVERLIEAFSQRYCMCNPEVVQQFHNPDTIFILAFAIILLNTDMYSPNIKPDRKMMLEDFIRNLRGVDDGADIPRELVVGIYERIQQKELKSNEDHVTYVTKVEKSIVGMKTVLSVPHRRLVCCSRLFEVTDVNKLQKQAAHQREVFLFNDLLVILKLCPKKKSSSTYTFCKSVGLLGMQFQLFENEYYSHGITLVTPLSGSEKKQVLHFCALGSDEMQKFVEDLKESIAEVTELEQIRIEWELEKQQGTKTLSFKPCGAQGDPQSKQGSPTAKREAALRERPAESTVEVLINASPARLTILPISRDTIKSYC

SEQ ID NO: 50377 - protein, 1182 aa, Homo sapiens; identical to SEQ ID NO: 50375

SEQ ID NO: 50378 - protein, 598 aa, Homo sapiens
MKPTGTDPRILSIAAEVAKSPEQNVPVILLKLKEIINITPLGSSELKKIKQDIYCYDLIQYCLLVLSQDYSRIQGGWTTISQLTQILSHCCVGLEPGEDAEEFYNELLPSAAENFLVLGRQLQTCFINAAKAEEKDELLHFFQIVTDSLFWLLGGHVELIQNVLQSDHFLHLLQADNVQIGSAVMMMLQNILQINSGDLLRIGRKALYSILDEVIFKLFSTPSPVIRSTATKLLLLMAESHQEILILLRQSTCYKGLRRLLSKQETGTEFSQELRQLVGLLSPMVYQEVEEQKLHQAACLIQAYWKGFQTRKRLKKLPSAVIALQRSFRSKRSKMLLEINRQKEEEDLKLQLQLQRQRAMRLSRELQLSMLEIVHPGQVEKHYREMEEKSALIIQKHWRGYRERKNFHQQRQSLIEYKAAVTLQRAALKFLAKCRKKKKLFAPWRGLQELTDARRVELKKRVDDYVRRHLGSPMSDVVSRELHAQAQERLQHYFMGRALEERAQQHREALIAQISTNVEQLMKAPSLKEAEGKEPELFLSRSRPVAAKAKQAHLTTLKHIQAPWWKKLGEESGDEIDVPKDELSIELENLFIGGTKPP

SEQ ID NO: 50379 - protein, 465 aa, Homo sapiens
MKPTGTDPRILSIAAEVAKSPEQNVPVILLKLKEIINITPLGSSELKKIKQDIYCYDLIQYCLLVLSQDYSRIQGGWTTISQLTQILSHCCVGLEPGEDAEEFYNELLPSAAENFLVLGRQLQTCFINAAKAEEKDELLHFFQIVTDSLFWLLGGHVELIQNVLQSDHFLHLLQADNVQIGSAVMMMLQNILQINRSKRSKMLLEINRQKEEEDLKLQLQLQRQRAMRLSRELQLSMLEIVHPGQVEKHYREMEEKSALIIQKHWRGYRERKNFHQQRQSLIEYKAAVTLQRAALKFLAKCRKKKKLFAPWRGLQELTDARRVELKKRVDDYVRRHLGSPMSDVVSRELHAQAQERLQHYFMGRALEERAQQHREALIAQISTNVEQLMKAPSLKEAEGKEPELFLSRSRPVAAKAKQAHLTTLKHIQAPWWKKLGEESGDEIDVPKDELSIELENLFIGGTKPP

SEQ ID NO: 50380 - protein, 87 aa, Homo sapiens
MKPTGTDPRILSIAAEVAKSPEQNVPVILLKLKEIINITPLGSSELKKIKQDIYCYDLIQYCLLVLSQDYSRIQGGWTTISQLTQIL

SEQ ID NO: 50381 - protein, 443 aa, Homo sapiens
MEEDSLEDSNLPPKVWHSEMTVSVTGEPPSTVEEEGIPKETDIEIIPEIPETLEPLSLPDVLRISAVLEDTTDQLSILNYIMPVQYEGRQSICVKSREMNLEGTNLDKLPMASTITKIPSPLITEEGPNLPEIRHRGRFAVEFNKMQDLVFKKPTRQTIMTTETLKKIQIDRQFFSDVIADTIKELQDSATYNSLLQALSKERENKMHFYDIIAREEKGRKQIISLQKQLINVKKEWQFEVQSQNEYIANLKDQLQEMKAKSNLENRYMKTNTELQIAQTQKKCNRTEELLVEEIEKLRMKTEEEARTHTEIEMFLRKEQQKLEERLEFWMEKYDKDTEMKQNELNALKATKASDLAHLQDLAKMIREYEQVIIEDRIEKERSKKKVKQDLLELKSVIKLQAWWRGTMIRREIGGFKMPKDKVDSKDSKGKGKGKDKRRGKKK

SEQ ID NO: 50382 - protein, 54 aa, Homo sapiens
MEEDSLEDSNLPPKVWHSEMTVSVTGEPPSTVEEEGIPKETDIEIIPEIPETLE

SEQ ID NO: 50383 - protein, 443 aa, Homo sapiens; identical to SEQ ID NO: 50381

SEQ ID NO: 50384 - protein, 1657 aa, Homo sapiens
MSAADEVDGLGVARPHYGSVLDNERLTAEEMDERRRQNVAYEYLCHLEEAKRWMEACLGEDLPPTTELEEGLRNGVYLAKLGNFFSPKVVSLKKIYDREQTRYKATGLHFRHTDNVIQWLNAMDEIGLPKIFYPETTDIYDRKNMPRCIYCIHALSLYLFKLGLAPQIQDLYGKVDFTEEEINNMKTELEKYGIQMPAFSKIGGILANELSVDEAALHAAVIAINEAIDRRIPADTFAALKNPNAMLVNLEEPLASTYQDILYQAKQDKMTNAKNRTENSERERDVYEELLTQAEIQGNINKVNTFSALANIDLALEQGDALALFRALQSPALGLRGLQQQNSDWYLKQLLSDKQQKRQSGQTDPLQKEELQSGVDAANSAAQQYQRRLAAVALINAAIQKGVAEKTVLELMNPEAQLPQVYPFAADLYQKELATLQRQSPEHNLTHPELSVAVEMLSSVALINRALESGDVNTVWKQLSSSVTGLTNIEEENCQRYLDELMKLKAQAHAENNEFITWNDIQACVDHVNLVVQEEHERILAIGLINEALDEGDAQKTLQALQIPAAKLEGVLAEVAQHYQDTLIRAKREKAQEIQDESAVLWLDEIQGGIWQSNKDTQEAQKFALGIFAINEAVESGDVGKTLSALRSPDVGLYGVIPECGETYHSDLAEAKKKKLAVGDNNSKWVKHWVKGGYYYYHNLETQEGGWDEPPNFVQNSMQLSREEIQSSISGVTAAYNREQLWLANEGLITRLQARCRGYLVRQEFRSRMNFLKKQIPAITCIQSQWRGYKQKKAYQDRLAYLRSHKDEVVKIQSLARMHQARKRYRDRLQYFRDHINDIIKIQAFIRANKARDDYKTLINAEDPPMVVVRKFVHLLDQSDQDFQEELDLMKMREEVITLIRSNQQLENDLNLMDIKIGLLVKNKITLQDVVSHSKKLTKKNKEQLSDMMMINKQKGGLKALSKEKREKLEAYQHLFYLLQTNPTYLAKLIFQMPQNKSTKFMDSVIFTLYNYASNQREEYLLLRLFKTALQEEIKSKVDQIQEIVTGNPTVIKMVVSFNRGARGQNALRQILAPVVKEIMDDKSLNIKTDPVDIYKSWVNQMESQTGEASKLPYDVTPEQALAHEEVKTRLDSSIRNMRAVTDKFLSAIVSSVDKIPYGMRFIAKVLKDSLHEKFPDAGEDELLKIIGNLLYYRYMNPAIVAPDAFDIIDLSAGGQLTTDQRRNLGSIAKMLQHAASNKMFLGDNAHLSIINEYLSQSYQKFRRFFQTACDVPELQDKFNVDEYSDLVTLTKPVIYISIGEIINTHTLLLDHQDAIAPEHNDPIHELLDDLGEVPTIESLIGESSGNLNDPNKEALAKTEVSLTLTNKFDVPGDENAEMDARTILLNTKRLIVDVIRFQPGETLTEILETPATSEQEAEHQRAMQRRAIRDAKTPDKMKKSKSVKEDSNLTLQEKKEKIQTGLKKLTELGTVDPKNKYQELINDIARDIRNQRRYRQRRKAELVKLQQTYAALNSKATFYGEQVDYYKSYIKTCLDNLASKGKVSKKPREMKGKKSKKISLKYTAARLHEKGVLLEIEDLQVNQFKNVIFEISPTEEVGDFEVKAKFMGVQMETFMLHYQDLLQLQYEGVAVMKLFDRAKVNVNLLIFLLNKKFYGK

SEQ ID NO: 50385 - protein, 1575 aa, Homo sapiens
MPHEELPSLQRPRYGSIVDDERLSAEEMDERRRQNIAYEYLCHLEEAKRWMEVCLVEELPPTTELEEGLRNGVYLAKLAKFFAPKMVSEKKIYDVEQTRYKKSGLHFRHTDNTVQWLRAMESIGLPKIFYPETTDVYDRKNIPRMIYCIHALSLYLFKLGIAPQIQDLLGKVDFTEEEISNMRKELEKYGIQMPSFSKIGGILANELSVDEAALHAAVIAINEAVEKGIAEQTVVTLRNPNAVLTLVDDNLAPEYQKELWDAKKKKEENARLKNSCISEEERDAYEELLTQAEIQGNINKVNRQAAVDHINAVIPEGDPENTLLALKKPEAQLPAVYPFAAAMYQNELFNLQKQNTMNYLAHEELLIAVEMLSAVALLNQALESNDLVSVQNQLRSPAIGLNNLDKAYVERYANTLLSVKLEVLSQGQDNLSWNEIQNCIDMVNAQIQEENDRVVAVGYINEAIDEGNPLRTLETLLLPTANISDVDPAHAQHYQDVLYHAKSQKLGDSESVSKVLWLDEIQQAVDDANVDKDRAKQWVTLVVDVNQCLEGKKSSDILSVLKSSTSNANDIIPECADKYYDALVKAKELKSERVSSDGSWLKLNLHKKYDYYYNTDSKESSWVTPESCLYKESWLTGKEIEDIIEEVTVGYIRENIWSASEELLLRFQATSSGPILREEFEARKSFLHEQEENVVKIQAFWKGYKQRKEYMHRRQTFIDNTDSIVKIQSWFRMATARKSYLSRLQYFRDHNNEIVKIQSLLRANKARDDYKTLVGSENPPLTVIRKFVYLLDQSDLDFQEELEVARLREEVVTKIRANQQLEKDLNLMDIKIGLLVKNRITLEDVISHSKKLNKKKGGEMEILNNTDNQGIKSLSKERRKTLETYQQLFYLLQTNPLYLAKLIFQMPQNKSTKFMDTVIFTLYNYASNQREEYLLLKLFKTALEEEIKSKVDQVQDIVTGNPTVIKMVVSFNRGARGQNTLRQLLAPVVKEIIDDKSLIINTNPVEVYKAWVNQLETQTGEASKLPYDVTTEQALTYPEVKNKLEASIENLRRVTDKVLNSIISSLDLLPYGLRYIAKVLKNSIHEKFPDATEDELLKIVGNLLYYRYMNPAIVAPDGFDIIDMTAGGQINSDQRRNLGSVAKVLQHAASNKLFEGENEHLSSMNNYLSETYQEFRKYFKEACNVPEPEEKFNMDKYTDLVTVSKPVIYISIEEIISTHSLLLEHQDAIAPEKNDLLSELLGSLGEVPTVESFLGEGAVDPNDPNKANTLSQLSKTEISLVLTSKYDIEDGEAIDSRSLMIKTKKLIIDVIRNQPGNTLTEILETPATAQQEVDHATDMVSRAMIDSRTPEEMKHSQSMIEDAQLPLEQKKRKIQRNLRTLEQTGHVSSENKYQDILNEIAKDIRNQRIYRKLRKAELAKLQQTLNALNKKAAFYEEQINYYDTYIKTCLDNLKRKNTRRSIKLDGKGEPKGAKRAKPVKYTAAKLHEKGVLLDIDDLQTNQFKNVTFDIIATEDVGIFDVRSKFLGVEMEKVQLNIQDLLQMQYEGVAVMKMFDKVKVNVNLLIYLLNKKFYGK

SEQ ID NO: 50386 - protein, 1077 aa, Homo sapiens
MVNAQIQEENDRVVAVGYINEAIDEGNPLRTLETLLLPTANISDVDPAHAQHYQDVLYHAKSQKLGDSESVSKVLWLDEIQQAVDDANVDKDRAKQWVTLVVDVNQCLEGKKSSDILSVLKSSTSNANDIIPECADKYYDALVKAKELKSERVSSDGSWLKLNLHKKYDYYYNTDSKESSWVTPESCLYKESWLTGKEIEAFWKGYKQRKEYMHRRQTFIDNTDSIVKIQSWFRMATARKSYLSRLQYFRDHNNEIVKIQSLLRANKARDDYKTLVGSENPPLTVIRKFVYLLDQSDLDFQEELEVARLREEVVTKIRANQQLEKDLNLMDIKIGLLVKNRITLEDVISHSKKLNKKKGGEMEILNNTDNQGIKSLSKERRKTLETYQQLFYLLQTNPLYLAKLIFQMPQNKSTKFMDTVIFTLYNYASNQREEYLLLKLFKTALEEEIKSKVDQVQDIVTGNPTVIKMVVSFNRGARGQNTLRQLLAPVVKEIIDDKSLIINTNPVEVYKAWVNQLETQTGEASKLPYDVTTEQALTYPEVKNKLEASIENLRRVTDKVLNSIISSLDLLPYGLRYIAKVLKNSIHEKFPDATEDELLKIVGNLLYYRYMNPAIVAPDGFDIIDMTAGGQINSDQRRNLGSVAKVLQHAASNKLFEGENEHLSSMNNYLSETYQEFRKYFKEACNVPEPEEKFNMDKYTDLVTVSKPVIYISIEEIISTHSLLLEHQDAIAPEKNDLLSELLGSLGEVPTVESFLGEGAVDPNDPNKANTLSQLSKTEISLVLTSKYDIEDGEAIDSRSLMIKTKKLIIDVIRNQPGNTLTEILETPATAQQEVDHATDMVSRAMIDSRTPEEMKHSQSMIEDAQLPLEQKKRKIQRNLRTLEQTGHVSSENKYQDILNEIAKDIRNQRIYRKLRKAELAKLQQTLNALNKKAAFYEEQINYYDTYIKTCLDNLKRKNTRRSIKLDGKGEPKGAKRAKPVKYTAAKLHEKGVLLDIDDLQTNQFKNVTFDIIATEDVGIFDVRSKFLGVEMEKVQLNIQDLLQMQYEGVAVMKMFDKVKVNVNLLIYLLNKKFYGK

SEQ ID NO: 50387 - protein, 1071 aa, Homo sapiens
MHSLPGVVAVGYINEAIDEGNPLRTLETLLLPTANISDVDPAHAQHYQDVLYHAKSQKLGDSESVSKVLWLDEIQQAVDDANVDKDRAKQWVTLVVDVNQCLEGKKSSDILSVLKSSTSNANDIIPECADKYYDALVKAKELKSERVSSDGSWLKLNLHKKYDYYYNTDSKESSWVTPESCLYKESWLTGKEIEAFWKGYKQRKEYMHRRQTFIDNTDSIVKIQSWFRMATARKSYLSRLQYFRDHNNEIVKIQSLLRANKARDDYKTLVGSENPPLTVIRKFVYLLDQSDLDFQEELEVARLREEVVTKIRANQQLEKDLNLMDIKIGLLVKNRITLEDVISHSKKLNKKKGGEMEILNNTDNQGIKSLSKERRKTLETYQQLFYLLQTNPLYLAKLIFQMPQNKSTKFMDTVIFTLYNYASNQREEYLLLKLFKTALEEEIKSKVDQVQDIVTGNPTVIKMVVSFNRGARGQNTLRQLLAPVVKEIIDDKSLIINTNPVEVYKAWVNQLETQTGEASKLPYDVTTEQALTYPEVKNKLEASIENLRRVTDKVLNSIISSLDLLPYGLRYIAKVLKNSIHEKFPDATEDELLKIVGNLLYYRYMNPAIVAPDGFDIIDMTAGGQINSDQRRNLGSVAKVLQHAASNKLFEGENEHLSSMNNYLSETYQEFRKYFKEACNVPEPEEKFNMDKYTDLVTVSKPVIYISIEEIISTHSLLLEHQDAIAPEKNDLLSELLGSLGEVPTVESFLGEGAVDPNDPNKANTLSQLSKTEISLVLTSKYDIEDGEAIDSRSLMIKTKKLIIDVIRNQPGNTLTEILETPATAQQEVDHATDMVSRAMIDSRTPEEMKHSQSMIEDAQLPLEQKKRKIQRNLRTLEQTGHVSSENKYQDILNEIAKDIRNQRIYRKLRKAELAKLQQTLNALNKKAAFYEEQINYYDTYIKTCLDNLKRKNTRRSIKLDGKGEPKGAKRAKPVKYTAAKLHEKGVLLDIDDLQTNQFKNVTFDIIATEDVGIFDVRSKFLGVEMEKVQLNIQDLLQMQYEGVAVMKMFDKVKVNVNLLIYLLNKKFYGK

SEQ ID NO: 50388 - protein, 377 aa, Homo sapiens
MGCFKGVVAVGYINEAIDEGNPLRTLETLLLPTANISDVDPAHAQHYQDVLYHAKSQKLGDSESVSKVLWLDEIQQAVDDANVDKDRAKQWVTLVVDVNQCLEGKKSSDILSVLKSSTSNANDIIPECADKYYDALVKAKELKSERVSSDGSWLKLNLHKKYDYYYNTDSKESSWVTPESCLYKESWLTGKEIEDIIEEVTVGYIRENIWSASEELLLRFQATSSGPILREEFEARKSFLHEQEENVVKIQAFWKGYKQRKEYMHRRQTFIDNTDSIVKIQSWFRMATARKSYLSRLQYFRDHNNEIVKIQSLLRANKARDDYKTLVGSENPPLTVIRKFVYLLDQSDLDFQEELEVARLREEVVTKIRANQQLEKT

SEQ ID NO: 50389 - protein, 1027 aa, Homo sapiens
MAQNTENHDPVGSILIQIHEDLYQLKEKLTKFSPEEKGETLDIQSLETAIKRTEVGLRIHIEKYLNVVNQNVLTTSVNDESLYTPQASKWLLPTVIDQKSFIFPQESEGTFWQPQRQHSSSLPVFPRAKIKVSKLIKGSNISSLTVLPSSHCTDPYFTPIPVLQADAHKGILSMIERGLIPPTARITFQNPPITPRAAPLHSFDEARKIPTVATFTIPREPPPSPAEVKFFPKKQRSKGKSRRSRGHHDRKAMKVKTPLRALKSLWDYDFLIYDGVIDNTAPDFLAFKEHFSLAWGGIFSLLEHVEKFLRNYAIPEVKIKGNNLVALLPEFELTNKLTRYDLLSVLEDPAHVQMLINLPGQRYKGQDGNSEAAMKIQATWKCYKARKFFLFYRQQKWASGVIAIAWLLYCHKTRLKKILKESRQRHLENFRIRAKHLAANWNRIRTSRRTIIHIPSLGYSQPVREHIADFNTQQNMQLGRLCDILDANVNVIYICSHHMNDELVLYYKKILSLHAAVKSGNLEDRSDLQDRFKIITPEAVNIFPKHHMCLATHLMYSPKAIKRIKNLIRGTEAYIVSGLLHRDDLAVADMLDIPILGSEPELAHLYSTKSGGKRVFDSANVAVPPGIYDIYSQQQMIEQLSQLITDHLQIQRWLFKMDSEFRGNGTAFCDIPSYLKCYKWVLKESSRYGLEDWRKKWAQEPALVKISEELAGILAQHAQPVNEKRFPTWRKFLQTFLSQGGVIEAFPPADNVTNLTVDMLIEPNGKISVLSTGDQLHAESPFISSGTTVPQTSVDPQVLTYLCLQIGKACRMRDVVGYFSIDLVTFIDPSTLEQQVWATGLNLAYSDQLALTQLTLYLTNGHLDCSLSTLEVPRFVPKERKKTKCMSALSMPMLATSRYAVMTTQLRHSNLSLVFHYVFLQICRAHGIGYDVEERQGTVFILYEHLKRHKLGMLTIGEDLQGVLMTFARHLFIIHQEISAPNMQGETNFKTTIADIETILRVTKENKMRFEEEQQSKDDKNLSKPKK

SEQ ID NO: 50390 - protein, 696 aa, Homo sapiens
MIERGLIPPTARITFQNPPITPRAAPLHSFDEARKIPTVATFTIPREPPPSPAEVKFFPKKQRSKGKSRRSRGHHDRKAMKVKTPLRALKSLWDYDFLIYDGVIDNTAPDFLAFKEHFSLAWGGIFSLLEHVEKFLRNYAIPEVKIKGNNLVALLPEFELTNKLTRYDLLSVLEDPAHVQMLINLPGQRYKGQDGNSEAAMKIQATWKCYKARKFFLFYRQQKWASGVIAIAWLLYCHKTRLKKILKESRQRHLENFRIRAKHLAANWNRIRTSRRTIIHIPSLGYSQPVREHIADFNTQQNMQLGRLCDILDANVNVIYICSHHMNDELVLYYKKILSLHAAVKSGNLEDRSDLQDRFKIITPEAVNIFPMIEQLSQLITDHLQIQRWLFKMDSEFRGNGTAFCDIPSYLKCYKWVLKESSRYGLEDWRKKWAQEPALVKISEELAGILAQHAQPVNEKRFPTWRKFLQTFLSQGGVIEAFPPADNVTNLTVDMLIEPNGKISVLSTGDQLHAESPFISSGTTVPQTSVDPQVLTYLCLQIGKACRMRDVVGYFSIDLVTFIDPSTLEQQVWATGLNLAYSDQLALTQLTLYLTNGHLDCSLSTLEVPRFVPKERKKTKCMSALSMPMLATSRYAVMTTQLRHSNLSLVFHYVFLQICRAHGIGYDVENNRRGSPGGPHDLCSPSLHHPSRNIST

SEQ ID NO: 50391 - protein, 621 aa, Homo sapiens
MTKAMKVKTPLRALKSLWDYDFLIYDGVIDNTAPDFLAFKEHFSLAWGGIFSLLEHVEKFLRNYAIPEVKIKGNNLVALLPEFELTNKLTRYDLLSVLEDPAHVQMLINLPGQRYKGQDGNSEAAMKIQATWKCYKARKFFLFYRQQKWASGVIAIAWLLYCHKTRLKKILKESRQRHLENFRIRAKHLAANWNRIRTSRRTIIHIPSLGYSQPVREHIADFNTQQNMQLGRLCDILDANVNVIYICSHHMNDELVLYYKKILSLHAAVKSGNLEDRSDLQDRFKIITPEAVNIFPMIEQLSQLITDHLQIQRWLFKMDSEFRGNGTAFCDIPSYLKCYKWVLKESSRYGLEDWRKKWAQEPALVKISEELAGILAQHAQPVNEKRFPTWRKFLQTFLSQGGVIEAFPPADNVTNLTVDMLIEPNGKISVLSTGDQLHAESPFISSGTTVPQTSVDPQVLTYLCLQIGKACRMRDVVGYFSIDLVTFIDPSTLEQQVWATGLNLAYSDQLALTQLTLYLTNGHLDCSLSTLEVPRFVPKERKKTKCMSALSMPMLATSRYAVMTTQLRHSNLSLVFHYVFLQICRAHGIGYDVENNRRGSPGGPHDLCSPSLHHPSRNIST

SEQ ID NO: 50392 - protein, 684 aa, Homo sapiens
MKVKTPLRALKSLWDYDFLIYDGVIDNTAPDFLAFKEHFSLAWGGIFSLLEHVEKFLRNYAIPEVKIKGNNLVALLPEFELTNKLTRYDLLSVLEDPAHVQMLINLPGQRYKGQDGNSEAAMKIQATWKCYKARKFFLFYRQQKWASGVIAIAWLLYCHKTRLKKILKESRQRHLENFRIRAKHLAANWNRIRTSRRTIIHIPSLGYSQPVREHIADFNTQQNMQLGRLCDILDANVNVIYICSHHMNDELVLYYKKILSLHAAVKSGNLEDRSDLQDRFKIITPEAVNIFPMIEQLSQLITDHLQIQRWLFKMDSEFRGNGTAFCDIPSYLKCYKWVLKESSRYGLEDWRKKWAQEPALVKISEELAGILAQHAQPVNEKRFPTWRKFLQTFLSQGGVIEAFPPADNVTNLTVDMLIEPNGKISVLSTGDQLHAESPFISSGTTVPQTSVDPQVLTYLCLQIGKACRMRDVVGYFSIDLVTFIDPSTLEQQVWATGLNLAYSDQLALTQLTLYLTNGHLDCSLSTLEVPRFVPKERKKTKCMSALSMPMLATSRYAVMTTQLRHSNLSLVFHYVFLQICRAHGIGYDVEERQGTVFILYEHLKRHKLGMLTIGEDLQGVLMTFARHLFIIHQEISAPNMQGETNFKTTIADIETILRVTKENKMRFEEEQQSKDDKNLSKPKK

SEQ ID NO: 50393 - protein, 168 aa, Homo sapiens
MAQNTENHDPVGSILIQIHEDLYQLKEKLTKFSPEEKGETLDIQSLETAIKRTEVGLRIHIEKYLNVVNQNVLTTSVNDESLYTPQASKWLLPTVIDQKSFIFPQESEGTFWQPQRQHSSSLPVFPRAKRKIGLNVKILQDPENIHHRAAVNANYGISLPYINQRKAC

SEQ ID NO: 50394 - protein, 112 aa, Homo sapiens
MRLEELKRLQNPLEQVNDGKYSFENHQLAMDAENNIEKYPLNLQPLESKVKIIQRAWREYLQRQEPLGKRSPSPPSVSSEKLSSSVSMNTFSDSSTPVSVMFLFLCPDLTFN

SEQ ID NO: 50395 - protein, 159 aa, Homo sapiens
MRLEELKRLQNPLEQVNDGKYSFENHQLAMDAENNIEKYPLNLQPLESKVKIIQRAWREYLQRQEPLGKRSPSPPSVSSEKLSSSVSMNTFSDSSTPFARAPVGKIHPYISWRLQSPGDKLPGGRKVILLYLDQLARPTGFIHTLKEPQIERLGFLTLQ

SEQ ID NO: 50396 - protein, 132 aa, Homo sapiens
MRLEELKRLQNPLEQVNDGKYSFENIQRAWREYLQRQEPLGKRSPSPPSVSSEKLSSSVSMNTFSDSSTPFARAPVGKIHPYISWRLQSPGDKLPGGRKVILLYLDQLARPTGFIHTLKEPQIERLGFLTLQ

SEQ ID NO: 50397 - protein, 963 aa, Homo sapiens
MDAPKAGYAFEYLIETLNDSSHKKFFDVSKLGTKYDVLPYSIRVLLEAAVRNCDGFLMKKEDVMNILDWKTKQSNVEVPFFPARVLLQDFTGIPAMVDFAAMREAVKTLGGDPEKVHPACPTDLTVDHSLQIDFSKCAIQNAPNPGGGDLQKAGKLSPVKVQPKKLPCRGQTTCRGSCDSGELGRNSGTFSSQIENTPILCPFHLQPVPEPETVLKNQEVEFGRNRERLQFFKWSSRVFKNVAVIPPGTGMAHQINLEYLSRVVFEEKDLLFPDSVVGTDSHITMVNGLGILGWGVGGIETEAVMLGLPVSLTLPEVVGCELTGSSNPFVTSIDVVLGITKHLRQVGVAGKFVEFFGSGVSQLSIVDRTTIANMCPEYGAILSFFPVDNVTLKHLEHTGFSKAKLESMETYLKAVKLFRNDQNSSGEPEYSQVIQINLNSIVPSVSGPKRPQDRVAVTDMKSDFQACLNEKVGFKGFQIAAEKQKDIVSIHYEGSEYKLSHGSVVIAAVISCTNNCNPSVMLAAGLLAKKAVEAGLRVKPYIRTSLSPGSGMVTHYLSSSGVLPYLSKLGFEIVGYGCSICVGNTAPLSDAVLNAVKQGDLVTCGILSGNKNFEGRLCDCVRANYLASPPLVVAYAIAGTVNIDFQTEPLGTDPTGKNIYLHDIWPSREEVHRVEEEHVILSMFKALKDKIEMGNKRWNSLEAPDSVLFPWDLKSTYIRCPSFFDKLTKEPIALQAIENAHVLLYLGDSVTTDHISPAGSIARNSAAAKYLTNRGLTPREFNSYGARRGNDAVMTRGTFANIKLFNKFIGKPAPKTIHFPSGQTLDVFEAAELYQKEGIPLIILAGKKYGSGNSRDWAAKGPYLLGVKAVLAESYEKIHKDHLIGIGIAPLQFLPGENADSLGLSGRETFSLTFPEELSPGITLNIQTSTGKVFSVIASFEDDVEITLYKHGGLLNFVARKFS

SEQ ID NO: 50398 - protein, 31 aa, Homo sapiens
MDYVEDKLSSEFVFNNPNIKGTCGCGESFNI

SEQ ID NO: 50399 - protein, 86 aa, Homo sapiens
MSASLVRATVRAVSKRKLQPTRAALTLTPSAVNKIKQLLKDKPEHVGVKVGVRTRGCNGLSYTLEYTKTKGDSDEEVIQDGWSAVV

SEQ ID NO: 50400 - protein, 129 aa, Homo sapiens
MSASLVRATVRAVSKRKLQPTRAALTLTPSAVNKIKQLLKDKPEHVGVKVGVRTRGCNGLSYTLEYTKTKGDSDEEVIQDGVRVFIEKKAQLTLLGTEMDYVEDKLSSEFVFNNPNIKGTCGCGESFNI

SEQ ID NO: 50401 - protein, 176 aa, Homo sapiens
MVAAGGGARTEGAVRRSLWRQCARRVHGEKLRRPTFGPRHRGAGTAKMSASLVRATVRAVSKRKLQPTRAALTLTPSAVNKIKQLLKDKPEHVGVKVGVRTRGCNGLSYTLEYTKTKGDSDEEVIQDGVRVFIEKKAQLTLLGTEMDYVEDKLSSEFVFNNPNIKGTCGCGESFNI

SEQ ID NO: 50402 - protein, 167 aa, Homo sapiens
MAAAGAFRLRRAASALLLRSPRLPARELSAPARLYHKKVVDHYENPRNVGSLDKTSKNVGTGLVGAPACGDVMKLQIQVDEKGKIVDARFKTFGCGSAIASSSLATEWVKGKTVEEALTIKNTDIAKELCLPPVKLHCSMLAEDAIKAALADYKLKQEPKKGEAEKK

SEQ ID NO: 50403 - protein, 129 aa, Homo sapiens
MVLIDMSVDLSTQVVDHYENPRNVGSLDKTSKNVGTGLVGAPACGDVMKLQIQVDEKGKIVDARFKTFGCGSAIASSSLATEWVKGKTVEEALTIKNTDIAKELCLPPVKLHCSKSVLFPAEEKTQLSP

SEQ ID NO: 50404 - protein, 142 aa, Homo sapiens
MVLIDMSVDLSTQVVDHYENPRNVGSLDKTSKNVGTGLVGAPACGDVMKLQIQVDEKGKIVDARFKTFGCGSAIASSSLATEWVKGKTVEEALTIKNTDIAKELCLPPVKLHCSMLAEDAIKAALADYKLKQEPKKGEAEKK

SEQ ID NO: 50405 - protein, 480 aa, Homo sapiens
MSFPQLGYPQYLSAAGPGAYGGERPGVLAAAAAAAAAASSGRPGAAELGGGAGAAAVTSVLGMYAAAGPYAGAPNYSAFLPYAADLSLFSQMGSQYELKDNPGVHPATFAAHTAPAYYPYGQFQYGDPGRPKNATRESTSTLKAWLNEHRKNPYPTKGEKIMLAIITKMTLTQVSTWFANARRRLKKENKVTWGARSKDQEDGALFGSDTEGDPEKAEDDEEIDLESIDIDKIDEHDGDQSNEDDEDKAEAPHAPAAPSALARDQGSPLAAADVLKPQDSPLGLAKEAPEPGSTRLLSPGAAAGGLQGAPHGKPKIWSLAETATSPDGAPKASPPPPAGHPGAHGPSAGAPLQHPAFLPSHGLYTCHIGKFSNWTNSAFLAQGSLLNMRSFLGVGAPHAAPHGPHLPAPPPPQPPVAIAPGALNGDKASVRSSPTLPERDLVPRPDSPAQQLKSPFQPVRDNSLAPQEGTPRILAALPSA

SEQ ID NO: 50406 - protein, 471 aa, Homo sapiens
MSYPQGYLYQAPGSLALYSCPAYGASALAAPRSEELARSASGSAFSPYPGSAAFTAQAATGFGSPLQYSADAAAAAAGFPSYMGAPYDAHTTGMTGAISYHPYGSAAYPYQLNDPAYRKNATRDATATLKAWLNEHRKNPYPTKGEKIMLAIITKMTLTQVSTWFANARRRLKKENKMTWAPRNKSEDEDEDEGDATRSKDESPDKAQEGTETSAEDEGISLHVDSLTDHSCSAESDGEKLPCRAGDPLCESGSECKDKYDDLEDDEDDDEEGERGLAPPKPVTSSPLTGLEAPLLSPPPEAAPRGGRKTPQGSRTSPGAPPPASKPKLWSLAEIATSDLKQPSLGPGCGPPGLPAAAAPASTGAPPGGSPYPASPLLGRPLYYTSPFYGNYTNYGNLNAALQGQGLLRYNSAAAAPGEALHTAPKAASDAGKAGAHPLESHYRSPGGGYEPKKDASEGCTVVGGGVQPYL

SEQ ID NO: 50407 - protein, 471 aa, Homo sapiens; identical to SEQ ID NO: 50406

SEQ ID NO: 50408 - protein, 501 aa, Homo sapiens
MSFPQLGYQYIRPLYPSERPGAAGGSGGSAGARGGLGAGASELNASGSLSNVLSSVYGAPYAAAAAAAAAQGYGAFLPYAAELPIFPQLGAQYELKDSPGVQHPAAAAAFPHPHPAFYPYGQYQFGDPSRPKNATRESTSTLKAWLNEHRKNPYPTKGEKIMLAIITKMTLTQVSTWFANARRRLKKENKMTWAPRSRTDEEGNAYGSEREEEDEEEDEEDGKRELELEEEELGGEEEDTGGEGLADDDEDEEIDLENLDGAATEPELSLAGAARRDGDLGLGPISDSKNSDSEDSSEGLEDRPLPVLSLAPAPPPVAVASPSLPSPPVSLDPCAPAPAPASALQKPKIWSLAETATSPDNPRRSPPGAGGSPPGAAVAPSALQLSPAAAAAAAHRLVSAPLGKFPAWTNRPFPGPPPGPRLHPLSLLGSAPPHLLGLPGAAGHPAAAAAFARPAEPEGGTDRCSALEVEKKLLKTAFQPVPRRPQNHLDAALVLSALSSS

SEQ ID NO: 50409 - protein, 519 aa, Homo sapiens
MSYPQFGYPYSSAPQFLMATNSLSTCCESGGRTLADSGPAASAQAPVYCPVYESRLLATARHELNSAAALGVYGGPYGGSQGYGNYVTYGSEASAFYSLNSFDSKDGSGSAHGGLAPAAAAYYPYEPALGQYPYDRYGTMDSGTRRKNATRETTSTLKAWLQEHRKNPYPTKGEKIMLAIITKMTLTQVSTWFANARRRLKKENKMTWPPRNKCADEKRPYAEGEEEEGGEEEAREEPLKSSKNAEPVGKEEKELELSDLDDFDPLEAEPPACELKPPFHSLDGGLERVPAAPDGPVKEASGALRMSLAAGGGAALDEDLERARSCLRSAAAGPEPLPGAEGGPQVCEAKLGFVPAGASAGLEAKPRIWSLAHTATAAAAAATSLSQTEFPSCMLKRQGPAAPAAVSSAPATSPSVALPHSGALDRHQDSPVTSLRNWVDGVFHDPILRHSTLNQAWATAKGALLDPGPLGRSLGAGANVLTAPLARAFPPAVPQDAPAAGAARELLALPKAGGKPFCA

SEQ ID NO: 50410 - protein, 519 aa, Homo sapiens; identical to SEQ ID NO: 50409

SEQ ID NO: 50411 - protein, 519 aa, Homo sapiens; identical to SEQ ID NO: 50409

SEQ ID NO: 50412 - protein, 483 aa, Homo sapiens
MSYPQGYLYQPSASLALYSCPAYSTSVISGPRTDELGRSSSGSAFSPYAGSTAFTAPSPGYNSHLQYGADPAAAAAAAFSSYVGSPYDHTPGMAGSLGYHPYAAPLGSYPYGDPAYRKNATRDATATLKAWLNEHRKNPYPTKGEKIMLAIITKMTLTQVSTWFANARRRLKKENKMTWTPRNRSEDEEEEENIDLEKNDEDEPQKPEDKGDPEGPEAGGAEQKAASGCERLQGPPTPAGKETEGSLSDSDFKEPPSEGRLDALQGPPRTGGPSPAGPAAARLAEDPAPHYPAGAPAPGPHPAAGEVPPGPGGPSVIHSPPPPPPPAVLAKPKLWSLAEIATSSDKVKDGGGGNEGSPCPPCPGPIAGQALGGSRASPAPAPSRSPSAQCPFPGGTVLSRPLYYTAPFYPGYTNYGSFGHLHGHPGPGPGPTTGPGSHFNGLNQTVLNRADALAKDPKMLRSQSQLDLCKDSPYELKKGMSDI

SEQ ID NO: 50413 - protein, 146 aa, Homo sapiens [sequence omitted]

SEQ ID NO: 50414 - protein, 165 aa, Homo sapiens
MGWDLTVKMLAGNEFQVSLSSSMSVSELKAQITQKIGVHAFQQRLAVHPSGVALQDRVPLASQGLGPGSTVLLVVDKCDEPLSILVRNNKGRSSTYEVRLTQTVAHLKQQVSGLEGVQDDLFWLTFEGKPLEDQLPLGEYGLKPLSTVFMNLRLRGGGTEPGGRS

SEQ ID NO: 50415 - protein, 349 aa, Homo sapiens
MGDMGDPPKKKRLISLCVGCGNQIHDQYILRVSPDLEWHAACLKCAECNQYLDESCTCFVRDGKTYCKRDYIRLYGIKCAKCSIGFSKNDFVMRARSKVYHIECFRCVACSRQLIPGDEFALREDGLFCRADHDVVERASLGAGDPLSPLHPARPLQMAAEPISARQPALRPHVHKQPEKTTRVRTVLNEKQLHTLRTCYAANPRPDALMKEQLVEMTGLSPRVIRVWFQNKRCKDKKRSIMMKQLQQQQPNDKTNIQGMTGTPMVAASPERHDGGLQANPVEVQSYQPPWKVLSDFALQSDIDQPAFQQLVNFSEGGPGSNSTGSEVASMSSQLPDTPNSMVASPIEA

SEQ ID NO: 50416 - protein, 326 aa, Homo sapiens
MGDMGDPPKKKRLISLCVGCGNQIHDQYILRVSPDLEWHAACLKCAECNQYLDESCTCFVRDGKTYCKRDYIRLYGIKCAKCSIGFSKNDFVMRARSKVYHIECFRCVACSRQLIPGDEFALREDGLFCRADHDVVERASLGAGDPLSPLHPARPLQMAAEPISARQPALRPHVHKQPEKTTRVRTVLNEKQLHTLRTCYAANPRPDALMKEQLVEMTGLSPRVIRVWFQNKRCKDKKRSIMMKQLQQQQPNDKTANPVEVQSYQPPWKVLSDFALQSDIDQPAFQQLVNFSEGGPGSNSTGSEVASMSSQLPDTPNSMVASPIEA

SEQ ID NO: 50417 - protein, 89 aa, Homo sapiens
MGILKLQVFLIVLSVALNHLKATPIESHQVEKRKCNTATCATQRLANFLVHSSNNFGAILSSTNVGSNTYGKRNAVEVLKREPLNYLPL

SEQ ID NO: 50418 - protein, 79 aa, Homo sapiens
MGILKLQVFLIVLSVALNHLKATPIESHQVEKRKCNTATCATQRLANFLVHSSNNFGAILSSTNVGSNTYGKRNAVEVL

SEQ ID NO: 50419 - protein, 89 aa, Homo sapiens; identical to SEQ ID NO: 50417

SEQ ID NO: 50420 - protein, 482 aa, Homo sapiens
MSGHKCYPWDLQDRYAQDKSVVNKMQQKYWETKQAFIKATGKKEDEHVVASDADLDAKLELFHSIQRTCLDLSKAIVLYQKRICFLSQEENELGKFLRSQGFQDKTRAGKMMQATGKALCFSSQQRLALRNPLCRFHQEVETFRHRAISDTWLTVNRMEQCRTEYRGALLWMKDVSQELDPDLYKQMEKFRKVQTQVRLAKKNFDKLKMDVCQKVDLLGASRCNLLSHMLATYQTTLLHFWEKTSHTMAAIHESFKGYQPYEFTTLKSLQDPMKKLVEKEEKKKINQQESTDAAVQEPSQLISLEEENQRKESSSFKTEDGKSILSALDKGSTHTACSGPIDELLDMKSEEGACLGPVAGTPEPEGADKDDLLLLSEIFNASSLEEGEFSKEWAAVFGDGQVKEPVPTMALGEPDPKAQTGSGFLPSQLLDQNMKDLQASLQEPAKAASDLTAWFSLFADLDPLSNPDAVGKTDKEHELLNA

SEQ ID NO: 50421 - protein, 257 aa, Homo sapiens
MSGHKCSYPWDLQDRYAQDKSVVNKMQQKYWETKQAFIKATGKKEDEHVVASDADLDAKLELFHSIQRTCLDLSKAIVLYQKRICFLSQEENELGKFLRSQGFQDKTRAGKMMQATGKALCFSSQQRLALRNPLCRFHQEVETFRHRAISDTWLTVNRMEQCRTEYRGALLWMKDVSQELDPDLYKQMEKFRKVQTQVRLAKKNFDKLKMDVCQKVDLLGASRCNLLSHMLATYQLAWDQWQGPRNLKVLTKMTCCC

SEQ ID NO: 50422 - protein, 483 aa, Homo sapiens
MSGHKCSYPWDLQDRYAQDKSVVNKMQQKYWETKQAFIKATGKKEDEHVVASDADLDAKLELFHSIQRTCLDLSKAIVLYQKRICFLSQEENELGKFLRSQGFQDKTRAGKMMQATGKALCFSSQQRLALRNPLCRFHQEVETFRHRAISDTWLTVNRMEQCRTEYRGALLWMKDVSQELDPDLYKQMEKFRKVQTQVRLAKKNFDKLKMDVCQKVDLLGASRCNLLSHMLATYQTTLLHFWEKTSHTMAAIHESFKGYQPYEFTTLKSLQDPMKKLVEKEEKKKINQQESTDAAVQEPSQLISLEEENQRKESSSFKTEDGKSILSALDKGSTHTACSGPIDELLDMKSEEGACLGPVAGTPEPEGADKDDLLLLSEIFNASSLEEGEFSKEWAAVFGDGQVKEPVPTMALGEPDPKAQTGSGFLPSQLLDQNMKDLQASLQEPAKAASDLTAWFSLFADLDPLSNPDAVGKTDKEHELLNA

SEQ ID NO: 50423 - protein, 483 aa, Homo sapiens; identical to SEQ ID NO: 50422

SEQ ID NO: 50424 - protein, 483 aa, Homo sapiens; identical to SEQ ID NO: 50422

SEQ ID NO: 50425 - protein, 512 aa, Homo sapiens
MSGHKCSYPWDLQDRYAQDKSVVNKMQQKYWETKQAFIKATGKKEDEHVVASDADLDAKLELFHSIQRTCLDLSKAIVLYQKRICFLSQEENELGKFLRSQGFQDKTRAGKMMQATGKALCFSSQQRLALRNPLCRFHQEVETFRHRAISDTWLTVNRMEQCRTEYRGALLWMKDVSQELDPDLYKQMEKFRKVQTQVRLAKKNFDKLKMDVCQKVDLLGASRCNLLSHMLATYQTTLLHFWEKTSHTMAAIHESFKGYQPYEFTTLKSLQDPMKKLVEKEEKKKINQQESTDAAVQEPSQYLQNICLEMKANSDIKMLQKGKEGQQIGILISLEEENQRKESSSFKTEDGKSILSALDKGSTHTACSGPIDELLDMKSEEGACLGPVAGTPEPEGADKDDLLLLSEIFNASSLEEGEFSKEWAAVFGDGQVKEPVPTMALGEPDPKAQTGSGFLPSQLLDQNMKDLQASLQEPAKAASDLTAWFSLFADLDPLSNPDAVGKTDKEHELLNA

SEQ ID NO: 50426 - protein, 134 aa, Homo sapiens
MSGHKCYPWDLQDRYAQDKSVVNKMQQKYWETKQAFIKATGKKEDEHVVASDADLDAKLELFHSIQRTCLDLSKAIVLYQKRICFLSQEENELGKFLRSQGFQDKTRAGKMMQATGKALCFSSQQRLALRNPLC

SEQ ID NO: 50427 - protein, 162 aa, Homo sapiens
MSGHKCSYPWDLQDRYAQDKSVVNKMQQKYWETKQAFIKATGKKEDEHVVASDADLDAKLELFHSIQRTCLDLSKAIVLYQKRICFLSQEENELGKFLRSQGFQDKTRAGKMMQATGKALCFSSQQRLALRNPLCRFHQEVETFRHRAISDTWLTVNRMEQC

SEQ ID NO: 50428 - protein, 221 aa, Homo sapiens
MAAARPSLGRVLPGSSVLFLCDMQEKFRHNIAYFPQIVSVAARMLKVARLLEVPVMLTEQYPQGLGPTVPELGTEGLRPLAKTCFSMVPALQQELDSRPQLRSVLLCGIEAQACILDPRSYPGLALTSLYPQNTTLDLLDRGLQVHVVVDACSSRSQVDRLVALARMRQSGAFLSTSEGLILQLVGDAVHPQFKEIQKLIKEPAPDSGLLGLFQGQNSLLH

SEQ ID NO: 50429 - protein, 205 aa, Homo sapiens
MAAARPSLGRVLPGSSVLFLCDMQEKFRHNIAYFPQIVSVAARMLKVARLLEVPVMLTEQYPQGLGPTVPELGTEGLRPLAKTCFSMVPALQQELDSRPQLRSVLLCGIEAQACILNTTLDLLDRGLQVHVVVDACSSRSQVDRLVALARMRQSGAFLSTSEGLILQLVGDAVHPQFKEIQKLIKEPAPDSGLLGLFQGQNSLLH

SEQ ID NO: 50430 - protein, 135 aa, Homo sapiens
MAAARPSLGRVLPGSSVLFLCDMQEKFRHNIAYFPQIVSVAARMLKNTTLDLLDRGLQVHVVVDACSSRSQVDRLVALARMRQSGAFLSTSEGLILQLVGDAVHPQFKEIQKLIKEPAPDSGLLGLFQGQNSLLH

SEQ ID NO: 50431 - protein, 366 aa, Homo sapiens
MAGPAWISKVSRLLGAFHNPKQVTRGFTGGVQTVTLIPGDGIGPEISAAVMKIFDAAKAPIQWEERNVTAIQGPGGKWMIPSEAKESMDKNKMGLKGPLKTPIAAGHPSMNLLLRKTFDLYANVRPCVSIEGYKTPYTDVNIVTIRENTEGEYSGIEHVIVDGVVQSIKLITEGASKRIAEFAFEYARNNHRSNVTAVHKANIMRMSDGLFLQKCREVAESCKDIKFNEMYLDTVCLNMVQDPSQFDVLVMPNLYGDILSDLCAGLIGGLGVTPSGNIGANGVAIFESVHGTAPDIAGKDMANPTALLLSAVMMLRHMGLFDHAARIEAACFATIKDGKSLTKDLGGNAKCSDFTEEICRRVKDLD

SEQ ID NO: 50432 - protein, 257 aa, Homo sapiens
MNLLLRKTFDLYANVRPCVSIEGYKTPYTDVNIVTIRENTEGEYSGIEHVIVDGVVQSIKLITEGASKRIAEFAFEYARNNHRSNVTAVHKANIMRMSDGLFLQKCREVAESCKDIKFNEMYLDTVCLNMVQDPSQFDVLVMPNLYGDILSDLCAGLIGGLGVTPSGNIGANGVAIFESVHGTAPDIAGKDMANPTALLLSAVMMLRHMGLFDHAARIEAACFATIKDGKSLTKDLGGNAKCSDFTEEICRRVKDLD

SEQ ID NO: 50433 - protein, 164 aa, Homo sapiens
MAALSGVRWLTRALVSAGNPGAWRGLSTSAAAHAASRSQAEDVRVEGSFPVTMLPGDGVGPELMHAVKEVFKAAAVPVEFQEHHLSEVQNMASEEKLEQVLSSMKENKVAIIGKIHTPMEYKGELASYDMRLRRKLDLFANVVHVKSLPGYDSAQQSRPGDHSR

SEQ ID NO: 50434 - protein, 385 aa, Homo sapiens
MAALSGVRWLTRALVSAGNPGAWRGLSTSAAAHAASRSQAEDVRVEGSFPVTMLPGDGVGPELMHAVKEVFKAAAVPVEFQEHHLSEVQNMASEEKLEQVLSSMKENKVAIIGKIHTPMEYKGELASYDMRLRRKLDLFANVVHVKSLPGYMTRHNNLDLVIIREQTEGEYSSLEHESARGVIECLKIVTRAKSQRIAKFAFDYATKKGRGKVTAVHKANIMKLGDGLFLQCCEEVAELYPKIKFETMIIDNCCMQLVQNPYQFDVLVMPNLYGNIIDNLAAGLVGGAGVVPGESYSAEYAVFETGARHPFAQAVGRNIANPTAMLLSASNMLRHLNLEYHSSMIADAVKKVIKVGKVRTRDMGGYSTTTDFIKSVIGHLQTKGS

SEQ ID NO: 50435 - protein, 383 aa, Homo sapiens
MAALSGVRWLTRALVSAGNPGAWRGLSTSAAAHAASRSQAEDVRVEGSFPVTMLPGDGVGPELMHAVKEVFKAAAVPVEFQEHHLSEVQNMASEEKLEQVLSSMKENKVAIIGKIHTPMEYKGELASYDMRLRRKLDLFANVVHVKSLPGYMTRHNNLDLVIIREQTEGEYSSLEHESARGVIECLKIVTRAKSQRIAKFAFDYATKKGRGKVTAVHKANIMKLGDGLFLQCCEEVAELYPKIKFETMIIDNCCMQLVQNPYQFDVLVMPNLYGNIIDNLAAGLVGGAGVVPGESYSAEYAVFETGARHPFAQAVGRNIANPTAMLLSASNMLRHLNLEYHSSMIADAVKKVIKVGKVRTSDMGGYATCHDFTEAVIAALPHP

SEQ ID NO: 50436 - protein, 233 aa, Homo sapiens
MKMGERWSSLFPFPVSPSCCFLLTQSARGVIECLKIVTRAKSQRIAKFAFDYATKKGRGKVTAVHKANIMKLGDGLFLQCCEEVAELYPKIKFETMIIDNCCMQLVQNPYQFDVLVMPNLYGNIIDNLAAGLVGGAGVVPGESYSAEYAVFETGARHPFAQAVGRNIANPTAMLLSASNMLRHLNLEYHSSMIADAVKKVIKVGKVRTRDMGGYSTTTDFIKSVIGHLQTKGS

SEQ ID NO: 50437 - protein, 393 aa, Homo sapiens
MALKVATVAGSAAKAVLGPALLCRPWEVLGAHEVPSRNIFSEQTIPPSAKYGGRHTVTMIPGDGIGPELMLHVKSVFRHACVPVDFEEVHVSSNADEEDIRNAIMAIRRNRVALKGNIETNHNLPPSHKSRNNILRTSLDLYANVIHCKSLPGVVTRHKDIDILIVRENTEGEYSSLEHESVAGVVESLKIITKAKSLRIAEYAFKLAQESGRKKVTAVHKANIMKLGDGLFLQCCREVAARYPQITFENMIVDNTTMQLVSRPQQFDVMVMPNLYGNIVNNVCAGLVGGPGLVAGANYGHVYAVFETATRNTGKSIANKNIANPTATLLASCMMLDHLKLHSYATSIRKAVLASMDNENMHTPDIGGQGTTSEAIQDVIRHIRVINGRAVEA

SEQ ID NO: 50438 - protein, 301 aa, Homo sapiens
MAIRRNRVALKGNIETNHNLPPSHKSRNNILRTSLDLYANVIHCKSLPGVVTRHKDIDILIVRENTEGEYSSLEHESVAGVVESLKIITKAKSLRIAEYAFKLAQESGRKKVTAVHKANIMKLGDGLFLQCCREVAARYPQITFENMIVDNTTMQLVSRPQQFDVMVMPNLYGNIVNNVCAGLVGGPGLVAGANYGHVYAVFETATRNTGKSIANKNIANPTATLLASCMMLDHLKLHSYATSIRKAVLASMDNENGLVCAEPACVLQMHTPDIGGQGTTSEAIQDVIRHIRVINGRAVEA

SEQ ID NO: 50439 - protein, 380 aa, Homo sapiens
MALKVATVAGSAAKAVLGPALLCRPWEVLGAHEVPSRNIFSEQTIPPSAKYGGRHTVTMIPGDGIGPELMLHVKSVFRHACVPVDFEEVHVSSNADEEDIRNAIMAIRRNRVALKGNIETNHNLPPSHKSRNNILRTSLDLYANVIHCKSLPGVVTRHKDIDILIVRENTEGEYSSLEHESVAGVVESLKIITKAKSLRIAEYAFKLAQESGRKKVTAVHKANIMKLGDGLFLQCCREVAARYPQITFENMIVDNTTMQLVSRPQQFDVMVMPNLYGNIVNNVCAGLVGGPGLVAGANYGHVYAVFETATRNTGKSIANKNIANPTATLLASCMMLDHLKLHSYATSIRKAVLASMDNENVRFPSHPTLLPRPVSPCSLL

SEQ ID NO: 50440 - protein, 174 aa, Homo sapiens
MYTFDQATGGTAQFEAHSDAQALVLLDVTPDQSMVDEGMAREVINRIQKLRKKCNLVPTDEITVYYKAKSEGTYLNSVIESHTEFIFTTIKAPLKPYPVSPSDKVLIQEKTQLKGSELEITLTRGSSLPGPACAYVNLNICANGSEQGEMQWIIPEIYHFWKPRWSIAPGKSKR

SEQ ID NO: 50441 - protein, 174 aa, Homo sapiens; identical to SEQ ID NO: 50440

SEQ ID NO: 50442 - protein, 1262 aa, Homo sapiens
MLQQVPENINFPAEEEKILEFWTEFNCFQECLKQSKHKPKFTFYDGPPFATGLPHYGHILAGTIKDIVTRYAHQSGFHVDRRFGWDCHGLPVEYEIDKTLGIRGPEDVAKMGITEYNNQCRAIVMRYSAEWKSTVSRLGRWIDFDNDYKTLYPQFMESVWWVFKQLYDKGLVYRGVKVMPFSTACNTPLSNFESHQNYKDVQDPSVFVTFPLEEDETVSLVAWTTTPWTLPSNLAVCVNPEMQYVKIKDVARGRLLILMEARLSALYKLESDYEILERFPGAYLKGKKYRPLFDYFLKCKENGAFTVLVDNYVKEEEGTGVVHQAPYFGAEDYRVCMDFNIIRKDSLPVCPVDASGCFTTEVTDFAGQYVKDADKSIIRTLKEQGRLLVATTFTHSYPFCWRSDTPLIYKAVPSWFVRVENMVDQLLRNNDLCYWVPELVREKRFGNWLKDARDWTISRNRYWGTPIPLWVSDDFEEVVCIGSVAELEELSGAKISDLHRESVDHLTIPSRCGKGSLHRISEVFDCWFESGSMPYAQVHYPFENKREFEDAFPADFIAEGIDQTRGWFYTLLVLATALFGQPPFKNVIVNGLVLASDGQKMSKRKKNYPDPVSIIQKYGADALRLYLINSPVVRAENLRFKEEGVRDVLKDVLLPWYNAYRFLIQNVLRLQKEEEIEFLYNENTVRESPNITDRWILSFMQSLIGFFETEMAAYRLYTVVPRLVKFVDILTNWYVRMNRRRLKGENGMEDCVMALETLFSVLLSLCRLMAPYTPFLTELMYQNLKVLIDPVSVQDKDTLSIHYLMLPRVREELIDKKTESAVSQMQSVIELGRVIRDRKTIPIKYPLKEIVVIHQDPEALKDIKSLEKYIIEELNVRKVTLSTDKNKYGIRLRAEPDHMVLGKRLKGAFKAVMTSIKQLSSEELEQFQKTGTIVVEGHELHDEDIRLMYTFDQATGGTAQFEAHSDAQALVLLDVTPDQSMVDEGMAREVINRIQKLRKKCNLVPTDEITVYYKAKSEGTYLNSVIESHTEFIFTTIKAPLKPYPVSPSDKVLIQEKTQLKGSELEITLTRGSSLPGPACAYVNLNICANGSEQGGVLLLENPKGDNRLDLLKLKSVVTSIFGVKNTELAVFHDETEIQNQTDLLSLSGKTLCVTAGSAPSLINSSSTLLCQYINLQLLNAKPQECLMGTVGTLLLENPLGQNGLTHQGLLYEAAKVFGLRSRKLKLFLNETQTQEITEDIPVKTLNMKTVYVSVLPTTADF

SEQ ID NO: 50443 - protein, 1242 aa, Homo sapiens
MLQQVPENINFPAEEEKILEFWTEFNCFQECLKQSKHKPKFTFYDGPPFATGLPHYGHILAGTIKDIVTRYAHQSGFHVDRRFGWDCHGLPVEYEIDKTLGIRGPEDVAKMGITEYNNQCRAIVMRYSAEWKSTVSRLGRWIDFDNDYKTLYPQFMESVWWVFKQLYDKGLVYRGVKVMPFSTACNTPLSNFESHQNYKDVQDPSVFVTFPLEEDETVSLVAWTTTPWTLPSNLAVCVNPEMQYVKIKDVARGRLLILMEARLSALYKLESDYEILERFPGAYLKGKKYRPLFDYFLKCKENGAFTVLVDNYVKEEEGTGVVHQAPYFGAEDYRVCMDFNIIRKDSLPVCPVDASGCFTTEVTDFAGQYVKDADKSIIRTLKEQGRLLVATTFTHSYPFCWRSDTPLIYKAVPSWFVRVENMVDQLLRNNDLCYWVPELVREKRFGNWLKDARDWTISRNRYWGTPIPLWVSDDFEEVVCIGSVAELEELSGAKISDLHRESVDHLTIPSRCGKGSLHRISEVFDCWFESGSMPYAQVHYPFENKREFEDAFPADFIAEGIDQTRGWFYTLLVLATALFGQPPFKNVIVNGLVLASDGQKMSKRKKNYPDPVSIIQKYGADALRLYLINSPVVRAENLRFKEEGVRDVLKDVLLPWYNAYRFLIQNVLRLQKEEEIEFLYNENTVRESPNITDRWILSFMQSLIGFFETEMAAYRLYTVVPRLVKFVDILTNWYVRMNRRRLKGENGMEDCVMALETLFSVLLSLCRLMAPYTPFLTELMYQNLKVLIDPVSVQDKDTLSIHYLMLPRVREELIDKKTESAVSQMQSVIELGRVIRDRKTIPIKYPLKEIVVIHQDPEALKDIKSLEKYIIEELNVRKVTLSTDKNKYGIRLRAEPDHMVLGKRLKGAFKAVMTSIKQLSSEELEQFQKTGTIVVEGHELHDEDIRLMYTFDQATGGTAQFEAHSDAQALVLLDVTPDQSMVDEGMAREVINRIQKLRKKCNLVPTDEITVYYKAKSEGTYLNSVIESHTEFIFTTIKAPLKPYPVSPSDKVLIQEKTQLKGSELEITLTRGSSLPGPACAYVNLNICANGSEQGGVLLLENPKGDNRLDLLKLKSVVTSIFGVKNTELAVFHDETEIQNQTDLLSLSGKTLCVTAGSAPSLINSSSTLLCQYINLQLLNAKPQECLMGTVGTLLLENPLGQNGLTHQGLLYEAAKVFGLRSRKLKLFLNETQTQEITEDIP

SEQ ID NO: 50444 - protein, 330 aa, Homo sapiens
MLQQVPENINFPAEEEKILEFWTEFNCFQECLKQSKHKPKFTFYDGPPFATGLPHYGHILAGTIKDIVTRYAHQSGFHVDRRFGWDCHGLPVEYEIDKTLGIRGPEDVAKMGITEYNNQCRAIVMRYSAEWKSTVSRLGRWIDFDNDYKTLYPQFMESVWWVFKQLYDKGLVYRGVKVMPFSTACNTPLSNFESHQNYKDVQDPSVFVTFPLEEDETVSLVAWTTTPWTLPSNLAVCVNPEMQYVKIKDVARGRLLILMEARLSALYKLESDYEILERFPGAYLKGKKYRPLFDYFLKCKENGAFTVLVDNYVKEEEGTGVVHQAPYFGA

SEQ ID NO: 50445 - protein, 170 aa, Homo sapiens
MAPYTPFLTELMYQNLKVLIDPVSVQDKDTLSIHYLMLPRVREELIDKKTESAVSQMQSVIELGRVIRDRKTIPIKLKGSELEITLTRGSSLPGPACAYVNLNICANGSEQGGVLLLENPKGDNRLDLLKLKSVVTSIFGVKNTELAVFHDETEIQNQTDLLSLSGKTLC

SEQ ID NO: 50446 - protein, 1262 aa, Homo sapiens; identical to SEQ ID NO: 50442

SEQ ID NO: 50447 - protein, 1152 aa, Homo sapiens
MGITEYNNQCRAIVMRYSAEWKSTVSRLGRWIDFDNDYKTLYPQFMESVWWVFKQLYDKGLVYRGVKVMPFSTACNTPLSNFESHQNYKDVQDPSVFVTFPLEEDETVSLVAWTTTPWTLPSNLAVCVNPEMQYVKIKDVARGRLLILMEARLSALYKLESDYEILERFPGAYLKGKKYRPLFDYFLKCKENGAFTVLVDNYVKEEEGTGVVHQAPYFGAEDYRVCMDFNIIRKDSLPVCPVDASGCFTTEVTDFAGQYVKDADKSIIRTLKEQGRLLVATTFTHSYPFCWRSDTPLIYKAVPSWFVRVENMVDQLLRNNDLCYWVPELVREKRFGNWLKDARDWTISRNRYWGTPIPLWVSDDFEEVVCIGSVAELEELSGAKISDLHRESVDHLTIPSRCGKGSLHRISEVFDCWFESGSMPYAQVHYPFENKREFEDAFPADFIAEGIDQTRGWFYTLLVLATALFGQPPFKNVIVNGLVLASDGQKMSKRKKNYPDPVSIIQKYGADALRLYLINSPVVRAENLRFKEEGVRDVLKDVLLPWYNAYRFLIQNVLRLQKEEEIEFLYNENTVRESPNITDRWILSFMQSLIGFFETEMAAYRLYTVVPRLVKFVDILTNWYVRMNRRRLKGENGMEDCVMALETLFSVLLSLCRLMAPYTPFLTELMYQNLKVLIDPVSVQDKDTLSIHYLMLPRVREELIDKKTESAVSQMQSVIELGRVIRDRKTIPIKYPLKEIVVIHQDPEALKDIKSLEKYIIEELNVRKVTLSTDKNKYGIRLRAEPDHMVLGKRLKGAFKAVMTSIKQLSSEELEQFQKTGTIVVEGHELHDEDIRLMYTFDQATGGTAQFEAHSDAQALVLLDVTPDQSMVDEGMAREVINRIQKLRKKCNLVPTDEITVYYKAKSEGTYLNSVIESHTEFIFTTIKAPLKPYPVSPSDKVLIQEKTQLKGSELEITLTRGSSLPGPACAYVNLNICANGSEQGGVLLLENPKGDNRLDLLKLKSVVTSIFGVKNTELAVFHDETEIQNQTDLLSLSGKTLCVTAGSAPSLINSSSTLLCQYINLQLLNAKPQECLMGTVGTLLLENPLGQNGLTHQGLLYEAAKVFGLRSRKLKLFLNETQTQEITEDIPVKTLNMKTVYVSVLPTTADF

SEQ ID NO: 50448 - protein, 249 aa, Homo sapiens
MAPYTPFLTELMYQNLKVLIDPVSVQDKDTLSIHYLMLPRVREELIDKKTESAVSQMQSVIELGRVIRDRKTIPIKYPLKEIVVIHQDPEALKDIKSLEKYIIEELNVRKVTLSTDKNKYGIRLRAEPDHMVLGKRLKGAFKAVMTSIKQLSSEELEQFQKTGTIVVEGHELHDEDIRLMYTFDQATGGTAQFEAHSDAQALVLLDVTPDQSMVDEGMAREVINRIQKLRKKCNLVPTDEITVYYKAKS

SEQ ID NO: 50449 - protein, 170 aa, Homo sapiens; identical to SEQ ID NO: 50445

SEQ ID NO: 50450 - protein, 271 aa, Homo sapiens
MMVLLLQLDCLTMDIYLRDKDTLSIHYLMLPRVREELIDKKTESAVSQMQSVIELGRVIRDRKTIPIKLKGSELEITLTRGSSLPGPACAYVNLNICANGSEQGGVLLLENPKGDNRLDLLKLKSVVTSIFGVKNTELAVFHDETEIQNQTDLLSLSGKTLCVTAGSAPSLINSSSTLLCQYINLQLLNAKPQECLMGTVGTLLLENPLGQNGLTHQGLLYEAAKVFGLRSRKLKLFLNETQTQEITEDIPVKTLNMKTVYVSVLPTTADF

SEQ ID NO: 50451 - protein, 1012 aa, Homo sapiens
MRWGLRPRGPGAAALATARSLWGTPRLPCSPGWQGATKRLLVRSVSGASNHQPNSNSGRYRDTVLLPQTSFPMKLLGRQQPDTELEIQQKCGFSELYSWQRERKVKTEFCLHDGPPYANGDPHVGHALNKILKDIANRFHMMNGSKIHFVPGWDCHGLPIEIKVLSELGREAQNLSAMEIRKKARSFAKAAIEKQKSAFIRWGIMADWNNCYYTFDGKYEAKQLRTFYQMYDKGLVYRSYKPVFWSPSSRTALAEAELEYNPEHVSRSIYVKFPLLKPSPKLASLIDGSSPVSILVWTTQPWTIPANEAVCYMPESKYAVVKCSKSGDLYVLAADKVASVASTLETTFETISTLSGVDLENGTCSHPLIPDKASPLLPANHVTMAKGTGLVHTAPAHGMEDYGVASQHNLPMDCLVDEDGVFTDVAGPELQNKAVLEEGTDVVIKMLQTAKNLLKEEKLVHSYPYDWRTKKPVVIRASKQWFINITDIKTAAKELLKKVKFIPGSALNGMVEMMDRRPYWCISRQRVWGVPIPVFHHKTKDEYLINSQTTEHIVKLVEQHGSDIWWTLPPEQLLPKEVLSEVGGPDALEYVPGQDILDIWFDSGTSWSYVLPGPDQRADLYLEGKDQLGGWFQSSLLTSVAARKRAPYKTVIVHGFTLGEKGEKMSKSLGNVIHPDVVVNGGQDQSKEPPYGADVLRWWVADSNVFTEVAIGPSVLNAARDDISKLRNTLRFLLGNVADFNPETDSIPVNDMYVIDQYMLHLLQDLANKITELYKQYDFGKVVRLLRTFYTRELSNFYFSIIKDRLYCEKENDPKRRSCQTALVEILDVIVRSFAPILPHLAEEVFQHIPYIKEPKSVFRTGWISTSSIWKKPGLEEAVESACAMRDSFLGSIPGKNAAEYKVITVIEPGLLFEIIEMLQSEETSSTSQLNELMMASESTLLAQEPREMTADVIELKGKFLINLEGGDIREESSYKVIVMPTTKEKCPRCWKYTAESSDTLCPRCAEVVSGK

SEQ ID NO: 50452 - protein, 940 aa, Homo sapiens
MKLLGRQQPDTELEIQQKCGFSELYSWQRERKVKTEFCLHDGPPYANGDPHVGHALNKILKDIANRFHMMNGSKIHFVPGWDCHGLPIEIKVLSELGREAQNLSAMEIRKKARSFAKAAIEKQKSAFIRWGIMADWNNCYYTFDGKYEAKQLRTFYQMYDKGLVYRSYKPVFWSPSSRTALAEAELEYNPEHVSRSIYVKFPLLKPSPKLASLIDGSSPVSILVWTTQPWTIPANEAVCYMPESKYAVVKCSKSGDLYVLAADKVASVASTLETTFETISTLSGVDLENGTCSHPLIPDKASPLLPANHVTMAKGTGLVHTAPAHGMEDYGVASQHNLPMDCLVDEDGVFTDVAGPELQNKAVLEEGTDVVIKMLQTAKNLLKEEKLVHSYPYDWRTKKPVVIRASKQWFINITDIKTAAKELLKKVKFIPGSALNGMVEMMDRRPYWCISRQRVWGVPIPVFHHKTKDEYLINSQTTEHIVKLVEQHGSDIWWTLPPEQLLPKEVLSEVGGPDALEYVPGQDILDIWFDSGTSWSYVLPGPDQRADLYLEGKDQLGGWFQSSLLTSVAARKRAPYKTVIVHGFTLGEKGEKMSKSLGNVIHPDVVVNGGQDQSKEPPYGADVLRWWVADSNVFTEVAIGPSVLNAARDDISKLRNTLRFLLGNVADFNPETDSIPVNDMYVIDQYMLHLLQDLANKITELYKQYDFGKVVRLLRTFYTRELSNFYFSIIKDRLYCEKENDPKRRSCQTALVEILDVIVRSFAPILPHLAEEVFQHIPYIKEPKSVFRTGWISTSSIWKKPGLEEAVESACAMRDSFLGSIPGKNAAEYKVITVIEPGLLFEIIEMLQSEETSSTSQLNELMMASESTLLAQEPREMTADVIELKGKFLINLEGGDIREESSYKVIVMPTTKEKCPRCWKYTAESSDTLCPRCAEVVSGK

SEQ ID NO: 50453 - protein, 284 aa, Homo sapiens
MAGCAARAPPGSEARLSLATFLLGASVLALPLLTRAGLQGRTGLALYVAGLNALLLLLYRPPRYQIAIRACFLGFVFGCGTLLSFSQSSWSHFGWYMCSLSLFHYSEYLVTAVNNPKSLSLDSFLLNHSLEYTVAALSSWLEFTLENIFWPELKQITWLSVTGLLMVVFGECLRKAAMFTAGSNFNHVVQNEKSDTHTLVTSGVYAWFRHPSYVGWFYWSIGTQVMLCNPICGVSYALTVWRFFRDRTEEEEISLIHFFGEEYLEYKKRVPTGLPFIKGVKVDL

SEQ ID NO: 50454 - protein, 116 aa, Homo sapiens
MAGCAARAPPGSEARLSLATFLLGASVLALPLLTRAGLQGRTGLALYVAGLNALLLLLYRPPRYQIAIRACFLGFVFGCGTLLSFSQSSWSHFGWSHLVHPHSHCRIFPYTMISVP

SEQ ID NO: 50455 - protein, 188 aa, Homo sapiens
MCSLSLFHYSEYLVTAVNNPKSLSLDSFLLNHSLEYTVAALSSWLEFTLENIFWPELKQITWLSVTGLLMVVFGECLRKAAMFTAGSNFNHVVQNEKSDTHTLVTSGVYAWFRHPSYVGWFYWSIGTQVMLCNPICGVSYALTVWRFFRDRTEEEEISLIHFFGEEYLEYKKRVPTGLPFIKGVKVDL

SEQ ID NO: 50456 - protein, 423 aa, Homo sapiens
MATATRLLGWRVASWRLRPPLAGFVSQRAHSLLPVDDAINGLSEEQRQLRQTMAKFLQEHLAPKAQEIDRSNEFKNLREFWKQLGNLGVLGITAPVQYGGSGLGYLEHVLVMEEISRASGAVGLSYGAHSNLCINQLVRNGNEAQKEKYLPKLISGEYIGALAMSEPNAGSDVVSMKLKAEKKGNHYILNGNKFWITNGPDADVLIVYAKTDLAAVPASRGITAFIVEKGMPGFSTSKKLDKLGMRGSNTCELIFEDCKIPAANILGHENKGVYVLMSGLDLERLVLAGGPLGLMQAVLDHTIPYLHVREAFGQKIGHFQLMQGKMADMYTRLMACRQYVYNVAKACDEGHCTAKDCAGVILYSAECATQVALDGIQCFGGNGYINDFPMGRFLRDAKLYEIGAGTSEVRRLVIGRAFNADFH

SEQ ID NO: 50457 - protein, 396 aa, Homo sapiens
MAEMATATRLLGWRVASWRLRPPLAGFVSQRAHSLLPVDDAINGLSEEQRQEFWKQLGNLGVLGITAPVQYGGSGLGYLEHVLVMEEISRASGAVGLSYGAHSNLCINQLVRNGNEAQKEKYLPKLISGEYIGALAMSEPNAGSDVVSMKLKAEKKGNHYILNGNKFWITNGPDADVLIVYAKTDLAAVPASRGITAFIVEKGMPGFSTSKKLDKLGMRGSNTCELIFEDCKIPAANILGHENKGVYVLMSGLDLERLVLAGGPLGLMQAVLDHTIPYLHVREAFGQKIGHFQLMQGKMADMYTRLMACRQYVYNVAKACDEGHCTAKDCAGVILYSAECATQVALDGIQCFGGNGYINDFPMGRFLRDAKLYEIGAGTSEVRRLVIGRAFNADFH

SEQ ID NO: 50458 - protein, 426 aa, Homo sapiens
MAEMATATRLLGWRVASWRLRPPLAGFVSQRAHSLLPVDDAINGLSEEQRQLRQTMAKFLQEHLAPKAQEIDRSNEFKNLREFWKQLGNLGVLGITAPVQYGGSGLGYLEHVLVMEEISRASGAVGLSYGAHSNLCINQLVRNGNEAQKEKYLPKLISGEYIGALAMSEPNAGSDVVSMKLKAEKKGNHYILNGNKFWITNGPDADVLIVYAKTDLAAVPASRGITAFIVEKGMPGFSTSKKLDKLGMRGSNTCELIFEDCKIPAANILGHENKGVYVLMSGLDLERLVLAGGPLGLMQAVLDHTIPYLHVREAFGQKIGHFQLMQGKMADMYTRLMACRQYVYNVAKACDEGHCTAKDCAGVILYSAECATQVALDGIQCFGGNGYINDFPMGRFLRDAKLYEIGAGTSEVRRLVIGRAFNADFH

SEQ ID NO: 50459 - protein, 571 aa, Homo sapiens
MRALRDRAGLLLCVLLLAALLEAALGLPVKKPRLRGPRPGSLTRLAEVSASPDPRPLKEEEEAPLLPRTHLQAEPHQHGCWTVTEPAAMTPGNATPPRTPEVTPLRLELQKLPGLANTTLSTPNPDTQASASPDPRPLREEEEARLLPRTHLQAELHQHGCWTVTEPAALTPGNATPPRTQEVTPLLLELQKLPELVHATLSTPNPDNQVTIKVVEDPQAEVSIDLLAEPSNPPPQDTLSWLPALWSFLWGDYKGEEKDRAPGEKGEEKEEDEDYPSEDIEGEDQEDKEEDEEEQALWFNGTTDNWDQGWLAPGDWVFKDSVSYDYEPQKEWSPWSPCSGNCSTGKQQRTRPCGYGCTATETRTCDLPSCPGTEDKDTLGLPSEEWKLLARNATDMHDQDVDSCEKWLNCKSDFLIKYLSQMLRDLPSCPCAYPLEAMDSPVSLQDEHQGRSFRWRDASGPRERLDIYQPTARFCLRSMLSGESSTLAAQHCCYDEDSRLLTRGKGAGMPNLISTDFSPKLHFKFDTTPWILCKGDWSRLHAVLPPNNGRACTDNPLEEEYLAQLQEAKEY

SEQ ID NO: 50460 - protein, 483 aa, Homo sapiens
MTPGNATPPRTPEVTPLRLELQKLPGLANTTLSTPNPDTQASASPDPRPLREEEEARLLPRTHLQAELHQHGCWTVTEPAALTPGNATPPRTQEVTPLLLELQKLPELVHATLSTPNPDNQVTIKVVEDPQAEVSIDLLAEPSNPPPQDTLSWLPALWSFLWGDYKGEEKDRAPGEKGEEKEEDEDYPSEDIEGEDQEDKEEDEEEQALWFNGTTDNWDQGWLAPGDWVFKDSVSYDYEPQKEWSPWSPCSGNCSTGKQQRTRPCGYGCTATETRTCDLPSCPGTEDKDTLGLPSEEWKLLARNATDMHDQDVDSCEKWLNCKSDFLIKYLSQMLRDLPSCPCAYPLEAMDSPVSLQDEHQGRSFRWRDASGPRERLDIYQPTARFCLRSMLSGESSTLAAQHCCYDEDSRLLTRGKGAGMPNLISTDFSPKLHFKFDTTPWILCKGDWSRLHAVLPPNNGRACTDNPLEEEYLAQLQEAKEY

SEQ ID NO: 50461 - protein, 490 aa, Homo sapiens
MRALRDRAGLLLCVLLLAALLEAALGLPVKKPRLRGPRPGSLTRLAEVSASPDPRPLKEEEEAPLLPRTHLQAEPHQHGCWTVTEPAAMTPGNATPPRTPEVTPLRLELQKLPGLANTTLSTPNPDTQVTIKVVEDPQAEVSIDLLAEPSNPPPQDTLSWLPALWSFLWGDYKGEEKDRAPGEKGEEKEEDEDYPSEDIEGEDQEDKEEDEEEQALWFNGTTDNWDQGWLAPGDWVFKDSVSYDYEPQKEWSPWSPCSGNCSTGKQQRTRPCGYGCTATETRTCDLPSCPGTEDKDTLGLPSEEWKLLARNATDMHDQDVDSCEKWLNCKSDFLIKYLSQMLRDLPSCPCAYPLEAMDSPVSLQDEHQGRSFRWRDASGPRERLDIYQPTARFCLRSMLSGESSTLAAQHCCYDEDSRLLTRGKGAGMPNLISTDFSPKLHFKFDTTPWILCKGDWSRLHAVLPPNNGRACTDNPLEEEYLAQLQEAKEY

SEQ ID NO: 50462 - protein, 490 aa, Homo sapiens
MRALRDRAGLLLCVLLLAALLEAALGLPVKKPRLRGPRPGSLTRLAEASASPDPRPLREEEEARLLPRTHLQAELHQHGCWTVTEPAALTPGNATPPRTQEVTPLLLELQKLPELVHATLSTPNPDNQVTIKVVEDPQAEVSIDLLAEPSNPPPQDTLSWLPALWSFLWGDYKGEEKDRAPGEKGEEKEEDEDYPSEDIEGEDQEDKEEDEEEQALWFNGTTDNWDQGWLAPGDWVFKDSVSYDYEPQKEWSPWSPCSGNCSTGKQQRTRPCGYGCTATETRTCDLPSCPGTEDKDTLGLPSEEWKLLARNATDMHDQDVDSCEKWLNCKSDFLIKYLSQMLRDLPSCPCAYPLEAMDSPVSLQDEHQGRSFRWRDASGPRERLDIYQPTARFCLRSMLSGESSTLAAQHCCYDEDSRLLTRGKGAGMPNLISTDFSPKLHFKFDTTPWILCKGDWSRLHAVLPPNNGRACTDNPLEEEYLAQLQEAKEY

SEQ ID NO: 50463 - protein, 292 aa, Homo sapiens
MRALRDRAGLLLCVLLLAALLEAALGLPVKKPRLRGPRPGSLTRLAEVSASPDPRPLKEEEEAPLLPRTHLQAEPHQHGCWTVTEPAAMTPGNATPPRTPEVTPLRLELQKLPGLANTTLSTPNPDTQASASPDPRPLREEEEARLLPRTHLQAELHQHGCWTVTEPAALTPGNATPPRTQEVTPLLLELQKLPELVHATLSTPNPDNQTMSLRRSGVPGLPAVGTAALASSRGLGPVAMAALPPRPVPVTCPPVLALRTRTPWASPVRSGSSWPAMLRTCMIKMWTAVRSG

SEQ ID NO: 50464 - protein, 307 aa, Homo sapiens
MARNAEKAMTALARFRQAQLEEGKVKERRPFLASECTELPKAEKWRRQIIGEISKKVAQIQNAGLGEFRIRDLNDEINKLLREKGHWEVRIKELGGPDYGKVGPKMLDHEGKEVPGNRGYKYFGAAKDLPGVRELFEKERQVRWLMPVIPALWEAEAGGSQALPPPRKTRAELMKAIDFEYYGYLDEDDGVIVPLEQEYEKKLRAELVEKWKAEREARLARGEKEEEEEEEEEINIYAVTEEESDEEGSQEKGGDDSQQKFIAHVPVPSQQEIEEALVRRKKMELLQKYASETLQAQSEEARRLLGY

SEQ ID NO: 50465 - protein, 285 aa, Homo sapiens
MARNAEKAMTALARFRQAQLEEGKVKERRPFLASECTELPKAEKWRRQIIGEISKKVAQIQNAGLGEFRIRDLNDEINKLLREKGHWEVRIKELGGPDYGKVGPKMLDHEGKEVPGNRGYKYFGAAKDLPGVRELFEKEPLPPPRKTRAELMKAIDFEYYGYLDEDDGVIVPLEQEYEKKLRAELVEKWKAEREARLARGEKEEEEEEEEEINIYAVTEEESDEEGSQEKGGDDSQQKFIAHVPVPSQQEIEEALVRRKKMELLQKYASETLQAQSEEARRLLGY

SEQ ID NO: 50466 - protein, 903 aa, Homo sapiens
MSDSGSQLGSMGSLTMKSQLQITVISAKLKENKKNWFGPSPYVEVTVDGQSKKTEKCNNTNSPKWKQPLTVIVTPVSKLHFRVWSHQTLKSDVLLGTAALDIYETLKSNNMKLEEVVVTLQLGGDKEPTETIGDLSICLDGLQLESEVVTNGETTCSENGVSLCLPRLECNSAISAHCNLCLPGLSDSPISASRVAGFTGASQNDDGSRSKDETRVSTNGSDDPEDAGAGENRRVSGNNSPSLSNGGFKPSRPPRPSRPPPPTPRRPASVNGSPSATSESDGSSTGSLPPTNTNTNTSEGATSGLIIPLTISGGSGPRPLNPVTQAPLPPGWEQRVDQHGRVYYVDHVEKRTTWDRPEPLPPGWERRVDNMGRIYYVDHFTRTTTWQRPTLESVRNYEQWQLQRSQLQGAMQQFNQRFIYGNQDLFATSQSKEFDPLGPLPPGWEKRTDSNGRVYFVNHNTRITQWEDPRSQGQLNEKPLPEGWEMRFTVDGIPYFVDHNRRTTTYIDPRTGKSALDNGPQIAYVRDFKAKVQYFRFWCQQLAMPQHIKITVTRKTLFEDSFQQIMSFSPQDLRRRLWVIFPGEEGLDYGGVAREWFFLLSHEVLNPMYCLFEYAGKDNYCLQINPASYINPDHLKYFRFIGRFIAMALFHGKFIDTGFSLPFYKRILNKPVGLKDLESIDPEFYNSLIWVKENNIEECDLEMYFSVDKEILGEIKSHDLKPNGGNILVTEENKEEYIRMVAEWRLSRGVEEQTQAFFEGFNEILPQQYLQYFDAKELEVLLCGMQEIDLNDWQRHAIYRHYARTSKQIMWFWQFVKEIDNEKRMRLLQFVTGTCRLPVGGFADLMGSNGPQKFCIEKVGKENWLPRSHTCFNRLDLPPYKSYEQLKEKLLFAIEETEGFGQE

SEQ ID NO: 50467 - protein, 862 aa, Homo sapiens
MSDSGSQLGSMGSLTMKSQLQITVISAKLKENKKNWFGPSPYVEVTVDGQSKKTEKCNNTNSPKWKQPLTVIVTPVSKLHFRVWSHQTLKSDVLLGTAALDIYETLKSNNMKLEEVVVTLQLGGDKEPTETIGDLSICLDGLQLESEVVTNGETTCSESASQNDDGSRSKDETRVSTNGSDDPEDAGAGENRRVSGNNSPSLSNGGFKPSRPPRPSRPPPPTPRRPASVNGSPSATSESDGSSTGSLPPTNTNTNTSEGATSGLIIPLTISGGSGPRPLNPVTQAPLPPGWEQRVDQHGRVYYVDHVEKRTTWDRPEPLPPGWERRVDNMGRIYYVDHFTRTTTWQRPTLESVRNYEQWQLQRSQLQGAMQQFNQRFIYGNQDLFATSQSKEFDPLGPLPPGWEKRTDSNGRVYFVNHNTRITQWEDPRSQGQLNEKPLPEGWEMRFTVDGIPYFVDHNRRTTTYIDPRTGKSALDNGPQIAYVRDFKAKVQYFRFWCQQLAMPQHIKITVTRKTLFEDSFQQIMSFSPQDLRRRLWVIFPGEEGLDYGGVAREWFFLLSHEVLNPMYCLFEYAGKDNYCLQINPASYINPDHLKYFRFIGRFIAMALFHGKFIDTGFSLPFYKRILNKPVGLKDLESIDPEFYNSLIWVKENNIEECDLEMYFSVDKEILGEIKSHDLKPNGGNILVTEENKEEYIRMVAEWRLSRGVEEQTQAFFEGFNEILPQQYLQYFDAKELEVLLCGMQEIDLNDWQRHAIYRHYARTSKQIMWFWQFVKEIDNEKRMRLLQFVTGTCRLPVGGFADLMGSNGPQKFCIEKVGKENWLPRSHTCFNRLDLPPYKSYEQLKEKLLFAIEETEGFGQE

SEQ ID NO: 50468 - protein, 752 aa, Homo sapiens
MKLEEVVVTLQLGGDKEPTETIGDLSICLDGLQLESEVVTNGETTCSESASQNDDGSRSKDETRVSTNGSDDPEDAGAGENRRVSGNNSPSLSNGGFKPSRPPRPSRPPPPTPRRPASVNGSPSATSESDGSSTGSLPPTNTNTNTSEGATSGLIIPLTISGGSGPRPLNPVTQAPLPPGWEQRVDQHGRVYYVDHVEKRTTWDRPEPLPPGWERRVDNMGRIYYVDHFTRTTTWQRPTLESVRNYEQWQLQRSQLQGAMQQFNQRFIYGNQDLFATSQSKEFDPLGPLPPGWEKRTDSNGRVYFVNHNTRITQWEDPRSQGQLNEKPLPEGWEMRFTVDGIPYFVDHNRRTTTYIDPRTGKSALDNGPQIAYVRDFKAKVQYFRFWCQQLAMPQHIKITVTRKTLFEDSFQQIMSFSPQDLRRRLWVIFPGEEGLDYGGVAREWFFLLSHEVLNPMYCLFEYAGKDNYCLQINPASYINPDHLKYFRFIGRFIAMALFHGKFIDTGFSLPFYKRILNKPVGLKDLESIDPEFYNSLIWVKENNIEECDLEMYFSVDKEILGEIKSHDLKPNGGNILVTEENKEEYIRMVAEWRLSRGVEEQTQAFFEGFNEILPQQYLQYFDAKELEVLLCGMQEIDLNDWQRHAIYRHYARTSKQIMWFWQFVKEIDNEKRMRLLQFVTGTCRLPVGGFADLMGSNGPQKFCIEKVGKENWLPRSHTCFNRLDLPPYKSYEQLKEKLLFAIEETEGFGQE

SEQ ID NO: 50469 - protein, 1238 aa, Homo sapiens
MRAQGRGRLPRRLLLLLALWVQAARPMGYFELQLSALRNVNGELLSGACCDGDGRTTRAGGCGHDECDTYVRVCLKEYQAKVTPTGPCSYGHGATPVLGGNSFYLPPAGAAGDRARARARAGGDQDPGLVVIPFQFAWPRSFTLIVEAWDWDNDTTPNEELLIERVSHAGMINPEDRWKSLHFSGHVAHLELQIRVRCDENYYSATCNKFCRPRNDFFGHYTCDQYGNKACMDGWMGKECKEAVCKQGCNLLHGGCTVPGECRCSYGWQGRFCDECVPYPGCVHGSCVEPWQCNCETNWGGLLCDKDLNYCGSHHPCTNGGTCINAEPDQYRCTCPDGYSGRNCEKAEHACTSNPCANGGSCHEVPSGFECHCPSGWSGPTCALDIDECASNPCAAGGTCVDQVDGFECICPEQWVGATCQLDANECEGKPCLNAFSCKNLIGGYYCDCIPGWKGINCHINVNDCRGQCQHGGTCKDLVNGYQCVCPRGFGGRHCELERDECASSPCHSGGLCEDLADGFHCHCPQGFSGPLCEVDVDLCEPSPCRNGARCYNLEGDYYCACPDDFGGKNCSVPREPCPGGACRVIDGCGSDAGPGMPGTAASGVCGPHGRCVSQPGGNFSCICDSGFTGTYCHENIDDCLGQPCRNGGTCIDEVDAFRCFCPSGWEGELCDTNPNDCLPDPCHSRGRCYDLVNDFYCACDDGWKGKTCHSREFQCDAYTCSNGGTCYDSGDTFRCACPPGWKGSTCAVAKNSSCLPNPCVNGGTCVGSGASFSCICRDGWEGRTCTHNTNDCNPLPCYNGGICVDGVNWFRCECAPGFAGPDCRINIDECQSSPCAYGATCVDEINGYRCSCPPGRAGPRCQEVIGFGRSCWSRGTPFPHGSSWVEDCNSCRCLDGRRDCSKVWCGWKPCLLAGQPEALSAQCPLGQRCLEKAPGQCLRPPCEAWGECGAEEPPSTPCLPRSGHLDNNCARLTLHFNRDHVPQGTTVGAICSGIRSLPATRAVARDRLLVLLCDRASSGASAVEVAVSFSPARDLPDSSLIQGAAHAIVAAITQRGNSSLLLAVTEVKVETVVTGGSSTGLLVPVLCGAFSVLWLACVVLCVWWTRKRRKERERSRLPREESANNQWAPLNPIRNPIERPGGHKDVLYQCKNFTPPPRRADEALPGPAGHAAVREDEEDEDLGRGEEDSLEAEKFLSHKFTKDPGRSPGRPAHWASGPKVDNRAVRSINEARYAGKE

SEQ ID NO: 50470 - protein, 1200 aa, Homo sapiens
MRAQGRGRLPRRLLLLLALWVQAARPMGYFELQLSALRNVNGELLSGACCDGDGRTTRAGGCGHDECDTYVRVCLKEYQAKVTPTGPCSYGHGATPVLGGNSFYLPPAGAAGDRARARARAGGDQDPGLVVIPFQFAWPRSFTLIVEAWDWDNDTTPNEELLIERVSHAGMINPEDRWKSLHFSGHVAHLELQIRVRCDENYYSATCNKFCRPRNDFFGHYTCDQYGNKACMDGWMGKECKEAVCKQGCNLLHGGCTVPGECRCSYGWQGRFCDECVPYPGCVHGSCVEPWQCNCETNWGGLLCDKDLNYCGSHHPCTNGGTCINAEPDQYRCTCPDGYSGRNCEKAEHACTSNPCANGGSCHEVPSGFECHCPSGWSGPTCALDIDECASNPCAAGGTCVDQVDGFECICPEQWVGATCQLDVNDCRGQCQHGGTCKDLVNGYQCVCPRGFGGRHCELERDECASSPCHSGGLCEDLADGFHCHCPQGFSGPLCEVDVDLCEPSPCRNGARCYNLEGDYYCACPDDFGGKNCSVPREPCPGGACRVIDGCGSDAGPGMPGTAASGVCGPHGRCVSQPGGNFSCICDSGFTGTYCHENIDDCLGQPCRNGGTCIDEVDAFRCFCPSGWEGELCDTNPNDCLPDPCHSRGRCYDLVNDFYCACDDGWKGKTCHSREFQCDAYTCSNGGTCYDSGDTFRCACPPGWKGSTCAVAKNSSCLPNPCVNGGTCVGSGASFSCICRDGWEGRTCTHNTNDCNPLPCYNGGICVDGVNWFRCECAPGFAGPDCRINIDECQSSPCAYGATCVDEINGYRCSCPPGRAGPRCQEVIGFGRSCWSRGTPFPHGSSWVEDCNSCRCLDGRRDCSKVWCGWKPCLLAGQPEALSAQCPLGQRCLEKAPGQCLRPPCEAWGECGAEEPPSTPCLPRSGHLDNNCARLTLHFNRDHVPQGTTVGAICSGIRSLPATRAVARDRLLVLLCDRASSGASAVEVAVSFSPARDLPDSSLIQGAAHAIVAAITQRGNSSLLLAVTEVKVETVVTGGSSTGLLVPVLCGAFSVLWLACVVLCVWWTRKRRKERERSRLPREESANNQWAPLNPIRNPIERPGGHKDVLYQCKNFTPPPRRADEALPGPAGHAAVREDEEDEDLGRGEEDSLEAEKFLSHKFTKDPGRSPGRPAHWASGPKVDNRAVRSINEARYAGKE

SEQ ID NO: 50471 - protein, 1154 aa, Homo sapiens
MQYLNIKEDCNAMAFCAKMRSSKKTEVNLEAPEPGVEVIFYLSDREPLRLGSGEYTAEELCIRAAQACRISPLCHNLFALYDENTKLWYAPNRTITVDDKMSLRLHYRMRFYFTNWHGTNDNEQSVWRHSPKKQKNGYEKKKIPDATPLLDASSLEYLFAQGQYDLVKCLAPIRDPKTEQDGHDIENECLGMAVLAISHYAMMKKMQLPELPKDISYKRYIPETLNKSIRQRNLLTRMRINNVFKDFLKEFNNKTICDSSVSTHDLKVKYLATLETLTKHYGAEIFETSMLLISSENEMNWFHSNDGGNVLYYEVMVTGNLGIQWRHKPNVVSVEKEKNKLKRKKLENKHKKDEEKNKIREEWNNFSYFPEITHIVIKESVVSINKQDNKKMELKLSSHEEALSFVSLVDGYFRLTADAHHYLCTDVAPPLIVHNIQNGCHGPICTEYAINKLRQEGSEEGMYVLRWSCTDFDNILMTVTCFEKSEQVQGAQKQFKNFQIEVQKGRYSLHGSDRSFPSLGDLMSHLKKQILRTDNISFMLKRCCQPKPREISNLLVATKKAQEWQPVYPMSQLSFDRILKKDLVQGEHLGRGTRTHIYSGTLMDYKDDEGTSEEKKIKVILKVLDPSHRDISLAFFEAASMMRQVSHKHIVYLYGVCVRDVENIMVEEFVEGGPLDLFMHRKSDVLTTPWKFKVAKQLASALSYLEDKDLVHGNVCTKNLLLAREGIDSECGPFIKLSDPGIPITVLSRQECIERIPWIAPECVEDSKNLSVAADKWSFGTTLWEICYNGEIPLKDKTLIEKERFYESRCRPVTPSCKELADLMTRCMNYDPNQRPFFRAIMRDINKLEEQNPDIVSEKKPATEVDPTHFEKRFLKRIRDLGEGHFGKVELCRYDPEGDNTGEQVAVKSLKPESGGNHIADLKKEIEILRNLYHENIVKYKGICTEDGGNGIKLIMEFLPSGSLKEYLPKNKNKINLKQQLKYAVQICKGMDYLGSRQYVHRDLAARNVLVESEHQVKIGDFGLTKAIETDKEYYTVKDDRDSPVFWYAPECLMQSKFYIASDVWSFGVTLHELLTYCDSDSSPMALFLKMIGPTHGQMTVTRLVNTLKEGKRLPCPPNCPDEVYQLMRKCWEFQPSNRTSFQNLIEGFEALLK

SEQ ID NO: 50472 - protein, 619 aa, Homo sapiens
MAPPSEETPLIPQRSCSLLSTEAGALHVLLPARGPGPPQRLSFSFGDHLAEDLCVQAAKASGILPVYHSLFALATEDLSCWFPPSHIFSVEDASTQVLLYRIRFYFPNWFGLEKCHRFGLRKDLASAILDLPVLEHLFAQHRSDLVSGRLPVGLSLKEQGECLSLAVLDLARMAREQAQRPGELLKTVSYKACLPPSLRDLIQGLSFVTRRRIRRTVRRALRRVAACQADRHSLMAKYIMDLERLDPAGAAETFHVGLPGALGGHDGLGLLRVAGDGGIAWTQGEQEVLQPFCDFPEIVDISIKQAPRVGPAGEHRLVTVTRTDNQILEAEFPGLPEALSFVALVDGYFRLTTDSQHFFCKEVAPPRLLEEVAEQCHGPITLDFAINKLKTGGSRPGSYVLRRSPQDFDSFLLTVCVQNPLGPDYKGCLIRRSPTGTFLLVGLSRPHSSLRELLATCWDGGLHVDGVAVTLTSCCIPRPKEKSNLIVVQRGHSPPTSSLVQPQSQYQLSQMTFHKIPADSLEWHENLGHGSFTKIYRGCRHEVVDGEARKTEVLLKVMDAKHKNCMESFLEAASLMSQVSYRHLVLLHGVCMAGDSESPPPTHPTPASPKSRLFFPPLF

SEQ ID NO: 50473 - protein, 1124 aa, Homo sapiens
MAPPSEETPLIPQRSCSLLSTEAGALHVLLPARGPGPPQRLSFSFGDHLAEDLCVQAAKASGILPVYHSLFALATEDLSCWFPPSHIFSVEDASTQVLLYRIRFYFPNWFGLEKCHRFGLRKDLASAILDLPVLEHLFAQHRSDLVSGRLPVGLSLKEQGECLSLAVLDLARMAREQAQRPGELLKTVSYKACLPPSLRDLIQGLSFVTRRRIRRTVRRALRRVAACQADRHSLMAKYIMDLERLDPAGAAETFHVGLPGALGGHDGLGLLRVAGDGGIAWTQGEQEVLQPFCDFPEIVDISIKQAPRVGPAGEHRLVTVTRTDNQILEAEFPGLPEALSFVALVDGYFRLTTDSQHFFCKEVAPPRLLEEVAEQCHGPITLDFAINKLKTGGSRPGSYVLRRSPQDFDSFLLTVCVQNPLGPDYKGCLIRRSPTGTFLLVGLSRPHSSLRELLATCWDGGLHVDGVAVTLTSCCIPRPKEKSNLIVVQRGHSPPTSSLVQPQSQYQLSQMTFHKIPADSLEWHENLGHGSFTKIYRGCRHEVVDGEARKTEVLLKVMDAKHKNCMESFLEAASLMSQVSYRHLVLLHGVCMAGDSTMVQEFVHLGAIDMYLRKRGHLVPASWKLQVVKQLAYALNYLEDKGLPHGNVSARKVLLAREGADGSPPFIKLSDPGVSPAVLSLEMLTDRIPWVAPECLREAQTLSLEADKWGFGATVWEVFSGVTMPISALDPAKKLQFYEDRQQLPAPKWTELALLIQQCMAYEPVQRPSFRAVIRDLNSLISSDYELLSDPTPGALAPRDGLWNGAQLYACQDPTIFEERHLKYISQLGKGNFGSVELCRYDPLGDNTGALVAVKQLQHSGPDQQRDFQREIQILKALHSDFIVKYRGVSYGPGRQSLRLVMEYLPSGCLRDFLQRHRARLDASRLLLYSSQICKGMEYLGSRRCVHRDLAARNILVESEAHVKIADFGLAKLLPLDKDYYVVREPGQSPIFWYAPESLSDNIFSRQSDVWSFGVVLYELFTYCDKSCSPSAEFLRMMGCERDVPALCRLLELLEEGQRLPAPPACPAEVHELMKLCWAPSPQDRPSFSALGPQLDMLWSGSRGCETHAFTAHPEGKHHSLSFS

SEQ ID NO: 50474 - protein, 1124 aa, Homo sapiens; identical to SEQ ID NO: 50473

SEQ ID NO: 50475 - protein, 1094 aa, Homo sapiens
MAPPSEETPLIPQRSCSLLSTEAGALHVLLPARGPGPPQRLSFSFGDHLAEDLCVQAAKASGILPVYHSLFALATEDLSCWFPPSHIFSVEDASTQVLLYRIRFYFPNWFGLEKCHRFGLRKDLASAILDLPVLEHLFAQHRSDLVSGRLPVGLSLKEQGECLSLAVLDLARMAREQAQRPGELLKTVSYKACLPPSLRDLIQGLSFVTRRRIRRTVRRALRRVAACQADRHSLMAKYIMDLERLDPAGAAETFHVGLPGALGGHDGLGLLRVAGDGGIAWTQGEQEVLQPFCDFPEIVDISIKQAPRVGPAGEHRLVTVTRTDNQILEAEFPGLPEALSFVALVDGYFRLTTDSQHFFCKEVAPPRLLEEVAEQCHGPITLDFAINKLKTGGSRPGSYVLRRSPQDFDSFLLTVCVQNPLGPDYKGCLIRRSPTGTFLLVGLSRPHSSLRELLATCWDGGLHVDGVAVTLTSCCIPRPKEKSNLIVVQRGHSPPTSSLVQPQSQYQLSQMTFHKIPADSLEWHENLGHGSFTKIYRGCRHEVVDGEARKTEVLLKVMDAKHKNCMESFLEAASLMSQVSYRHLVLLHGVCMAGDSTMVQEFVHLGAIDMYLRKRGHLVPASWKLQVVKQLAYALNYLEDKGLPHGNVSARKVLLAREGADGSPPFIKLSDPGVSPAVLSLEMLTDRIPWVAPECLREAQTLSLEADKWGFGATVWEVFSGVTMPISALDPAKKLQFYEDRQQLPAPKWTELALLIQQCMAYEPVQRPSFRAVIRDLNSLISSDYELLSDPTPGALAPRDGLWNGAQLYACQDPTIFEERHLKYISQLGKGNFGSVELCRYDPLGDNTGALVAVKQLQHSGPDQQRDFQREIQILKALHSDFIVKYRGVSYGPGRQSLRLVMEYLPSGCLRDFLQRHRARLDASRLLLYSSQICKGMEYLGSRRCVHRDLAARNILVESEAHVKIADFGLAKLLPLDKDYYVVREPGQSPIFWYAPESLSDNIFSRQSDVWSFGVVLYELFTYCDKSCSPSAEFLRMMGCERDVPALCRLLELLEEGQRLPAPPACPAEVSAAGLASVSQSVDWAGVSGKPAGA

SEQ ID NO: 50476 - protein, 524 aa, Homo sapiens
MSGKRKRVVLTIKDKLDIIKKLEDGGSSKQLAVIYGIGETTVRDIRKNKEKIITYASSSDSTSLLAKRKSMKPSMYEELDRAMLEWFNQQRAKGNPISGPICAKRAEFFFYALGMDGDFNPSAGWLTRFKQRHSIREINIRNERLNGDETAVEDFCNNFRDFIERENLQPEQIYNADETGLFWKCLPSRISVIKGKCTVPGHKSIEERVTIMCCANATGLHKLKLCVVGKAKKPRSFKSTDTLNLPVSYFSQKGAWMDLSIFRQWFDKIFVPQVREYLRSKGLQEKAVLLLDNSPTHPNENVLRSDDGQIFAKYLPPNVASLIQPSDQGVIATMKRNYRAGLLQNNLEEGNDLKSFWKKLTLLDALYEIAMAWNLVKPVTISRAWKKILPMVEEKESLDFDVEDISVATVAAILQHTKGLENVTTENLEKWLEVDSTEPGYEVLTDSEIIRRAQGQADESSENEEEEIELIPEKHINHAAALQWTENLLDYLEQQGDMILPDRLVIRKLRATIRNKQKMTKSSQ

SEQ ID NO: 50477 - protein, 524 aa, Homo sapiens; identical to SEQ ID NO: 50476

SEQ ID NO: 50478 - protein, 416 aa, Homo sapiens
MAGDTHCPAEPLAREGTLWEALRALLPHSKEDLKLDLGEKVERSVVTLLQRATELFYEGRRDECLQSSEVILDYSWEKLNTGTWQDVDKDWRRVYAIGCLLKALCLCQAPEDANTVAAALRVCDMGLLMGAAILGDILLKVAAILQTHLPGKRPARGSLPEQPCTKKARADHGLIPDVKLEKTVPRLHRPSLQHFREQFLVPGRPVILKGVADHWPCMQKWSLEYIQEIAGCRTVPVEVGSRYTDEEWSQTLMTVNEFISKYIVNEPRDVGYLAQHQLFDQIPELKQDISIPDYCSLGDGEEEEITINAWFGPQGTISPLHQDPQQNFLVQVMGRKYIRLYSPQESGALYPHDTHLLHNTSQVDVENPDLEKFPKFAKAPFLSCILSPGEILFIPVKYWHYVRALDLSFSVSFWWS

SEQ ID NO: 50479 - protein, 220 aa, Homo sapiens
MAGDTHCPAEPLAREGTLWEALRALLPHSKEDLKLDLGEKVERSVVTLLQRATELFYEGRRDECLQSSEVILDYSWEKLNTGTWQDVDKDWRRVYAIGCLLKALCLCQAPEDANTVAAALRVCDMGLLMGAAILGDILLKVAAILQTHLPGKRPARGSLPEQPCTKVDVENPDLEKFPKFAKAPFLSCILSPGEILFIPVKYWHYVRALDLSFSVSFWWS

SEQ ID NO: 50480 - protein, 454 aa, Homo sapiens
MSREKCSPGEGAEEGRGSEASGLKASAGHGTEPAGGGPMAGDTHCPAEPLAREGTLWEALRALLPHSKEDLKLDLGEKVERSVVTLLQRATELFYEGRRDECLQSSEVILDYSWEKLNTGTWQDVDKDWRRVYAIGCLLKALCLCQAPEDANTVAAALRVCDMGLLMGAAILGDILLKVAAILQTHLPGKRPARGSLPEQPCTKKARADHGLIPDVKLEKTVPRLHRPSLQHFREQFLVPGRPVILKGVADHWPCMQKWSLEYIQEIAGCRTVPVEVGSRYTDEEWSQTLMTVNEFISKYIVNEPRDVGYLAQHQLFDQIPELKQDISIPDYCSLGDGEEEEITINAWFGPQGTISPLHQDPQQNFLVQVMGRKYIRLYSPQESGALYPHDTHLLHNTSQVDVENPDLEKFPKFAKAPFLSCILSPGEILFIPVKYWHYVRALDLSFSVSFWWS

SEQ ID NO: 50481 - protein, 146 aa, Homo sapiens
MTVNEFISKYIVNEPRDVGYLAQHQLFDQIPELKQDISIPDYCSLGDGEEEEITINAWFGPQGTISPLHQDPQQNFLVQVMGRKYIRLYSPQESGALYPHDTHLLHNTSQVDVENPDLEKFPKFAKAPFLSCILSPGEILFIPVKY

SEQ ID NO: 50482 - protein, 372 aa, Homo sapiens
MNHKSKKRIREAKRSARPELKDSLDWTRHNYYESFSLSPAAVADNVERADALQLSVEEFVERYERPYKPVVLLNAQEGWSAQEKWTLERLKRKYRNQKFKCGEDNDGYSVKMKMKYYIEYMESTRDDSPLYIFDSSYGEHPKRRKLLEDYKVPKFFTDDLFQYAGEKRRPPYRWFVMGPPRSGTGIHIDPLGTSAWNALVQGHKRWCLFPTSTPRELIKVTRDEGGNQQDEAITWFNVIYPRTQLPTWPPEFKPLEILQKPGETVFVPGGWWHVVLNLDTTIAITQNFASSTNFPVVWHKTVRGRPKLSRKWYRILKQEHPELAVLADSVDLQESTGIASDSSSDSSSSSSSSSSDSDSERIRDTCGGRAHP

SEQ ID NO: 50483 - protein, 403 aa, Homo sapiens
MNHKSKKRIREAKRSARPELKDSLDWTRHNYYESFSLSPAAVADNVERADALQLSVEEFVERYERPYKPVVLLNAQEGWSAQEKWTLERLKRKYRNQKFKCGEDNDGYSVKMKMKYYIEYMESTRDDSPLYIFDSSYGEHPKRRKLLEDYKVPKFFTDDLFQYAGEKRRPPYRWFVMGPPRSGTGIHIDPLGTSAWNALVQGHKRWCLFPTSTPRELIKVTRDEGGNQQDEAITWFNVIYPRTQLPTWPPEFKPLEILQKPGETVFVPGGWWHVVLNLDTTIAITQNFASSTNFPVVWHKTVRGRPKLSRKWYRILKQEHPELAVLADSVDLQESTGIASDSSSDSSSSSSSSSSDSDSECESGSEGDGTVHRRKKRRTCSMVGNGDTTSQDDCVSKERSSSR

SEQ ID NO: 50484 - protein, 414 aa, Homo sapiens
MNHKSKKRIREAKRSARPELKDSLDWTRHNYYESFSLSPAAVADNVERADALQLSVEEFVERYERPYKPVVLLNAQEGWSAQEKWTLERLKRKYRNQKFKCGEDNDGYSVKMKMKYYIEYMESTRDDSPLYIFDSSYGEHPKRRKLLEDYKVPKFFTDDLFQYAGEKRRPPYRWFVMGPPRSGTGIHIDPLGTSAWNALVQGHKRWCLFPTSTPRELIKVTRDEGGNQQDEAITWFNVIYPRTQLPTWPPEFKPLEILQKPGETVFVPGGWWHVVLNLDTTIAITQNFASSTNFPVVWHKTVRGRPKLSRKWYRILKQEHPELAVLADSVDLQESTGIASDSSSDSSSSSSSSSSDSDSECESGSEGDGTVHRRKKRRTCSMVGNGDTTSQDDCVSKERSSSRIRDTCGGRAHP

SEQ ID NO: 50485 - protein, 146 aa, Homo sapiens
MLAGAGRPGLPQGRHLCWLLCAFTLKLCQAEAPVQEEKLSASTSNLPCWLVEEFVVAEECSPCSNFRAKTTPECGPTGYVEKITCSSSKRNEFKSCRSALMEQRLFWKFEGAVVCVALIFACLVIIRQRQLDRKALEKVRKQIESI

SEQ ID NO: 50486 - protein, 117 aa, Homo sapiens
MAWGWHLSFLSASTSNLPCWLVEEFVVAEECSPCSNFRAKTTPECGPTGYVEKITCSSSKRNEFKSCRSALMEQRLFWKFEGAVVCVALIFACLVIIRQRQLDRKALEKVRKQIESI

SEQ ID NO: 50487 - protein, 117 aa, Homo sapiens; identical to SEQ ID NO: 50486

SEQ ID NO: 50488 - protein, 117 aa, Homo sapiens; identical to SEQ ID NO: 50486

SEQ ID NO: 50489 - protein, 347 aa, Homo sapiens
METPFYGDEALSGLGGGASGSGGSFASPGRLFPGAPPTAAAGSMMKKDALTLSLSEQVAAALKPAAAPPPTPLRADGAPSAAPPDGLLASPDLGLLKLASPELERLIIQSNGLVTTTPTSSQFLYPKVAASEEQEFAEGFVKALEDLHKQNQLGAGAAAAAAAAAAGGPSGTATGSAPPGELAPAAAAPEAPVYANLSSYAGGAGGAGGAATVAFAAEPVPFPPPPPPGALGPPRLAALKDEPQTVPDVPSFGESPPLSPIDMDTQERIKAERKRLRNRIAASKCRKRKLERISRLEEKVKTLKSQNTELASTASLLREQVAQLKQKVLSHVNSGCQLLPQHQVPAY

SEQ ID NO: 50490 - protein, 977 aa, Homo sapiens
MSFALEETLESDWVAVRPHVFDEREKHKFVFIVAWNEIEGKFAITCHNRTAQRQRSGSREQAGARGGAEAGGAASDGSRGPGSPAGRGRPEATASATLVRSPGPRRSSAWAEGGSPRSTRSLLGDPRLRSPGSKGAESRLRSPVRAKPIPGQKTSEADDAAGAAAAAARPAPREAQVSSVRIVSASGTVSEEIEVLEMVKEDEAPLALSDAEQPPPATELESPAEECSWAGLFSFQDLRAVHQQLCSVNSQLEPCLPVFPEEPSGMWTVLFGGAPEMTEQEIDTLCYQLQVYLGHGLDTCGWKILSQVLFTETDDPEEYYESLSELRQKGYEEVLQRARKRIQELLDKHKNTESMVELLDLYQMEDEAYSSLAEATTELYQYLLQPFRDMRELAMLRRQQIKISMENDYLGPRRIESLQKEDADWQRKAHMAVLSIQDLTVKYFEITAKAQKAVYDRMRADQKKFGKASWAAAAERMEKLQYAVSKETLQMMRAKEICLEQRKHALKEEMQSLRGGTEAIARLDQLEADYYDLQLQLYEVQFEILKCEELLLTAQLESIKRLISEKRDEVVYYDTYESMEAMLEKEEMAASAYLQREELQKLQQKARQLEARRGRVSAKKSYLRNKKEICIAKHNEKIQQRTRIEDEYRTHHTVQLKREKLHDEEERKSAWVSQERQRTLDRLRTFKQRYPGQVILKSTRLRLAHARRKGAASPVLQEDHCDSLPSVLQVEEKTEEVGEGRVKRGPSQTTEPQSLVQLEDTSLTQLEATSLPLSGVTSELPPTISLPLLNNNLEPCSVTINPLPSPLPPTPPPPLPVAKDSGPETLEKDLPRKEGNEKRIPKSASAPSAHLFDSSQLVSARKKLRKTAEGLQRRRVSSPMDEVLASLKRGSFHLKKVEQRTLPPFPDEDDSNNILAQIRKGVKLKKVQKDVLRESFTLLPDTDPLTRSIHEALRRIKEASPESEDEEEALPCTDWEN

SEQ ID NO: 50491 - protein, 988 aa, Homo sapiens
MSFALEETLESDWVAVRPHVFDEREKHKFVFIVAWNEIEGKFAITCHNRTAQRQRSGSREQAGARGGAEAGGAASDGSRGPGSPAGRGRPEATASATLVRSPGPRRSSAWAEGGSPRSTRSLLGDPRLRSPGSKGAESRLRSPVRAKPIPGQKTSEADDAAGAAAAAARPAPREAQVSSVRIVSASGTVSEEIEVLEMVKEDEAPLALSDAEQPPPATELESPAEECSWAGLFSFQDLRAVHQQLCSVNSQLEPCLPVFPEEPSGMWTVLFGGAPEMTEQEIDTLCYQLQVYLGHGLDTCGWKILSQVLFTETDDPEEYYESLSELRQKGYEEVLQRARKRIQELLDKHKNTESMVELLDLYQMEDEAYSSLAEATTELYQYLLQPFRDMRELAMLRRQQIKISMENDYLGPRRIESLQKEDADWQRKAHMAVLSIQDLTVKYFEITAKAQKAVYDRMRADQKKFGKASWAAAAERMEKLQYAVSKETLQMMRAKEICLEQRKHALKEEMQSLRGGTEAIARLDQLEADYYDLQLQLYEVQFEILKCEELLLTAQLESIKRLISEKRDEVVYYDTYESMEAMLEKEEMAASAYLQREELQKLQQKARQLEARRGRVSAKKSYLRNKKEICIAKHNEKIQQRTRIEDEYRTHHTVQLKREKLHDEEERKSAWVSQERQRTLDRLRTFKQRYPGQVILKSTRLRLAHARRKGAASPVLQEDHCDSLPSVLQVEEKTEEVGEGRVKRGPSQTTEPQSLVQLEDTSLTQLEATSLPLSGVTSELPPTISLPLLNNNLEPCSVTINPLPSPLPPTPPPPPPPPPPPPPPPLPVAKDSGPETLEKDLPRKEGNEKRIPKSASAPSAHLFDSSQLVSARKKLRKTAEGLQRRRVSSPMDEVLASLKRGSFHLKKVEQRTLPPFPDEDDSNNILAQIRKGVKLKKVQKDVLRESFTLLPDTDPLTRSIHEALRRIKEASPESEDEEEALPCTDWEN

SEQ ID NO: 50492 - protein, 745 aa, Homo sapiens
MEVMNLMEQPIKVTEWQQTYTYDSGIHSGANTCVPSVSSKGIMEEDEACGRQYTLKKTTTYTQGVPPSQGDLEYQMSTTARAKRVREAMCPGVSGEDSSLLLATQVEGQATNLQRLAEPSQLLKSAIVHLINYQDDAELATRALPELTKLLNDEDPVVVTKAAMIVNQLSKKEASRRALMGSPQLVAAVVRTMQNTSDLDTARCTTSILHNLSHHREGLLAIFKSGGIPALVRMLSSPVESVLFYAITTLHNLLLYQEGAKMAVRLADGLQKMVPLLNKNNPKFLAITTDCLQLLAYGNQESKLIILANGGPQALVQIMRNYSYEKLLWTTSRVLKVLSVCPSNKPAIVEAGGMQALGKHLTSNSPRLVQNCLWTLRNLSDVATKQEGLESVLKILVNQLSVDDVNVLTCATGTLSNLTCNNSKNKTLVTQNSGVEALIHAILRAGDKDDITEPAVCALRHLTSRHPEAEMAQNSVRLNYGIPAIVKLLNQPNQWPLVKATIGLIRNLALCPANHAPLQEAAVIPRLVQLLVKAHQDAQRHVAAGTQQPYTDGVRMEEIVEGCTGALHILARDPMNRMEIFRLNTIPLFVQLLYSSVENIQRVAAGVLCELAQDKEAADAIDAEGASAPLMELLHSRNEGTATYAAAVLFRISEDKNPDYRKRVSVELTNSLFKHDPAAWEAAQSMIPINEPYGDDMDATYRPMYSSDVPLDPLEMHMDMDGDYPIDTYSDGLRPPYPTADHMLA

SEQ ID NO: 50493 - protein, 745 aa, Homo sapiens; identical to SEQ ID NO: 50492

SEQ ID NO: 50494 - protein, 745 aa, Homo sapiens; identical to SEQ ID NO: 50492

SEQ ID NO: 50495 - protein, 277 aa, Homo sapiens
MEVMNLMEQPIKVTEWQQTYTYDSGIHSGANTCVPSVSSKGIMEEDEACGRQYTLKKTTTYTQGVPPSQGDLEYQMSTTARAKRVREAMCPGVSGEDSSLLLATQVEGQATNLQRLAEPSQLLKSAIVHLINYQDDAELATRALPELTKLLNDEDPVVVTKAAMIVNQLSKKEASRRALMGSPQLVAAVVRTMQNTSDLDTARCTTSILHNLSHHREGLLAIFKSGGIPALVRMLSSPVESVLFYAITTLHNLLLYQEGAKMAVRLADGLQKMVPLL

SEQ ID NO: 50496 - protein, 235 aa, Homo sapiens
MEVMNLMEQPIKVTEWQQTYTYDSGIHSGANTCVPSVSSKGIMEEDEACGRQYTLKKTTTYTQGVPPSQGDLEYQMSTTARAKRVREAMCPGVSGEDSSLLLATQVEGQATNLQRLAEPSQLLKSAIVHLINYQDDAELATRALPELTKLLNDEDPVVVTKAAMIVNQLSKKEASRRALMGSPQLVAAVVRTMQNTSDLDTARCTTSILHNLSHHREGLLAIFKSGGIPALVRML

SEQ ID NO: 50497 - protein, 296 aa, Homo sapiens
MEVMNLMEQPIKVTEWQQTYTYDSGIHSGANTCVPSVSSKGIMEEDEACGRQYTLKKTTTYTQGVPPSQGDLEYQMSTTARAKRVREAMCPGVSGEDSSLLLATQVEGQATNLQRLAEPSQLLKSAIVHLINYQDDAELATRALPELTKLLNDEDPVVVTKAAMIVNQLSKKEASRRALMGSPQLVAAVVRTMQNTSDLDTARCTTSILHNLSHHREGLLAIFKSGGIPALVRMLSSPVESVLFYAITTLHNLLLYQEGAKMAVRLADGLQKMVPLLNKNNPKFLAITTDCLQLLA

SEQ ID NO: 50498 - protein, 86 aa, Homo sapiens
MEVMNLMEQPIKVTEWQQTYTYDSGIHSGANTCVPSVSSKGIMEEDEACGRQYTLKKTTTYTQGVPPSQGDLEYQMSTTARAKRVR

SEQ ID NO: 50499 - protein, 298 aa, Homo sapiens
MEVMNLMEQPIKVTEWQQTYTYDSGIHSGANTCVPSVSSKGIMEEDEACGRQYTLKKTTTYTQGVPPSQGDLEYQMSTTARAKRVREAMCPGVSGEDSSLLLATQVEGQATNLQRLAEPSQLLKSAIVHLINYQDDAELATRALPELTKLLNDEDPVVVTKAAMIVNQLSKKEASRRALMGSPQLVAAVVRTMQNTSDLDTARCTTSILHNLSHHREGLLAIFKSGGIPALVRMLSSPVESVLFYAITTLHNLLLYQEGAKMAVRLADGLQKMVPLLNKNNPKFLAITTDCLQLLAYG

SEQ ID NO: 50500 - protein, 591 aa, Homo sapiens
MEVMNLMEQPIKVTEWQQTYTYDSGIHSGANTCVPSVSSKGIMEEDEACGRQYTLKKTTTYTQGVPPSQGDLEYQMSTTARAKRVREAMCPGVSGEDSSLLLATQVEGQATNLQRLAEPSQLLKSAIVHLINYQDDAELATRALPELTKLLNDEDPVVVTKAAMIVNQLSKKEASRRALMGSPQLVAAVVRTMQNTSDLDTARCTTSILHNLSHHREGLLAIFKSGGIPALVRMLSSPVESVLFYAITTLHNLLLYQEGAKMAVRLADGLQKMVPLLNKNNPKFLAITTDCLQLLAYGNQESKILTATVDNANILLQIDNARLAADDFRTKFETEQALRLSVEADINGLRRVLDELTLARADLEMQIENLKEELAYLKKNHEEEMNALRGQVGGEINVEMDAAPGVDLSRILNEMRDQYEKMAEKNRKDAEDWFFSKTEELNREVATNSELVQSGKSEISELRRTMQALEIELQSQLSMKASLEGNLAETENRYCVQLSQIQGLIGSVEEQLAQLRCEMEQQNQEYKILLDVKTRLEQEIATYRRLLEGEDAHLTQYKKEPVTTRQVRTIVEEVQDGKVISSREQVHQTTR

SEQ ID NO: 50501 - protein, 298 aa, Homo sapiens
MARRSRHRLLLLLLRYLVVALGYHKAYGFSAPKDQQVVTAVEYQEAILACKTPKKTVSSRLEWKKLGRSVSFVYYQQTLQGDFKNRAEMIDFNIRIKNVTRSDAGKYRCEVSAPSEQGQNLEEDTVTLEVLVAPAVPSCEVPSSALSGTVVELRCQDKEGNPAPEYTWFKDGIRLLENPRLGSQSTNSSYTMNTKTGTLQFNTVSKLDTGEYSCEARNSVGYRRCPGKRMQVDDLNISGIIAAVVVVALVISVCGLGVCYAQRKGYFSSKYMFMKSNSSSKATTMSENDFKHTKSFII

SEQ ID NO: 50502 - protein, 262 aa, Homo sapiens
MARRSRHRLLLLLLRYLVVALGYHKAYGFSAPKDQQVVTAVEYQGDFKNRAEMIDFNIRIKNVTRSDAGKYRCEVSAPSEQGQNLEEDTVTLEVLVAPAVPSCEVPSSALSGTVVELRCQDKEGNPAPEYTWFKDGIRLLENPRLGSQSTNSSYTMNTKTGTLQFNTVSKLDTGEYSCEARNSVGYRRCPGKRMQVDDLNISGIIAAVVVVALVISVCGLGVCYAQRKGYFSKETSFQKSNSSSKATTMSENDFKHTKSFII

SEQ ID NO: 50503 - protein, 298 aa, Homo sapiens
MARRSRHRLLLLLLRYLVVALGYHKAYGFSAPKDQQVVTAVEYQEAILACKTPKKTVSSRLEWKKLGRSVSFVYYQQTLQGDFKNRAEMIDFNIRIKNVTRSDAGKYRCEVSAPSEQGQNLEEDTVTLEVLVAPAVPSCEVPSSALSGTVVELRCQDKEGNPAPEYTWFKDGIRLLENPRLGSQSTNSSYTMNTKTGTLQFNTVSKLDTGEYSCEARNSVGYRRCPGKRMQVDDLNISGIIAAVVVVALVISVCGLGVCYAQRKGYFSKETSFQKSNSSSKATTMSENDFKHTKSFII

SEQ ID NO: 50504 - protein, 312 aa, Homo sapiens
MARRSRHRLLLLLLRYLVVALGYHKAYGFSAPKDQQVVTAVEYQEAILACKTPKKTVSSRLEWKKLGRSVSFVYYQQTLQGDFKNRAEMIDFNIRIKNVTRSDAGKYRCEVSAPSEQGQNLEEDTVTLEVLVAPAVPSCEVPSSALSGTVVELRCQDKEGNPAPEYTWFKDGIRLLENPRLGSQSTNSSYTMNTKTGTLQFNTVSKLDTGEYSCEARNSVGYRRCPGKRMQVDDLNISGIIAAVVVVALVISVCGLGVCYAQRKGYFSKETSFQKSNSSSKATTMSENVQWLTPVIPALWKAAAGGSRGQEF

SEQ ID NO: 50505 - protein, 310 aa, Homo sapiens
MALRRPPRLRLCARLPDFFLLLLFRGCLIGAVNLKSSNRTPVVQEFESVELSCIITDSQTSDPRIEWKKIQDEQTTYVFFDNKIQGDLAGRAEILGKTSLKIWNVTRRDSALYRCEVVARNDRKEIDEIVIELTVQVKPVTPVCRVPKAVPVGKMATLHCQESEGHPRPHYSWYRNDVPLPTDSRANPRFRNSSFHLNSETGTLVFTAVHKDDSGQYYCIASNDAGSARCEEQEMEVYDLNIGGIIGGVLVVLAVLALITLGICCAYRRGYFINNKQDGESYKNPGKPDGVNYIRTDEEGDFRHKSSFVI

SEQ ID NO: 50506 - protein, 259 aa, Homo sapiens
MALRRPPRLRLCARLPDFFLLLLFRGCLIGAVNLKSSNRTPVVQEFESVELSCIITDSQTSDPRIEWKKIQDEQTTYVFFDNKIQVKPVTPVCRVPKAVPVGKMATLHCQESEGHPRPHYSWYRNDVPLPTDSRANPRFRNSSFHLNSETGTLVFTAVHKDDSGQYYCIASNDAGSARCEEQEMEVYDLNIGGIIGGVLVVLAVLALITLGICCAYRRGYFINNKQDGESYKNPGKPDGVNYIRTDEEGDFRHKSSFVI

SEQ ID NO: 50507 - protein, 355 aa, Homo sapiens
MVPARLGPAVAMVTGAGRRVLAGWAHARGDYKPRRAAAGPSATLDMALRRPPRLRLCARLPDFFLLLLFRGCLIGAVNLKSSNRTPVVQEFESVELSCIITDSQTSDPRIEWKKIQDEQTTYVFFDNKIQGDLAGRAEILGKTSLKIWNVTRRDSALYRCEVVARNDRKEIDEIVIELTVQVKPVTPVCRVPKAVPVGKMATLHCQESEGHPRPHYSWYRNDVPLPTDSRANPRFRNSSFHLNSETGTLVFTAVHKDDSGQYYCIASNDAGSARCEEQEMEVYDLNIGGIIGGVLVVLAVLALITLGICCAYRRGYFINNKQDGESYKNPGKPDGVNYIRTDEEGDFRHKSSFVI

SEQ ID NO: 50508 - protein, 661 aa, Homo sapiens
MTGGRFDFDDGGTYCGGWEEGKAHGHGICTGPKGQGEYSGSWSHGFEVVGGYTWPSGNTYQGYWAQGKRHGLGVETKGKWMYRGEWSHGFKGRYGVRQSLCTPARYEGTWSNGLQDGYGVETYGDGGTYQGQWAGGMRHGYGVRQSVPYGMATVIRSPLRTSLASLRSEQSNGSVLHDAAAAADSPAGTRGGFVLNFHADAELAGKKKGGLFRRGSLLGSMKLRKSESKSSISSKRSSVRSDAAMSRISSSDANSTISFGDVDCDFCPVEDHVDATTTETYMGEWKNDKRNGFGVSERSNGMKYEGEWANNKRHGYGCTVFPDGSKEEGKYKNNILVRGIRKQLIPIRHTKTREKVDRAIEGAQRAAAMARTKVEIANSRTAHARAKADAADQAALAARQECDIARAVARELSPDFYQPGPDYVKQRFQEGVDAKENPEEKVPEKPPTPKESPHFYRKGTTPPRSPEASPKHSHSPASSPKPLKKQNPSSGARLNQDKRSVADEQVTAIVNKPLMSKAPTKEAGAVVPQSKYSGRHHIPNPSNGELHSQYHGYYVKLNAPQHPPVDVEDGDGSSQSSSALVHKPSANKWSPSKSVTKPVAKESKAEPKAKKSELAIPKNPASNDSCPALEKEANSGPNSIMIVLVMLLNIGLAILFVHFLT

SEQ ID NO: 50509 - protein, 129 aa, Homo sapiens
MSGGRFDFDDGGAYCGGWEGGKAHGHGLCTGPKGQGEYSGSWNFGFEVAGVYTWPSGNTFEGYWSQGKRHGLGIETKGRWLYKGEWTHGFKGRYGIRQSSSSGAKYEGTWNNGLQDGYGTETYADGGMC

SEQ ID NO: 50510 - protein, 696 aa, Homo sapiens
MSGGRFDFDDGGAYCGGWEGGKAHGHGLCTGPKGQGEYSGSWNFGFEVAGVYTWPSGNTFEGYWSQGKRHGLGIETKGRWLYKGEWTHGFKGRYGIRQSSSSGAKYEGTWNNGLQDGYGTETYADGGTYQGQFTNGMRHGYGVRQSVPYGMAVVVRSPLRTSLSSLRSEHSNGTVAPDSPASPASDGPALPSPAIPRGGFALSLLANAEAAARAPKGGGLFQRGALLGKLRRAESRTSVGSQRSRVSFLKSDLSSGASDAASTASLGEAAEGADEAAPFEADIDATTTETYMGEWKNDKRSGFGVSERSSGLRYEGEWLDNLRHGYGCTTLPDGHREEGKYRHNVLVKDTKRRMLQLKSNKVRQKVEHSVEGAQRAAAIARQKAEIAASRTSHAKAKAEAAEQAALAANQESNIARTLARELAPDFYQPGPEYQKRRLLQEILENSESLLEPPDRGAGAAGLPQPPRESPQLHERETPRPEGGSPSPAGTPPQPKRPRPGVSKDGLLSPGAWNGEPSGEGSRSVTPSEGAGRRSPARPATERMAIEALQAPPAPSREPEVALYQGYHSYAVRTTPPEPPPFEDQPEPEVSGSESAPSSPATAPLQAPTLRGPEPARETPAKLEPKPIIPKAEPRAKARKTEARGLTKAGAKKKARKEAALAAEAEVEVEEVPNTILICMVILLNIGLAILFVHLLT

SEQ ID NO: 50511 - protein, 748 aa, Homo sapiens
MSSGGRFNFDDGGSYCGGWEDGKAHGHGVCTGPKGQGEYTGSWSHGFEVLGVYTWPSGNTYQGTWAQGKRHGIGLESKGKWVYKGEWTHGFKGRYGVRECAGNGAKYEGTWSNGLQDGYGTETYSDGGTYQGQWVGGMRQGYGVRQSVPYGMAAVIRSPLRTSINSLRSEHTNGTALHPDASPAVAGSPAVSRGGFVLVAHSDSEILKSKKKGLFRRSLLSGLKLRKSESKSSLASQRSKQSSFRSEAGMSTVSSTASDIHSTISLGEAEAELAVIEDDIDATTTETYVGEWKNDKRSGFGVSQRSDGLKYEGEWASNRRHGYGCMTFPDGTKEEGKYKQNILVGGKRKNLIPLRASKIREKVDRAVEAAERAATIAKQKAEIAASRTSHSRAKAEAALTAAQKAQEEARIARITAKEFSPSFQHRENGLEYQRPKRQTSCDDIEVLSTGTPLQQESPELYRKGTTPSDLTPDDSPLQSFPTSPAATPPPAPAARNKVAHFSRQVSVDEERGGDIQMLLEGRAGDCARSSWGEEQAGGSRGVRSGALRGGLLVDDFRTRGSGRKQPGNPKPRERRTESPPVFTWTSHHRASNHSPGGSRLLELQEEKLSNYRMEMKPLLRMETHPQKRRYSKGGACRGLGDDHRPEDRGFGVQRLRSKAQNKENFRPASSAEPAVQKLASLRLGGAEPRLLRWDLTFSPPQKSLPVALESDEENGDELKSSTGSAPILVVMVILLNIGVAILFINFFI

SEQ ID NO: 50512 - protein, 186 aa, Homo sapiens
MSSGGRFNFDDGGSYCGGWEDGKAHGHGVCTGPKGQGEYTGSWSHGFEVLGVYTWPSGNTYQGTWAQGKRHGIGLESKGKWVYKGEWTHGFKGRYGVRECAGNGAKYEGTWSNGLQDGYGTETYSDGDATAFGAEPGPEARELPAAAAAAAAAAAAAVRWFLCREPWPALQLPACLDSPISTPQCT

SEQ ID NO: 50513 - protein, 31 aa, Homo sapiens
MPPHSGQSRGRKPGSCLLLLLLLLLLLLLLL

SEQ ID NO: 50514 - protein, 611 aa, Homo sapiens
MRQGYGVRQSVPYGMAAVIRSPLRTSINSLRSEHTNGTALHPDASPAVAGSPAVSRGGFVLVAHSDSEILKSKKKGLFRRSLLSGLKLRKSESKSSLASQRSKQSSFRSEAGMSTVSSTASDIHSTISLGEAEAELAVIEDDIDATTTETYVGEWKNDKRSGFGVSQRSDGLKYEGEWASNRRHGYGCMTFPDGTKEEGKYKQNILVGGKRKNLIPLRASKIREKVDRAVEAAERAATIAKQKAEIAASRTSHSRAKAEAALTAAQKAQEEARIARITAKEFSPSFQHRENGLEYQRPKRQTSCDDIEVLSTGTPLQQESPELYRKGTTPSDLTPDDSPLQSFPTSPAATPPPAPAARNKVAHFSRQVSVDEERGGDIQMLLEGRAGDCARSSWGEEQAGGSRGVRSGALRGGLLVDDFRTRGSGRKQPGNPKPRERRTESPPVFTWTSHHRASNHSPGGSRLLELQEEKLSNYRMEMKPLLRMETHPQKRRYSKGGACRGLGDDHRPEDRGFGVQRLRSKAQNKENFRPASSAEPAVQKLASLRLGGAEPRLLRWDLTFSPPQKSLPVALESDEENGDELKSSTGSAPILVVMVILLNIGVAILFINFFI

SEQ ID NO: 50515 - protein, 837 aa, Homo sapiens
MAEPSQAPTPAPAAQPRPLQSPAPAPTPTPAPSPASAPIPTPTPAPAPAPAAAPAGSTGTGGPGVGSGGAGSGGDPARPGLSQQQRASQRKAQVRGLPRAKKLEKLGVFSACKANETCKCNGWKNPKPPTAPRMDLQQPAANLSELCRSCEHPLADHVSHLENVSEDEINRLLGMVVDVENLFMSVHKEEDTDTKQVYFYLFKLLRKCILQMTRPVVEGSLGSPPFEKPNIEQGVLNFVQYKFSHLAPRERQTMFELSKMFLLCLNYWKLETPAQFRQRSQAEDVATYKVNYTRWLCYCHVPQSCDSLPRYETTHVFGRSLLRSIFTVTRRQLLEKFRVEKDKLVPEKRTLILTHFPKFLSMLEEEIYGANSPIWESGFTMPPSEGTQLVPRPASVSAAVVPSTPIFSPSMGGGSNSSLSLDSAGAEPMPGEKRTLPENLTLEDAKRLRVMGDIPMELVNEVMLTITDPAAMLGPETSLLSANAARDETARLEERRGIIEFHVIGNSLTPKANRRVLLWLVGLQNVFSHQLPRMPKEYIARLVFDPKHKTLALIKDGRVIGGICFRMFPTQGFTEIVFCAVTSNEQVKGYGTHLMNHLKEYHIKHNILYFLTYADEYAIGYFKKQGFSKDIKVPKSRYLGYIKDYEGATLMECELNPRIPYTELSHIIKKQKEIIKKLIERKQAQIRKVYPGLSCFKEGVRQIPVESVPGIRETGWKPLGKEKGKELKDPDQLYTTLKNLLAQIKSHPSAWPFMEPVKKSEAPDYYEVIRFPIDLKTMTERLRSRYYVTRKLFVADLQRVIANCREYNPPDSEYCRCASALEKFFYFKLKEGGLIDK

SEQ ID NO: 50516 - protein, 546 aa, Homo sapiens
MAEVVSPVPGAGRREPGEVGRARGPPVADPGVALSPQGEIIEGCRLPVLRRNQDNEDEWPLAEILSVKDISGRKLFYVHYIDFNKRLDEWVTHERLDLKKIQFPKKEAKTPTKNGLPGSRPGSPEREVPASAQASGKTLPIPVQITLRFNLPKEREAIPGGEPDQPLSSSSCLQPNHRSTKRKVEVVSPATPVPSETAPASVFPQNGAARRAVAAQPGRKRKSNCLGTDEDSQDSSDGIPSAPRMTGSLVSDRSHDDIVTRMKNIECIELGRHRLKPWYFSPYPQELTTLPVLYLCEFCLKYGRSLKCLQRHLTKCDLRHPPGNEIYRKGTISFFEIDGRKNKSYSQNLCLLAKCFLDHKTLYYDTDPFLFYVMTEYDCKGFHIVGYFSKEKESTEDYNVACILTLPPYQRRGYGKLLIEFSYELSKVEGKTGTPEKPLSDLGLLSYRSYWSQTILEILMGLKSESGERPQITINEISEITSIKKEDVISTLQYLNLINYYKGQYILTLSEDIVDGHERAMLKRLLRIDSKCLHFTPKDWSKRGKW

SEQ ID NO: 50517 - protein, 461 aa, Homo sapiens
MAEVGEIIEGCRLPVLRRNQDNEDEWPLAEILSVKDISGRKLFYVHYIDFNKRLDEWVTHERLDLKKIQFPKKEAKTPTKNGLPGSRPGSPEREVKRKVEVVSPATPVPSETAPASVFPQNGAARRAVAAQPGRKRKSNCLGTDEDSQDSSDGIPSAPRMTGSLVSDRSHDDIVTRMKNIECIELGRHRLKPWYFSPYPQELTTLPVLYLCEFCLKYGRSLKCLQRHLTKCDLRHPPGNEIYRKGTISFFEIDGRKNKSYSQNLCLLAKCFLDHKTLYYDTDPFLFYVMTEYDCKGFHIVGYFSKEKESTEDYNVACILTLPPYQRRGYGKLLIEFSYELSKVEGKTGTPEKPLSDLGLLSYRSYWSQTILEILMGLKSESGERPQITINEISEITSIKKEDVISTLQYLNLINYYKGQYILTLSEDIVDGHERAMLKRLLRIDSKCLHFTPKDWSKRGKW

SEQ ID NO: 50518 - protein, 513 aa, Homo sapiens
MAEVGEIIEGCRLPVLRRNQDNEDEWPLAEILSVKDISGRKLFYVHYIDFNKRLDEWVTHERLDLKKIQFPKKEAKTPTKNGLPGSRPGSPEREVPASAQASGKTLPIPVQITLRFNLPKEREAIPGGEPDQPLSSSSCLQPNHRSTKRKVEVVSPATPVPSETAPASVFPQNGAARRAVAAQPGRKRKSNCLGTDEDSQDSSDGIPSAPRMTGSLVSDRSHDDIVTRMKNIECIELGRHRLKPWYFSPYPQELTTLPVLYLCEFCLKYGRSLKCLQRHLTKCDLRHPPGNEIYRKGTISFFEIDGRKNKSYSQNLCLLAKCFLDHKTLYYDTDPFLFYVMTEYDCKGFHIVGYFSKEKESTEDYNVACILTLPPYQRRGYGKLLIEFSYELSKVEGKTGTPEKPLSDLGLLSYRSYWSQTILEILMGLKSESGERPQITINEISEITSIKKEDVISTLQYLNLINYYKGQYILTLSEDIVDGHERAMLKRLLRIDSKCLHFTPKDWSKRGKW

SEQ ID NO: 50519 - protein, 494 aa, Homo sapiens
MAEVVSPVPGAGRREPGEVGRARGPPVADPGVALSPQGEIIEGCRLPVLRRNQDNEDEWPLAEILSVKDISGRKLFYVHYIDFNKRLDEWVTHERLDLKKIQFPKKEAKTPTKNGLPGSRPGSPEREVKRKVEVVSPATPVPSETAPASVFPQNGAARRAVAAQPGRKRKSNCLGTDEDSQDSSDGIPSAPRMTGSLVSDRSHDDIVTRMKNIECIELGRHRLKPWYFSPYPQELTTLPVLYLCEFCLKYGRSLKCLQRHLTKCDLRHPPGNEIYRKGTISFFEIDGRKNKSYSQNLCLLAKCFLDHKTLYYDTDPFLFYVMTEYDCKGFHIVGYFSKEKESTEDYNVACILTLPPYQRRGYGKLLIEFSYELSKVEGKTGTPEKPLSDLGLLSYRSYWSQTILEILMGLKSESGERPQITINEISEITSIKKEDVISTLQYLNLINYYKGQYILTLSEDIVDGHERAMLKRLLRIDSKCLHFTPKDWSKRGKW

SEQ ID NO: 50520 - protein, 2073 aa, Homo sapiens
MVKLANPLYTEWILEAIQKIKKQKQRPSEERICHAVSTSHGLDKKTVSEQLELSVQDGSVLKVTNKGLASYKDPDNPGRFSSVKPGTFPKSAKGSRGSCNDLRNVDWNKLLRRAIEGLEEPNGSSLKNIEKYLRSQSDLTSTTNNPAFQQRLRLGAKRAVNNGRLLKDGPQYRVNYGSLDGKGAPQYPSAFPSSLPPVSLLPHEKDQPRADPIPICSFCLGTKESNREKKPEELLSCADCGSSGHPSCLKFCPELTTNVKALRWQCIECKTCSACRVQGRNADNMLFCDSCDRGFHMECCDPPLSRMPKGMWICQVCRPKKKGRKLLHEKAAQIKRRYAKPIGRPKNKLKQRLLSVTSDEGSMNAFTGRGSPGRGQKTKVCTTPSSGHAASGKDSSSRLAVTDPTRPGATTKITTTSTYISASTLKVNKKTKGLIDGLTKFFTPSPDGRRSRGEIIDFSKHYRPRKKVSQKQSCTSHVLATGTTQKLKPPPSSLPPPTPISGQSPSSQKSSTATSSPSPQSSSSQCSVPSLSSLTTNSQLKALFDGLSHIYTTQGQSRKKGHPSYAPPKRMRRKTELSSTAKSKAHFFGKRDIRSRFISHSSSSSWGMARGSIFKAIAHFKRTTFLKKHRMLGRLKYKVTPQMGTPSPGKGSLTDGRIKPDQDDDTEIKINIKQESADVNVIGNKDVVTEEDLDVFKQAQELSWEKIECESGVEDCGRYPSVIEFGKYEIQTWYSSPYPQEYARLPKLYLCEFCLKYMKSKNILLRHSKKCGWFHPPANEIYRRKDLSVFEVDGNMSKIYCQNLCLLAKLFLDHKTLYYDVEPFLFYVLTKNDEKGCHLVGYFSKEKLCQQKYNVSCIMIMPQHQRQGFGRFLIDFSYLLSRREGQAGSPEKPLSDLGRLSYLAYWKSVILEYLYHHHERHISIKAISRATGMCPHDIATTLQHLHMIDKRDGRFVIIRREKLILSHMEKLKTCSRANELDPDSLRWTPILISNAAVSEEEREAEKEAERLMEQASCWEKEEQEILSTRANSRQSPAKVQSKNKYLHSPESRPVTGERGQLLELSKESSEEEEEEEDEEEEEEEEEEEEDEEEEEEEEEEEEEENIQSSPPRLTKPQSVAIKRKRPFVLKKKRGRKRRRINSSVTTETISETTEVLNEPFDNSDEERPMPQLEPTCEIEVEEDGRKPVLRKAFQHQPGKKRQTEEEEGKDNHCFKNADPCRNNMNDDSSNLKEGSKDNPEPLKCKQVWPKGTKRGLSKWRQNKERKTGFKLNLYTPPETPMEPDEQVTVEEQKETSEGKTSPSPIRIEEEVKETGEALLPQEENRREETCAPVSPNTSPGEKPEDDLIKPEEEEEEEEEEEEEEEEEEGEEEEGGGNVEKDPDGAKSQEKEEPEISTEKEDSARLDDHEEEEEEDEEPSHNEDHDADDEDDSHMESAEVEKEELPRESFKEVLENQETFLDLNVQPGHSNPEVLMDCGVDLTASCNSEPKELAGDPEAVPESDEEPPPGEQAQKQDQKNSKEVDTEFKEGNPATMEIDSETVQAVQSLTQESSEQDDTFQDCAETQEACRSLQNYTRADQSPQIATTLDDCQQSDHSSPVSSVHSHPGQSVRSVNSPSVPALENSYAQISPDQSAISVPSLQNMETSPMMDVPSVSDHSQQVVDSGFSDLGSIESTTENYENPSSYDSTMGGSICGNGSSQNSCSYSNLTSSSLTQSSCAVTQQMSNISGSCSMLQQTSISSPPTCSVKSPQGCVVERPPSSSQQLAQCSMAANFTPPMQLAEIPETSNANIGLYERMGQSDFGAGHYPQPSATFSLAKLQQLTNTLIDHSLPYSHSAAVTSYANSASLSTPLSNTGLVQLSQSPHSVPGGPQAQATMTPPPNLTPPPMNLPPPLLQRNMAASNIGISHSQRLQTQIASKGHISMRTKSASLSPAAATHQSQIYGRSQTVAMQGPARTLTMQRGMNMSVNLMPAPAYNVNSVNMNMNTLNAMNGYSMSQPMMNSGYHSNHGYMNQTPQYPMQMQMGMMGTQPYAQQPMQTPPHGNMMYTAPGHHGYMNTGMSKQSLNGSYMRR

SEQ ID NO: 50521 - protein, 1890 aa, Homo sapiens
MVKLANPLYTEWILEAIQKIKKQKQRPSEERICHAVSTSHGLDKKTVSEQLELSVQDGSVLKVTNKGLASYKDPDNPGRFSSVKPGTFPKSAKGSRGSCNDLRNVDWNKLLRRAIEGLEEPNGSSLKNIEKYLRSQSDLTSTTNNPAFQQRLRLGAKRAVNNGRLLKDGPQYRVNYGSLDGKGAPQYPSAFPSSLPPVSLLPHEKDQPRADPIPICSFCLGTKESNREKKPEELLSCADCGSSGHPSCLKFCPELTTNVKALRWQCIECKTCSACRVQGRNADNMLFCDSCDRGFHMECCDPPLSRMPKGMWICQVCRPKKKGRKLLHEKAAQIKRRYAKPIGRPKNKLKQRLLSVTSDEGSMNAFTGRGSPGRGQKTKVCTTPSSGHAASGKDSSSRLAVTDPTRPGATTKITTTSTYISASTLKVNKKTKGLIDGLTKFFTPSPDGRRSRGEIIDFSKHYRPRKKVSQKQSCTSHVLATDTEIKINIKQESADVNVIGNKDVVTEEDLDVFKQAQELSWEKIECESGVEDCGRYPSVIEFGKYEIQTWYSSPYPQEYARLPKLYLCEFCLKYMKSKNILLRHSKKCGWFHPPANEIYRRKDLSVFEVDGNMSKIYCQNLCLLAKLFLDHKTLYYDVEPFLFYVLTKNDEKGCHLVGYFSKEKLCQQKYNVSCIMIMPQHQRQGFGRFLIDFSYLLSRREGQAGSPEKPLSDLGRLSYLAYWKSVILEYLYHHHERHISIKAISRATGMCPHDIATTLQHLHMIDKRDGRFVIIRREKLILSHMEKLKTCSRANELDPDSLRWTPILISNAAVSEEEREAEKEAERLMEQASCWEKEEQEILSTRANSRQSPAKVQSKNKYLHSPESRPVTGERGQLLELSKESSEEEEEEEDEEEEEEEEEEEEDEEEEEEEEEEEEEENIQSSPPRLTKPQSVAIKRKRPFVLKKKRGRKRRRINSSVTTETISETTEVLNEPFDNSDEERPMPQLEPTCEIEVEEDGRKPVLRKAFQHQPGKKRQTEEEEGKDNHCFKNADPCRNNMNDDSSNLKEGSKDNPEPLKCKQVWPKGTKRGLSKWRQNKERKTGFKLNLYTPPETPMEPDEQVTVEEQKETSEGKTSPSPIRIEEEVKETGEALLPQEENRREETCAPVSPNTSPGEKPEDDLIKPEEEEEEEEEEEEEEEEEEGEEEEGGGNVEKDPDGAKSQEKEEPEISTEKEDSARLDDHEEEEEEDEEPSHNEDHDADDEDDSHMESAEVEKEELPRESFKEVLENQETFLDLNVQPGHSNPEVLMDCGVDLTASCNSEPKELAGDPEAVPESDEEPPPGEQAQKQDQKNSKEVDTEFKEGNPATMEIDSETVQAVQSLTQESSEQDDTFQDCAETQEACRSLQNYTRADQSPQIATTLDDCQQSDHSSPVSSVHSHPGQSVRSVNSPSVPALENSYAQISPDQSAISVPSLQNMETSPMMDVPSVSDHSQQVVDSGFSDLGSIESTTENYENPSSYDSTMGGSICGNGSSQNSCSYSNLTSSSLTQSSCAVTQQMSNISGSCSMLQQTSISSPPTCSVKSPQGCVVERPPSSSQQLAQCSMAANFTPPMQLAEIPETSNANIGLYERMGQSDFGAGHYPQPSATFSLAKLQQLTNTLIDHSLPYSHSAAVTSYANSASLSTPLSNTGLVQLSQSPHSVPGGPQAQATMTPPPNLTPPPMNLPPPLLQRNMAASNIGISHSQRLQTQIASKGHISMRTKSASLSPAAATHQSQIYGRSQTVAMQGPARTLTMQRGMNMSVNLMPAPAYNVNSVNMNMNTLNAMNGYSMSQPMMNSGYHSNHGYMNQTPQYPMQMQMGMMGTQPYAQQPMQTPPHGNMMYTAPGHHGYMNTGMSKQSLNGSYMRR

SEQ ID NO: 50522 - protein, 1781 aa, Homo sapiens
MVKLANPLYTEWILEAIQKIKKQKQRPSEERICHAVSTSHGLDKKTVSEQLELSVQDGSVLKVTNKGLASYKDPDNPGRFSSVKPGTFPKSAKGSRGSCNDLRNVDWNKLLRRAIEGLEEPNGSSLKNIEKYLRSQSDLTSTTNNPAFQQRLRLGAKRAVNNGRLLKDGPQYRVNYGSLDGKGAPQYPSAFPSSLPPVSLLPHEKDQPRADPIPICSFCLGTKESNREKKPEELLSCADCGSSGHPSCLKFCPELTTNVKALRWQCIECKTCSACRVQGRNADNMLFCDSCDRGFHMECCDPPLSRMPKGMWICQVCRPKKKGRKLLHEKAAQIKRRYAKPIGRPKNKLKQRLLSVTSDEGSMNAFTGRGSPDTEIKINIKQESADVNVIGNKDVVTEEDLDVFKQAQELSWEKIECESGVEDCGRYPSVIEFGKYEIQTWYSSPYPQEYARLPKLYLCEFCLKYMKSKNILLRHSKKCGWFHPPANEIYRRKDLSVFEVDGNMSKIYCQNLCLLAKLFLDHKTLYYDVEPFLFYVLTKNDEKGCHLVGYFSKEKLCQQKYNVSCIMIMPQHQRQGFGRFLIDFSYLLSRREGQAGSPEKPLSDLGRLSYLAYWKSVILEYLYHHHERHISIKAISRATGMCPHDIATTLQHLHMIDKRDGRFVIIRREKLILSHMEKLKTCSRANELDPDSLRWTPILISNAAVSEEEREAEKEAERLMEQASCWEKEEQEILSTRANSRQSPAKVQSKNKYLHSPESRPVTGERGQLLELSKESSEEEEEEEDEEEEEEEEEEEEDEEEEEEEEEEEEEENIQSSPPRLTKPQSVAIKRKRPFVLKKKRGRKRRRINSSVTTETISETTEVLNEPFDNSDEERPMPQLEPTCEIEVEEDGRKPVLRKAFQHQPGKKRQTEEEEGKDNHCFKNADPCRNNMNDDSSNLKEGSKDNPEPLKCKQVWPKGTKRGLSKWRQNKERKTGFKLNLYTPPETPMEPDEQVTVEEQKETSEGKTSPSPIRIEEEVKETGEALLPQEENRREETCAPVSPNTSPGEKPEDDLIKPEEEEEEEEEEEEEEEEEEGEEEEGGGNVEKDPDGAKSQEKEEPEISTEKEDSARLDDHEEEEEEDEEPSHNEDHDADDEDDSHMESAEVEKEELPRESFKEVLENQETFLDLNVQPGHSNPEVLMDCGVDLTASCNSEPKELAGDPEAVPESDEEPPPGEQAQKQDQKNSKEVDTEFKEGNPATMEIDSETVQAVQSLTQESSEQDDTFQDCAETQEACRSLQNYTRADQSPQIATTLDDCQQSDHSSPVSSVHSHPGQSVRSVNSPSVPALENSYAQISPDQSAISVPSLQNMETSPMMDVPSVSDHSQQVVDSGFSDLGSIESTTENYENPSSYDSTMGGSICGNGSSQNSCSYSNLTSSSLTQSSCAVTQQMSNISGSCSMLQQTSISSPPTCSVKSPQGCVVERPPSSSQQLAQCSMAANFTPPMQLAEIPETSNANIGLYERMGQSDFGAGHYPQPSATFSLAKLQQLTNTLIDHSLPYSHSAAVTSYANSASLSTPLSNTGLVQLSQSPHSVPGGPQAQATMTPPPNLTPPPMNLPPPLLQRNMAASNIGISHSQRLQTQIASKGHISMRTKSASLSPAAATHQSQIYGRSQTVAMQGPARTLTMQRGMNMSVNLMPAPAYNVNSVNMNMNTLNAMNGYSMSQPMMNSGYHSNHGYMNQTPQYPMQMQMGMMGTQPYAQQPMQTPPHGNMMYTAPGHHGYMNTGMSKQSLNGSYMRR

SEQ ID NO: 50523 - protein, 1781 aa, Homo sapiens; identical to SEQ ID NO: 50522

SEQ ID NO: 50524 - protein, 1781 aa, Homo sapiens; identical to SEQ ID NO: 50522

SEQ ID NO: 50525 - protein, 1663 aa, Homo sapiens
MTDRFWDQWYLWYLRLLRLLDRGSFRNDGLKASDVLPILKEKVAFVSGGRDKRGGPILTFPARSNHDRIRQEDLRKLVTYLASVPSEDVCKRGFTVIIDMRGSKWDLIKPLLKTLQEAFPAEIHVALIIKPDNFWQKQKTNFGSSKFIFETSMVSVEGLTKLVDPSQLTEEFDGSLDYNHEEWIELRLSLEEFFNSAVHLLSRLEDLQEMLARKEFPVDVEGSRRLIDEHTQLKKKVLKAPVEELDREGQRLLQCIRCSDGFSGRNCIPGSADFQSLVPKITSLLDKLHSTRQHLHQMWHVRKLKLDQCFQLRLFEQDAEKMFDWISHNKELFLQSHTEIGVSYQYALDLQTQHNHFAMNSMNAYVNINRIMSVASRLSEAGHYASQQIKQISTQLDQEWKSFAAALDERSTILAMSAVFHQKAEQFLSGVDAWCKMCSEGGLPSEMQDLELAIHHHQTLYEQVTQAYTEVSQDGKALLDVLQRPLSPGNSESLTATANYSKAVHQVLDVVHEVLHHQRRLESIWQHRKVRLHQRLQLCVFQQDVQQVLDWIENHGEAFLSKHTGVGKSLHRARALQKRHDDFEEVAQNTYTNADKLLEAAEQLAQTGECDPEEIYKAARHLEVRIQDFVRRVEQRKLLLDMSVSFHTHTKELWTWMEDLQKEMLEDVCADSVDAVQELIKQFQQQQTATLDATLNVIKEGEDLIQQLRSAPPSLGEPSEARDSAVSNNKTPHSSSISHIESVLQQLDDAQVQMEELFHERKIKLDIFLQLRIFEQYTIEVTAELDAWNEDLLRQMNDFNTEDLTLAEQRLQRHTERKLAMNNMTFEVIQQGQDLHQYITEVQASGIELICEKDIDLAAQVQELLEFLHEKQHELELNAEQTHKRLEQCLQLRHLQAEVKQVLGWIRNGESMLNASLVNASSLSEAEQLQREHEQFQLAIESLFHATSLQKTHQSALQVQQKAEVLLQAGHYDADAIRECAEKVALHWQQLMLKMEDRLKLVNASVAFYKTSEQVCSVLESLEQEYRRDEDWCGGRDKLGPAAEIDHVIPLISKHLEQKEAFLKACTLARRNAEVFLKYIHRNNVSMPSVASHTRGPEQQVKAILSELLQRENRVLHFWTLKKRRLDQCQQYVVFERSAKQALDWIQETGEFYLSTHTSTGETTEETQELLKEYGEFRVPAKQTKEKVKLLIQLADSFVEKGHIHATEIRKWVTTVDKHYRDFSLRMGKYRYSLEKALGVNTEDNKDLELDIIPASLSDREVKLRDANHEVNEEKRKSARKKEFIMAELLQTEKAYVRDLHECLETYLWEMTSGVEEIPPGILNKEHIIFGNIQEIYDFHNNIFLKELEKYEQLPEDVGHCFVTWADKFQMYVTYCKNKPDSNQLILEHAGTFFDEIQQRHGLANSISSYLIKPVQRITKYQLLLKELLTCCEEGKGELKDGLEVMLSVPKKANDAMHVSMLEGFDENLDVQGELILQDAFQVWDPKSLIRKGRERHLFLFEISLVFSKEIKDSSGHTKYVYKNKLLTSELGVTEHVEGDPCKFALWSGRTPSSDNKTVLKASNIETKQEWIKNIREVIQERIIHLKGALKEPLQLPKTPAKQRNNSKRDGVEDIDSQGDGSSQPDTISIASRTSQNTVDSDKDGNLVPRWHLGPGDPFSTYV

SEQ ID NO: 50526 - protein, 1289 aa, Homo sapiens
MKGGDRAYTRGPSLGWLFAKCCCCFPCRDAYSHSSSENGGKSESVANLQAQPSLNSIHSSPGPKRSTNTLKKWLTSPVRRLNSGKADGNIKKQKKVRDGRKSFDLGSPKPGDETTPQGDSADEKSKKGWGEDEPDEESHTPLPPPMKIFDNDPTQDEMSSSLLAARQASTEVPTAADLVNAIEKLVKNKLSLEGSSYRGSLKDPAGCLNEGMAPPTPPKNPEEEQKAKALRGRMFVLNELVQTEKDYVKDLGIVVEGFMKRIEEKGVPEDMRGKDKIVFGNIHQIYDWHKDFFLAELEKCIQEQDRLAQLFIKHERKLHIYVWYCQNKPRSEYIVAEYDAYFEEVKQEINQRLTLSDFLIKPIQRITKYQLLLKDFLRYSEKAGLECSDIEKAVELMCLVPKRCNDMMNLGRLQGFEGTLTAQGKLLQQDTFYVIELDAGMQSRTKERRVFLFEQIVIFSELLRKGSLTPGYMFKRSIKMNYLVLEENVDNDPCKFALMNRETSERVVLQAANADIQQAWVQDINQVLETQRDFLNALQSPIEYQRKERSTAVMRSQPARLPQASPRPYSSVPAGSEKPPKGSSYNPPLPPLKISTSNGSPGFEYHQPGDKFEASKQNDLGGCNGTSSMAVIKDYYALKENEICVSQGEVVQVLAVNQQNMCLVYQPASDHSPAAEGWVPGSILAPLTKATAAESSDGSIKKSCSWHTLRMRKRAEVENTGKNEATGPRKPKDILGNKVSVKETNSSEESECDDLDPNTSMEILNPNFIQEVAPEFLVPLVDVTCLLGDTVILQCKVCGRPKPTITWKGPDQNILDTDNSSATYTVSSCDSGEITLKICNLMPQDSGIYTCIATNDHGTTSTSATVKVQGVPAAPNRPIAQERSCTSVILRWLPPSSTGNCTISGYTVEYREEGSQIWQQSVASTLDTYLVIEDLSPGCPYQFRVSASNPWGISLPSEPSEFVRLPEYDAAADGATISWKENFDSAYTELNEIGRGRFSIVKKCIHKATRKDVAVKFVSKKMKKKEQAAHEAALLQHLQHPQYITLHDTYESPTSYILILELMDDGRLLDYLMNHDELMEEKVAFYIRDIMEALQYLHNCRVAHLDIKPENLLIDLRIPVPRVKLIDLEDAVQISGHFHIHHLLGNPEFAAPEVIQGIPVSLGTDIWSIGVLTYVMLSGVSPFLDESKEETCINVCRVDFSFPHEYFCGVSNAARDFINVILQEDFRRRPTAATCLQHPWLQPHNGSYSKIPLDTSRLACFIERRKHQNDVRPIPNVKSYIVNRVNQGT

SEQ ID NO: 50527 - protein, 2986 aa, Homo sapiens
MTDRFWDQWYLWYLRLLRLLDRGSFRNDGLKASDVLPILKEKVAFVSGGRDKRGGPILTFPARSNHDRIRQEDLRKLVTYLASVPSEDVCKRGFTVIIDMRGSKWDLIKPLLKTLQEAFPAEIHVALIIKPDNFWQKQKTNFGSSKFIFETSMVSVEGLTKLVDPSQLTEEFDGSLDYNHEEWIELRLSLEEFFNSAVHLLSRLEDLQEMLARKEFPVDVEGSRRLIDEHTQLKKKVLKAPVEELDREGQRLLQCIRCSDGFSGRNCIPGSADFQSLVPKITSLLDKLHSTRQHLHQMWHVRKLKLDQCFQLRLFEQDAEKMFDWISHNKELFLQSHTEIGVSYQYALDLQTQHNHFAMNSMNAYVNINRIMSVASRLSEAGHYASQQIKQISTQLDQEWKSFAAALDERSTILAMSAVFHQKAEQFLSGVDAWCKMCSEGGLPSEMQDLELAIHHHQTLYEQVTQAYTEVSQDGKALLDVLQRPLSPGNSESLTATANYSKAVHQVLDVVHEVLHHQRRLESIWQHRKVRLHQRLQLCVFQQDVQQVLDWIENHGEAFLSKHTGVGKSLHRARALQKRHDDFEEVAQNTYTNADKLLEAAEQLAQTGECDPEEIYKAARHLEVRIQDFVRRVEQRKLLLDMSVSFHTHTKELWTWMEDLQKEMLEDVCADSVDAVQELIKQFQQQQTATLDATLNVIKEGEDLIQQLRSAPPSLGEPSEARDSAVSNNKTPHSSSISHIESVLQQLDDAQVQMEELFHERKIKLDIFLQLRIFEQYTIEVTAELDAWNEDLLRQMNDFNTEDLTLAEQRLQRHTERKLAMNNMTFEVIQQGQDLHQYITEVQASGIELICEKDIDLAAQVQELLEFLHEKQHELELNAEQTHKRLEQCLQLRHLQAEVKQVLGWIRNGESMLNASLVNASSLSEAEQLQREHEQFQLAIESLFHATSLQKTHQSALQVQQKAEVLLQAGHYDADAIRECAEKVALHWQQLMLKMEDRLKLVNASVAFYKTSEQVCSVLESLEQEYRRDEDWCGGRDKLGPAAEIDHVIPLISKHLEQKEAFLKACTLARRNAEVFLKYIHRNNVSMPSVASHTRGPEQQVKAILSELLQRENRVLHFWTLKKRRLDQCQQYVVFERSAKQALDWIQETGEFYLSTHTSTGETTEETQELLKEYGEFRVPAKQTKEKVKLLIQLADSFVEKGHIHATEIRKWVTTVDKHYRDFSLRMGKYRYSLEKALGVNTEDNKDLELDIIPASLSDREVKLRDANHEVNEEKRKSARKKEFIMAELLQTEKAYVRDLHECLETYLWEMTSGVEEIPPGILNKEHIIFGNIQEIYDFHNNIFLKELEKYEQLPEDVGHCFVTWADKFQMYVTYCKNKPDSNQLILEHAGTFFDEIQQRHGLANSISSYLIKPVQRITKYQLLLKELLTCCEEGKGELKDGLEVMLSVPKKANDAMHVSMLEGFDENLDVQGELILQDAFQVWDPKSLIRKGRERHLFLFEISLVFSKEIKDSSGHTKYVYKNKLLTSELGVTEHVEGDPCKFALWSGRTPSSDNKTVLKASNIETKQEWIKNIREVIQERIIHLKGALKEPLQLPKTPAKQRNNSKRDGVEDIDSQGDGSSQPDTISIASRTSQNTVDSDKLSGGCELTVVLQDFSAGHSSELTIQVGQTVELLERPSERPGWCLVRTTERSPPLEGLVPSSALCISHSRSSVEMDCFFPLVKDAYSHSSSENGGKSESVANLQAQPSLNSIHSSPGPKRSTNTLKKWLTSPVRRLNSGKADGNIKKQKKVRDGRKSFDLGSPKPGDETTPQGDSADEKSKKGWGEDEPDEESHTPLPPPMKIFDNDPTQDEMSSSLLAARQASTEVPTAADLVNAIEKLVKNKLSLEGSSYRGSLKDPAGCLNEGMAPPTPPKNPEEEQKAKALRGRMFVLNELVQTEKDYVKDLGIVVEGFMKRIEEKGVPEDMRGKDKIVFGNIHQIYDWHKDFFLAELEKCIQEQDRLAQLFIKHERKLHIYVWYCQNKPRSEYIVAEYDAYFEEVKQEINQRLTLSDFLIKPIQRITKYQLLLKDFLRYSEKAGLECSDIEKAVELMCLVPKRCNDMMNLGRLQGFEGTLTAQGKLLQQDTFYVIELDAGMQSRTKERRVFLFEQIVIFSELLRKGSLTPGYMFKRSIKMNYLVLEENVDNDPCKFALMNRETSERVVLQAANADIQQAWVQDINQVLETQRDFLNALQSPIEYQRKERSTAVMRSQPARLPQASPRPYSSVPAGSEKPPKGSSYNPPLPPLKISTSNGSPGFEYHQPGDKFEASKQNDLGGCNGTSSMAVIKDYYALKENEICVSQGEVVQVLAVNQQNMCLVYQPASDHSPAAEGWVPGSILAPLTKATAAESSDGSIKKSCSWHTLRMRKRAEVENTGKNEATGPRKPKDILGNKVSVKETNSSEESECDDLDPNTSMEILNPNFIQEVAPEFLVPLVDVTCLLGDTVILQCKVCGRPKPTITWKGPDQNILDTDNSSATYTVSSCDSGEITLKICNLMPQDSGIYTCIATNDHGTTSTSATVKVQGVPAAPNRPIAQERSCTSVILRWLPPSSTGNCTISGYTVEYREEGSQIWQQSVASTLDTYLVIEDLSPGCPYQFRVSASNPWGISLPSEPSEFVRLPEYDAAADGATISWKENFDSAYTELNEIGRGRFSIVKKCIHKATRKDVAVKFVSKKMKKKEQAAHEAALLQHLQHPQYITLHDTYESPTSYILILELMDDGRLLDYLMNHDELMEEKVAFYIRDIMEALQYLHNCRVAHLDIKPENLLIDLRIPVPRVKLIDLEDAVQISGHFHIHHLLGNPEFAAPEVIQGIPVSLGTDIWSIGVLTYVMLSGVSPFLDESKEETCINVCRVDFSFPHEYFCGVSNAARDFINVILQEDFRRRPTAATCLQHPWLQPHNGSYSKIPLDTSRLACFIERRKHQNDVRPIPNVKSYIVNRVNQGT

SEQ ID NO: 50528 - protein, 1257 aa, Homo sapiens
MKGGDRAYTRGPSLGWLFAKCCCCFPCRDAYSHSSSENGGKSESVANLQAQPSLNSIHSSPGPKRSTNTLKKWLTSPVRRLNSGKADGNIKKQKKVRDGRKSFDLGSPKPGDETTPQGDSADEKSKKGWGEDEPDEESHTPLPPPMKIFDNDPTQDEMSLEGSSYRGSLKDPAGCLNEGMAPPTPPKNPEEEQKAKALRGRMFVLNELVQTEKDYVKDLGIVVEGFMKRIEEKGVPEDMRGKDKIVFGNIHQIYDWHKDFFLAELEKCIQEQDRLAQLFIKHERKLHIYVWYCQNKPRSEYIVAEYDAYFEEVKQEINQRLTLSDFLIKPIQRITKYQLLLKDFLRYSEKAGLECSDIEKAVELMCLVPKRCNDMMNLGRLQGFEGTLTAQGKLLQQDTFYVIELDAGMQSRTKERRVFLFEQIVIFSELLRKGSLTPGYMFKRSIKMNYLVLEENVDNDPCKFALMNRETSERVVLQAANADIQQAWVQDINQVLETQRDFLNALQSPIEYQRKERSTAVMRSQPARLPQASPRPYSSVPAGSEKPPKGSSYNPPLPPLKISTSNGSPGFEYHQPGDKFEASKQNDLGGCNGTSSMAVIKDYYALKENEICVSQGEVVQVLAVNQQNMCLVYQPASDHSPAAEGWVPGSILAPLTKATAAESSDGSIKKSCSWHTLRMRKRAEVENTGKNEATGPRKPKDILGNKVSVKETNSSEESECDDLDPNTSMEILNPNFIQEVAPEFLVPLVDVTCLLGDTVILQCKVCGRPKPTITWKGPDQNILDTDNSSATYTVSSCDSGEITLKICNLMPQDSGIYTCIATNDHGTTSTSATVKVQGVPAAPNRPIAQERSCTSVILRWLPPSSTGNCTISGYTVEYREEGSQIWQQSVASTLDTYLVIEDLSPGCPYQFRVSASNPWGISLPSEPSEFVRLPEYDAAADGATISWKENFDSAYTELNEIGRGRFSIVKKCIHKATRKDVAVKFVSKKMKKKEQAAHEAALLQHLQHPQYITLHDTYESPTSYILILELMDDGRLLDYLMNHDELMEEKVAFYIRDIMEALQYLHNCRVAHLDIKPENLLIDLRIPVPRVKLIDLEDAVQISGHFHIHHLLGNPEFAAPEVIQGIPVSLGTDIWSIGVLTYVMLSGVSPFLDESKEETCINVCRVDFSFPHEYFCGVSNAARDFINVILQEDFRRRPTAATCLQHPWLQPHNGSYSKIPLDTSRLACFIERRKHQNDVRPIPNVKSYIVNRVNQGT

SEQ ID NO: 50529 - protein, 1654 aa, Homo sapiens
MTDRFWDQWYLWYLRLLRLLDRGSFRNDGLKASDVLPILKEKVAFVSGGRDKRGGPILTFPARSNHDRIRQEDLRKLVTYLASVPSEDVCKRGFTVIIDMRGSKWDLIKPLLKTLQEAFPAEIHVALIIKPDNFWQKQKTNFGSSKFIFETSMVSVEGLTKLVDPSQLTEEFDGSLDYNHEEWIELRLSLEEFFNSAVHLLSRLEDLQEMLARKEFPVDVEGSRRLIDEHTQLKKKVLKAPVEELDREGQRLLQCIRCSDGFSGRNCIPGSADFQSLVPKITSLLDKLHSTRQHLHQMWHVRKLKLDQCFQLRLFEQDAEKMFDWISHNKELFLQSHTEIGVSYQYALDLQTQHNHFAMNSMNAYVNINRIMSVASRLSEAGHYASQQIKQISTQLDQEWKSFAAALDERSTILAMSAVFHQKAEQFLSGVDAWCKMCSEGGLPSEMQDLELAIHHHQTLYEQVTQAYTEVSQDGKALLDVLQRPLSPGNSESLTATANYSKAVHQVLDVVHEVLHHQRRLESIWQHRKVRLHQRLQLCVFQQDVQQVLDWIENHGEAFLSKHTGVGKSLHRARALQKRHDDFEEVAQNTYTNADKLLEAAEQLAQTGECDPEEIYKAARHLEVRIQDFVRRVEQRKLLLDMSVSFHTHTKELWTWMEDLQKEMLEDVCADSVDAVQELIKQFQQQQTATLDATLNVIKEGEDLIQQLRSAPPSLGEPSEARDSAVSNNKTPHSSSISHIESVLQQLDDAQVQMEELFHERKIKLDIFLQLRIFEQYTIEVTAELDAWNEDLLRQMNDFNTEDLTLAEQRLQRHTERKLAMNNMTFEVIQQGQDLHQYITEVQASGIELICEKDIDLAAQVQELLEFLHEKQHELELNAEQTHKRLEQCLQLRHLQAEVKQVLGWIRNGESMLNASLVNASSLSEAEQLQREHEQFQLAIEKTHQSALQVQQKAEVLLQAGHYDADAIRECAEKVALHWQQLMLKMEDRLKLVNASVAFYKTSEQVCSVLESLEQEYRRDEDWCGGRDKLGPAAEIDHVIPLISKHLEQKEAFLKACTLARRNAEVFLKYIHRNNVSMPSVASHTRGPEQQVKAILSELLQRENRVLHFWTLKKRRLDQCQQYVVFERSAKQALDWIQETGEFYLSTHTSTGETTEETQELLKEYGEFRVPAKQTKEKVKLLIQLADSFVEKGHIHATEIRKWVTTVDKHYRDFSLRMGKYRYSLEKALGVNTEDNKDLELDIIPASLSDREVKLRDANHEVNEEKRKSARKKEFIMAELLQTEKAYVRDLHECLETYLWEMTSGVEEIPPGILNKEHIIFGNIQEIYDFHNNIFLKELEKYEQLPEDVGHCFVTWADKFQMYVTYCKNKPDSNQLILEHAGTFFDEIQQRHGLANSISSYLIKPVQRITKYQLLLKELLTCCEEGKGELKDGLEVMLSVPKKANDAMHVSMLEGFDENLDVQGELILQDAFQVWDPKSLIRKGRERHLFLFEISLVFSKEIKDSSGHTKYVYKNKLLTSELGVTEHVEGDPCKFALWSGRTPSSDNKTVLKASNIETKQEWIKNIREVIQERIIHLKGALKEPLQLPKTPAKQRNNSKRDGVEDIDSQGDGSSQPDTISIASRTSQNTVDSDKDGNLVPRWHLGPGDPFSTYV

SEQ ID NO: 50530 - protein, 262 aa, Homo sapiens
MWFLVLCLALSLGGTGAAPPIQSRIVGGWECEQHSQPWQAALYHFSTFQCGGILVHRQWVLTAAHCISDNYQLWLGRHNLFDDENTAQFVHVSESFPHPGFNMSLLENHTRQADEDYSHDLMLLRLTEPADTITDAVKVVELPTEEPEVGSTCLASGWGSIEPENFSFPDDLQCVDLKILPNDECKKAHVQKVTDFMLCVGHLEGGKDTCVGDSGGPLMCDGVLQGVTSWGYVPCGTPNKPSVAVRVLSYVKWIEDTIAENS

SEQ ID NO: 50531 - protein, 160 aa, Homo sapiens
MSLLENHTRQADEDYSHDLMLLRLTEPADTITDAVKVVELPTEEPEVGSTCLASGWGSIEPENFSFPDDLQCVDLKILPNDECKKAHVQKVTDFMLCVGHLEGGKDTCVGDSGGPLMCDGVLQGVTSWGYVPCGTPNKPSVAVRVLSYVKWIEDTIAENS

SEQ ID NO: 50532 - protein, 638 aa, Homo sapiens
MILFKQATYFISLFATVSCGCLTQLYENAFFRGGDVASMYTPNAQYCQMRCTFHPRCLLFSFLPASSINDMEKRFGCFLKDSVTGTLPKVHRTGAVSGHSLKQCGHQISACHRDIYKGVDMRGVNFNVSKVSSVEECQKRCTSNIRCQFFSYATQTFHKAEYRNNCLLKYSPGGTPTAIKVLSNVESGFSLKPCALSEIGCHMNIFQHLAFSDVDVARVLTPDAFVCRTICTYHPNCLFFTFYTNVWKIESQRNVCLLKTSESGTPSSSTPQENTISGYSLLTCKRTLPEPCHSKIYPGVDFGGEELNVTFVKGVNVCQETCTKMIRCQFFTYSLLPEDCKEEKCKCFLRLSMDGSPTRIAYGTQGSSGYSLRLCNTGDNSVCTTKTSTRIVGGTNSSWGEWPWQVSLQVKLTAQRHLCGGSLIGHQWVLTAAHCFDGLPLQDVWRIYSGILNLSDITKDTPFSQIKEIIIHQNYKVSEGNHDIALIKLQAPLNYTEFQKPICLPSKGDTSTIYTNCWVTGWGFSKEKGEIQNILQKVNIPLVTNEECQKRYQDYKITQRMVCAGYKEGGKDACKGDSGGPLVCKHNGMWRLVGITSWGEGCARREQPGVYTKVAEYMDWILEKTQSSDGKAQMQSPA

SEQ ID NO: 50533 - protein, 514 aa, Homo sapiens
MYTPNAQYCQMRCTFHPRCLLFSFLPASSINDMEKRFGCFLKDSVTGTLPKVHRTGAVSGHSLKQCGHQISACHRDIYKGVDMRGVNFNVSKVSSVEECQKRCTSNIRCQFFSYATQTFHKAEYRNNCLLKYSPGGTPTAIKVLSNVESGFSLKPCALSEIGCHMNIFQHLAFSDVDVARVLTPDAFVCRTICTYHPNCLFFTFYTNVWKIESQRNVCLLKTSESGTPSSSTPQENTISGYSLLTCKRTLPEPCHSKIYPGVDFGGEELNVTFVKGVNVCQETCTKMIRCQFFTYSLLPEDCKEEKCKCFLRLSMDGSPTRIAYGTQGSSGYSLRLCNTGDNSVCTTKTSTRIVGGTNSSWGEWPWQVSLQVKLTAQRHLCGGSLIGHQWVLTAAHCFDGLPLQDVWRIYSGILNLSDITKDTPFSQIKEIIIHQNYKVSEGNHDIALIKLQAPLNYTEFQKPICLPSKGDTSTIYTNCWVTGWGFSKEKGRFRWSLSLQTQWNVAFGGHHQLG

SEQ ID NO: 50534 - protein, 148 aa, Homo sapiens
MILFKQATYFISLFATVSCGCLTQLYENAFFRGGDVASMYTPNAQYCQMRCTFHPRCLLFSFLPASSINDMEKRFGCFLKDSVTGTLPKVHRTGAVSGHSLKQCGHQISACHRDIYKGVDMRGVNFNVSKVSSVEECQKRCTSNIRCQ

SEQ ID NO: 50535 - protein, 250 aa, Homo sapiens
MRILQLILLALATGLVGGETRIIKGFECKPHSQPWQAALFEKTRLLCGATLIAPRWLLTAAHCLKPRYIVHLGQHNLQKEEGCEQTRTATESFPHPGFNNSLPNKDHRNDIMLVKMASPVSITWAVRPLTLSSRCVTAGTSCLISGWGSTSSPQLRLPHTLRCANITIIEHQKCENAYPGNITDTMVCASVQEGGKDSCQGDSGGPLVCNQSLQGIISWGQDPCAITRKPGVYTKVCKYVDWIQETMKNN

SEQ ID NO: 50536 - protein, 282 aa, Homo sapiens
MQRLRWLRDWKSSGRGLTAAKEPGARSSPLQAMRILQLILLALATGLVGGETRIIKGFECKPHSQPWQAALFEKTRLLCGATLIAPRWLLTAAHCLKPRYIVHLGQHNLQKEEGCEQTRTATESFPHPGFNNSLPNKDHRNDIMLVKMASPVSITWAVRPLTLSSRCVTAGTSCLISGWGSTSSPQLRLPHTLRCANITIIEHQKCENAYPGNITDTMVCASVQEGGKDSCQGDSGGPLVCNQSLQGIISWGQDPCAITRKPGVYTKVCKYVDWIQETMKNN

SEQ ID NO: 50537 - protein, 275 aa, Homo sapiens
MRILQLILLALATGLVGGETRIIKGFECKPHSQPWQAALFEKTRLLCGATLIAPRWLLTAAHCLKPWVSLTSPTHVSPDLSSSNYCLSHLSRYIVHLGQHNLQKEEGCEQTRTATESFPHPGFNNSLPNKDHRNDIMLVKMASPVSITWAVRPLTLSSRCVTAGTSCLISGWGSTSSPQLRLPHTLRCANITIIEHQKCENAYPGNITDTMVCASVQEGGKDSCQGDSGGPLVCNQSLQGIISWGQDPCAITRKPGVYTKVCKYVDWIQETMKNN

SEQ ID NO: 50538 - protein, 250 aa, Homo sapiens; identical to SEQ ID NO: 50535

SEQ ID NO: 50539 - protein, 282 aa, Homo sapiens; identical to SEQ ID NO: 50536

SEQ ID NO: 50540 - protein, 254 aa, Homo sapiens
MGLSIFLLLCVLGLSQAATPKIFNGTECGRNSQPWQVGLFEGTSLRCGGVLIDHRWVLTAAHCSGSRYWVRLGEHSLSQLDWTEQIRHSGFSVTHPGYLGASTSHEHDLRLLRLRLPVRVTSSVQPLPLPNDCATAGTECHVSGWGITNHPRNPFPDLLQCLNLSIVSHATCHGVYPGRITSNMVCAGGVPGQDACQGDSGGPLVCGGVLQGLVSWGSVGPCGQDGIPGVYTYICNSTLVGLGTSWNFNSCQPF

SEQ ID NO: 50541 - protein, 144 aa, Homo sapiens
MALSVGVTHSRGRWGCLRAPACAAGVSLLTTGGSSQRLTAAADPFPDLLQCLNLSIVSHATCHGVYPGRITSNMVCAGGVPGQDACQGDSGGPLVCGGVLQGLVSWGSVGPCGQDGIPGVYTYICNSTLVGLGTSWNFNSCQPF

SEQ ID NO: 50542 - protein, 248 aa, Homo sapiens
MGLSIFLLLCVLGLSQAATPKIFNGTECGRNSQPWQVGLFEGTSLRCGGVLIDHRWVLTAAHCSGSRYWVRLGEHSLSQLDWTEQIRHSGFSVTHPGYLGASTSHEHDLRLLRLRLPVRVTSSVQPLPLPNDCATAGTECHVSGWGITNHPRNPFPDLLQCLNLSIVSHATCHGVYPGRITSNMVCAGGVPGQDACQGDSGGPLVCGGVLQGLVSWGSVGPCGQDGIPGVYTYICKYVDWIRMIMRNN

SEQ ID NO: 50543 - protein, 248 aa, Homo sapiens; identical to SEQ ID NO: 50542

SEQ ID NO: 50544 - protein, 111 aa, Homo sapiens
MGLSIFLLLCVLGLSQAATPKIFNGTECGRNSQPWQVGLFEGTSLRCGGVLIDHRWVLTAAHCSGRPIPGSAPVPQPLHRLPCHLPWCVSRENHEQHGVCRRRPGAGCLPG

SEQ ID NO: 50545 - protein, 277 aa, Homo sapiens
MWPLALVIASLTLALSGGVSQESSKVLNTNGTSGFLPGGYTCFPHSQPWQAALLVQGRLLCGGVLVHPKWVLTAAHCLKEGLKVYLGKHALGRVEAGEQVREVVHSIPHPEYRRSPTHLNHDHDIMLLELQSPVQLTGYIQTLPLSHNNRLTPGTTCRVSGWGTTTSPQVNYPKTLQCANIQLRSDEECRQVYPGKITDNMLCAGTKEGGKDSCEGDSGGPLVCNRTLYGIVSWGDFPCGQPDRPGVYTRVSRYVLWIRETIRKYETQQQKWLKGPQ

SEQ ID NO: 50546 - protein, 125 aa, Homo sapiens
MWPLALVIASLTLALSGVNYPKTLQCANIQLRSDEECRQVYPGKITDNMLCAGTKEGGKDSCEGDSGGPLVCNRTLYGIVSWGDFPCGQPDRPGVYTRVSRYVLWIRETIRKYETQQQKWLKGPQ

SEQ ID NO: 50547 - protein, 98 aa, Homo sapiens
MGLIYKCLPEKVTVNIETRCLPGVFQGSQHQWDQWVSPRWLHLLPPLSALAGCPTSARAATLWGSPGPPQMGPHCRTLSKGGAQSLPRQARPRACGSW

SEQ ID NO: 50548 - protein, 93 aa, Homo sapiens
MWPLALVIASLTLALSGGEDFKEPSQGPRDVMAASRPEAFPKGLTLEPRPEKGGICGCLAPGTILGLKVGWLFSSGDTPWIHARATPECHTLG

SEQ ID NO: 50549 - protein, 277 aa, Homo sapiens; identical to SEQ ID NO: 50545

SEQ ID NO: 50550 - protein, 267 aa, Homo sapiens
MSLRVLGSGTWPSAPKMFLLLTALQVLAIAMTQSQEDENKIIGGHTCTRSSQPWQAALLAGPRRRFLCGGALLSGQWVITAAHCGRPILQVALGKHNLRRWEATQQVLRVVRQVTHPNYNSRTHDNDLMLLQLQQPARIGRAVRPIEVTQACASPGTSCRVSGWGTISSPIARYPASLQCVNINISPDEVCQKAYPRTITPGMVCAGVPQGGKDSCQGDSGGPLVCRGQLQGLVSWGMERCALPGYPGVYTNLCKYRSWIEETMRDK

SEQ ID NO: 50551 - protein, 267 aa, Homo sapiens; identical to SEQ ID NO: 50550

SEQ ID NO: 50552 - protein, 267 aa, Homo sapiens; identical to SEQ ID NO: 50550

SEQ ID NO: 50553 - protein, 161 aa, Homo sapiens
MWLLLTLSFLLASTAAQDGDKLLEGDECAPHSQPWQVALYERGRFNCGASLISPHWVLSAAHCQSRFMRVRLGEHNLRKRDGPEQLRTTSRVIPHPRYEARSHRNDIMLLRLVQPARLNPQVRPAVLPTRCPHPGEACVVSGWGLVSHNEPGTAGSPRSQG

SEQ ID NO: 50554 - protein, 256 aa, Homo sapiens
MWLLLTLSFLLASTAAQDGDKLLEGDECAPHSQPWQVALYERGRFNCGASLISPHWVLSAAHCQSRFMRVRLGEHNLRKRDGPEQLRTTSRVIPHPRYEARSHRNDIMLLRLVQPARLNPQVRPAVLPTRCPHPGEACVVSGWGLVSHNEPGTAGSPRSQVSLPDTLHCANISIISDTSCDKSYPGRLTNTMVCAGAEGRGAESCEGDSGGPLVCGGILQGIVSWGDVPCDNTTKPGVYTKVCHYLEWIRETMKRN

SEQ ID NO: 50555 - protein, 171 aa, Homo sapiens
MWLLLTLSFLLASTAAQDGDKLLEGDECAPHSQPWQVALYERGRFNCGASLISPHWVLSAAHCQSRFMRVRLGEHNLRKRDGPEQLRTTSRVIPHPRYEARSHRNDIMLLRLVQPARLNPQGDSGGPLVCGGILQGIVSWGDVPCDNTTKPGVYTKVCHYLEWIRETMKRN

SEQ ID NO: 50556 - protein, 162 aa, Homo sapiens
MWLLLTLSFLLASTAAQDGDKLLEGDECAPHSQPWQVALYERGRFNCGASLISPHWVLSAAHCQSRFMRVRLGEHNLRKRDGPEQLRTTSRVIPHPRYEARSHRNDIMLLRLVQPARLNPQVRPAVLPTRCPHPGEACVVSGWGLVSHNEPGTAGSPRSQGA

SEQ ID NO: 50557 - protein, 256 aa, Homo sapiens; identical to SEQ ID NO: 50554

SEQ ID NO: 50558 - protein, 261 aa, Homo sapiens
MWDLVLSIALSVGCTGAVPLIQSRIVGGWECEKHSQPWQVAVYSHGWAHCGGVLVHPQWVLTAAHCLKKNSQVWLGRHNLFEPEDTGQRVPVSHSFPHPLYNMSLLKHQSLRPDEDSSHDLMLLRLSEPAKITDVVKVLGLPTQEPALGTTCYASGWGSIEPEEFLRPRSLQCVSLHLLSNDMCARAYSEKVTEFMLCAGLWTGGKDTCGGDSGGPLVCNGVLQGITSWGPEPCALPEKPAVYTKVVHYRKWIKDTIAANP

SEQ ID NO: 50559 - protein, 223 aa, Homo sapiens
MWDLVLSIALSVGCTGAVPLIQSRIVGGWECEKHSQPWQVAVYSHGWAHCGGVLVHPQWVLTAAHCLKKNSQVWLGRHNLFEPEDTGQRVPVSHSFPHPLYNMSLLKHQSLRPDEDSSHDLMLLRLSEPAKITDVVKVLGLPTQEPALGTTCYASGWGSIEPEEFLRPRSLQCVSLHLLSNDMCARAYSEKVTEFMLCAGLWTGGKDTCGVSHPYSQHLEGKG

SEQ ID NO: 50560 - protein, 159 aa, Homo sapiens
MSLLKHQSLRPDEDSSHDLMLLRLSEPAKITDVVKVLGLPTQEPALGTTCYASGWGSIEPEEFLRPRSLQCVSLHLLSNDMCARAYSEKVTEFMLCAGLWTGGKDTCGGDSGGPLVCNGVLQGITSWGPEPCALPEKPAVYTKVVHYRKWIKDTIAANP

SEQ ID NO: 50561 - protein, 261 aa, Homo sapiens
MWVPVVFLTLSVTWIGAAPLILSRIVGGWECEKHSQPWQVLVASRGRAVCGGVLVHPQWVLTAAHCIRNKSVILLGRHSLFHPEDTGQVFQVSHSFPHPLYDMSLLKNRFLRPGDDSSHDLMLLRLSEPAELTDAVKVMDLPTQEPALGTTCYASGWGSIEPEEFLTPKKLQCVDLHVISNDVCAQVHPQKVTKFMLCAGRWTGGKSTCSGDSGGPLVCNGVLQGITSWGSEPCALPERPSLYTKVVHYRKWIKDTIVANP

SEQ ID NO: 50562 - protein, 220 aa, Homo sapiens
MWVPVVFLTLSVTWIGAAPLILSRIVGGWECEKHSQPWQVLVASRGRAVCGGVLVHPQWVLTAAHCIRNKSVILLGRHSLFHPEDTGQVFQVSHSFPHPLYDMSLLKNRFLRPGDDSSIEPEEFLTPKKLQCVDLHVISNDVCAQVHPQKVTKFMLCAGRWTGGKSTCSGDSGGPLVCNGVLQGITSWGSEPCALPERPSLYTKVVHYRKWIKDTIVANP

SEQ ID NO: 50563 - protein, 238 aa, Homo sapiens
MWVPVVFLTLSVTWIGAAPLILSRIVGGWECEKHSQPWQVLVASRGRAVCGGVLVHPQWVLTAAHCIRNKSVILLGRHSLFHPEDTGQVFQVSHSFPHPLYDMSLLKNRFLRPGDDSSHDLMLLRLSEPAELTDAVKVMDLPTQEPALGTTCYASGWGSIEPEEFLTPKKLQCVDLHVISNDVCAQVHPQKVTKFMLCAGRWTGGKSTCSWVILITELTMPALPMVLHGSLVPWRGGV

SEQ ID NO: 50564 - protein, 218 aa, Homo sapiens
MWVPVVFLTLSVTWIGAAPLILSRIVGGWECEKHSQPWQVLVASRGRAVCGGVLVHPQWVLTAAHCIRKPGDDSSHDLMLLRLSEPAELTDAVKVMDLPTQEPALGTTCYASGWGSIEPEEFLTPKKLQCVDLHVISNDVCAQVHPQKVTKFMLCAGRWTGGKSTCSGDSGGPLVCNGVLQGITSWGSEPCALPERPSLYTKVVHYRKWIKDTIVANP

SEQ ID NO: 50565 - protein, 69 aa, Homo sapiens
MWVPVVFLTLSVTWIGAAPLILSRIVGGWECEKHSQPWQVLVASRGRAVCGGVLVHPQWVLTAAHCIRK

SEQ ID NO: 50566 - protein, 254 aa, Homo sapiens
MATAGNPWGWFLGYLILGVAGSLVSGSCSQIINGEDCSPHSQPWQAALVMENELFCSGVLVHPQWVLSAAHCFQNSYTIGLGLHSLEADQEPGSQMVEASLSVRHPEYNRPLLANDLMLIKLDESVSESDTIRSISIASQCPTAGNSCLVSGWGLLANGRMPTVLQCVNVSVVSEEVCSKLYDPLYHPSMFCAGGGHDQKDSCNGDSGGPLICNGYLQGLVSFGKAPCGQVGVPGVYTNLCKFTEWIEKTVQAS

SEQ ID NO: 50567 - protein, 110 aa, Homo sapiens
MENELFCSGVLVHPQWVLSAAHCFQNSYTIGLGLHSLEADQEPGSQMVEASLSVRHPEYNRPLLANDLMLIKLDESVSESDTIRSISIASQCPTAGNSCLVSGWGLLANG

SEQ ID NO: 50568 - protein, 244 aa, Homo sapiens
MKKLMVVLSLIAAAWAEEQNKLVHGGPCDKTSHPYQAALYTSGHLLCGGVLIHPLWVLTAAHCKKPNLQVFLGKHNLRQRESSQEQSSVVRAVIHPDYDAASHDQDIMLLRLARPAKLSELIQPLPLERDCSANTTSCHILGWGKTADGDFPDTIQCAYIHLVSREECEHAYPGQITQNMLCAGDEKYGKDSCQGDSGGPLVCGDHLRGLVSWGNIPCGSKEKPGVYTNVCRYTNWIQKTIQAK

SEQ ID NO: 50569 - protein, 244 aa, Homo sapiens; identical to SEQ ID NO: 50568

SEQ ID NO: 50570 - protein, 120 aa, Homo sapiens
MKKLMVVLSLIAAAWAEEQNKLVHGGPCDKTSHPYQAALYTSGHLLCGGVLIHPLWVLTAAHCKKPVILGVRWYVETTSEALCHGVTSPVDQRRSQESTPTSADTRTGSKKPFRPSDPDM

SEQ ID NO: 50571 - protein, 137 aa, Homo sapiens
MLLRLARPAKLSELIQPLPLERDCSANTTSCHILGWGKTADGDFPDTIQCAYIHLVSREECEHAYPGQITQNMLCAGDEKYGKDSCQGDSGGPLVCGDHLRGLVSWGNIPCGSKEKPGVYTNVCRYTNWIQKTIQAK

SEQ ID NO: 50572 - protein, 40 aa, Homo sapiens
MKKLMVVLSLIAAGIFRSSWGSITFGKGRVPRSRVLLSGL

SEQ ID NO: 50573 - protein, 137 aa, Homo sapiens; identical to SEQ ID NO: 50571

SEQ ID NO: 50574 - protein, 260 aa, Homo sapiens
MGRPRPRAAKTWMFLLLLGGAWAGHSRAQEDKVLGGHECQPHSQPWQAALFQGQQLLCGGVLVGGNWVLTAAHCKKPKYTVRLGDHSLQNKDGPEQEIPVVQSIPHPCYNSSDVEDHNHDLMLLQLRDQASLGSKVKPISLADHCTQPGQKCTVSGWGTVTSPRENFPDTLNCAEVKIFPQKKCEDAYPGQITDGMVCAGSSKGADTCQGDSGGPLVCDGALQGITSWGSDPCGRSDKPGVYTNICRYLDWIKKIIGSKG

SEQ ID NO: 50575 - protein, 32 aa, Homo sapiens
MGRPRPRAAKTWMFLLLLGGAWAGRFWRPPGV

SEQ ID NO: 50576 - protein, 119 aa, Homo sapiens
MGRPRPRAAKTWMFLLLLGGAWAENFPDTLNCAEVKIFPQKKCEDAYPGQITDGMVCAGSSKGADTCQGDSGGPLVCDGALQGITSWGSDPCGRSDKPGVYTNICRYLDWIKKIIGSKG

SEQ ID NO: 50577 - protein, 305 aa, Homo sapiens
MGRPRPRAAKTWMFLLLLGGAWAACGSLDLLTKLYAENLPCVHLNPQWPSQPSHCPRGWRSNPLPPAAGHSRAQEDKVLGGHECQPHSQPWQAALFQGQQLLCGGVLVGGNWVLTAAHCKKPKYTVRLGDHSLQNKDGPEQEIPVVQSIPHPCYNSSDVEDHNHDLMLLQLRDQASLGSKVKPISLADHCTQPGQKCTVSGWGTVTSPRENFPDTLNCAEVKIFPQKKCEDAYPGQITDGMVCAGSSKGADTCQGDSGGPLVCDGALQGITSWGSDPCGRSDKPGVYTNICRYLDWIKKIIGSKG

SEQ ID NO: 50578 - protein, 260 aa, Homo sapiens; identical to SEQ ID NO: 50574

SEQ ID NO: 50579 - protein, 250 aa, Homo sapiens
MKLGLLCALLSLLAGHGWADTRAIGAEECRPNSQPWQAGLFHLTRLFCGATLISDRWLLTAAHCRKPYLWVRLGEHHLWKWEGPEQLFRVTDFFPHPGFNKDLSANDHNDDIMLIRLPRQARLSPAVQPLNLSQTCVSPGMQCLISGWGAVSSPKALFPVTLQCANISILENKLCHWAYPGHISDSMLCAGLWEGGRGSCQGDSGGPLVCNGTLAGVVSGGAEPCSRPRRPAVYTSVCHYLDWIQEIMEN

SEQ ID NO: 50580 - protein, 250 aa, Homo sapiens; identical to SEQ ID NO: 50579

SEQ ID NO: 50581 - protein, 61 aa, Homo sapiens
MKLGLLCALLSLLAGICGSALESTTSGNGRVRSSCSGLRTSSPTLASTRTSAPMTTMMTSC

SEQ ID NO: 50582 - protein, 680 aa, Homo sapiens
MVPGVPGAVLTLCLWLAASSGCLAAGPGAAAARRLDESLSAGSVQRARCASRCLSLQITRISAFFQHFQNNGSLVWCQNHKQCSKCLEPCKESGDLRKHQCQSFCEPLFPKKSYECLTSCEFLKYILLVKQGDCPAPEKASGFAAACVESCEVDNECSGVKKCCSNGCGHTCQVPKTLYKGVPLKPRKELRFTELQSGQLEVKWSSKFNISIEPVIYVVQRRWNYGIHPSEDDATHWQTVAQTTDERVQLTDIRPSRWYQFRVAAVNVHGTRGFTAPSKHFRSSKDPSAPPAPANLRLANSTVNSDGSVTVTIVWDLPEEPDIPVHHYKVFWSWMVSSKSLVPTKKKRRKTTDGFQNSVILEKLQPDCDYVVELQAITYWGQTRLKSAKVSLHFTSTHATNNKEQLVKTRKGGIQTQLPFQRRRPTRPLEVGAPFYQDGQLQVKVYWKKTEDPTVNRYHVRWFPEACAHNRTTGSEASSGMTHENYIILQDLSFSCKYKVTVQPIRPKSHSKAEAVFFTTPPCSALKGKSHKPVGCLGEAGHVLSKVLAKPENLSASFIVQDVNITGHFSWKMAKANLYQPMTGFQVTWAEVTTESRQNSLPNSIISQSQILPSDHYVLTVPNLRPSTLYRLEVQVLTPGGEGPATIKTFRTPELPPSSAHRSHLKHRHPHHYKPSPERY

SEQ ID NO: 50583 - protein, 876 aa, Homo sapiens
MELITILEKTVSPDRLELEAAQKFLERAAVENLPTFLVELSRVLANPGNSQVARVAAGLQIKNSLTSKDPDIKAQYQQRWLAIDANARREVKNYVLQTLGTETYRPSSASQCVAGIACAEIPVNQWPELIPQLVANVTNPNSTEHMKESTLEAIGYICQDIDPEQLQDKSNEILTAIIQGMRKEEPSNNVKLAATNALLNSLEFTKANFDKESERHFIMQVVCEATQCPDTRVRVAALQNLVKIMSLYYQYMETYMGPALFAITIEAMKSDIDEVALQGIEFWSNVCDEEMDLAIEASEAAEQGRPPEHTSKFYAKGALQYLVPILTQTLTKQDENDDDDDWNPCKAAGVCLMLLATCCEDDIVPHVLPFIKEHIKNPDWRYRDAAVMAFGCILEGPEPSQLKPLVIQAMPTLIELMKDPSVVVRDTAAWTVGRICELLPEAAINDVYLAPLLQCLIEGLSAEPRVASNVCWAFSSLAEAAYEAADVADDQEEPATYCLSSSFELIVQKLLETTDRPDGHQNNLRSSAYESLMEIVKNSAKDCYPAVQKTTLVIMERLQQVLQMESHIQSTSDRIQFNDLQSLLCATLQNVLRKVQHQDALQISDVVMASLLRMFQSTAGSGGVQEDALMAVSTLVEVLGGEFLKYMEAFKPFLGIGLKNYAEYQVCLAAVGLVGDLCRALQSNIIPFCDEVMQLLLENLGNENVHRSVKPQILSVFGDIALAIGGEFKKYLEVVLNTLQQASQAQVDKSDYDMVDYLNELRESCLEAYTGIVQGLKGDQENVHPDVMLVQPRVEFILSFIDHIAGDEDHTDGVVACAAGLIGDLCTAFGKDVLKLVEARPMIHELLTEGRRSKTNKAKTLATWATKELRKLKNQA

SEQ ID NO: 50584 - protein, 731 aa, Homo sapiens
MKESTLEAIGYICQDIDPEQLQDKSNEILTAIIQGMRKEEPSNNVKLAATNALLNSLEFTKANFDKESERHFIMQVVCEATQCPDTRVRVAALQNLVKIMSLYYQYMETYMGPALFAITIEAMKSDIDEVALQGIEFWSNVCDEEMDLAIEASEAAEQGRPPEHTSKFYAKGALQYLVPILTQTLTKQDENDDDDDWNPCKAAGVCLMLLATCCEDDIVPHVLPFIKEHIKNPDWRYRDAAVMAFGCILEGPEPSQLKPLVIQAMPTLIELMKDPSVVVRDTAAWTVGRICELLPEAAINDVYLAPLLQCLIEGLSAEPRVASNVCWAFSSLAEAAYEAADVADDQEEPATYCLSSSFELIVQKLLETTDRPDGHQNNLRSSAYESLMEIVKNSAKDCYPAVQKTTLVIMERLQQVLQMESHIQSTSDRIQFNDLQSLLCATLQNVLRKVQHQDALQISDVVMASLLRMFQSTAGSGGVQEDALMAVSTLVEVLGGEFLKYMEAFKPFLGIGLKNYAEYQVCLAAVGLVGDLCRALQSNIIPFCDEVMQLLLENLGNENVHRSVKPQILSVFGDIALAIGGEFKKYLEVVLNTLQQASQAQVDKSDYDMVDYLNELRESCLEAYTGIVQGLKGDQENVHPDVMLVQPRVEFILSFIDHIAGDEDHTDGVVACAAGLIGDLCTAFGKDVLKLVEARPMIHELLTEGRRSKTNKAKTLATWATKELRKLKNQA

SEQ ID NO: 50585 - protein, 660 aa, Homo sapiens
MKESTLEAIGYICQDIDPEQLQDKSNEILTAIIQGMRKEEPSNNVKLAATNALLNSLEFTKANFDKESERHFIMQVVCEATQCPDTRVRVAALQNLVKIMSLYYQYMETYMGPALFADENDDDDDWNPCKAAGVCLMLLATCCEDDIVPHVLPFIKEHIKNPDWRYRDAAVMAFGCILEGPEPSQLKPLVIQAMPTLIELMKDPSVVVRDTAAWTVGRICELLPEAAINDVYLAPLLQCLIEGLSAEPRVASNVCWAFSSLAEAAYEAADVADDQEEPATYCLSSSFELIVQKLLETTDRPDGHQNNLRSSAYESLMEIVKNSAKDCYPAVQKTTLVIMERLQQVLQMESHIQSTSDRIQFNDLQSLLCATLQNVLRKVQHQDALQISDVVMASLLRMFQSTAGSGGVQEDALMAVSTLVEVLGGEFLKYMEAFKPFLGIGLKNYAEYQVCLAAVGLVGDLCRALQSNIIPFCDEVMQLLLENLGNENVHRSVKPQILSVFGDIALAIGGEFKKYLEVVLNTLQQASQAQVDKSDYDMVDYLNELRESCLEAYTGIVQGLKGDQENVHPDVMLVQPRVEFILSFIDHIAGDEDHTDGVVACAAGLIGDLCTAFGKDVLKLVEARPMIHELLTEGRRSKTNKAKTLATWATKELRKLKNQA

SEQ ID NO: 50586 - protein, 731 aa, Homo sapiens; identical to SEQ ID NO: 50584

SEQ ID NO: 50587 - protein, 538 aa, Homo sapiens
MTTPGKENFRLKSYKNKSLNPDEMRRRREEEGLQLRKQKREEQLFKRRNVATAEEETEEEVMSDGGFHEAQISNMEMAPGGVITSDMIEMIFSKSPEQQLSATQKFRKLLSKEPNPPIDEVISTPGVVARFVEFLKRKENCTLQFESAWVLTNIASGNSLQTRIVIQAGAVPIFIELLSSEFEDVQEQAVWALGNIAGDSTMCRDYVLDCNILPPLLQLFSKQNRLTMTRNAVWALSNLCRGKSPPPEFAKVSPCLNVLSWLLFVSDTDVLADACWALSYLSDGPNDKIQAVIDAGVCRRLVELLMHNDYKVVSPALRAVGNIVTGDDIQTQVILNCSALQSLLHLLSSPKESIKKEACWTISNITAGNRAQIQTVIDANIFPALISILQTAEFRTRKEAAWAITNATSGGSAEQIKYLVELGCIKPLCDLLTVMDSKIVQVALNGLENILRLGEQEAKRNGTGINPYCALIEEAYGLDKIEFLQSHENQEIYQKAFDLIEHYFGTEDEDSSIAPQVDLNQQQYIFQQCEAPMEGFQL

SEQ ID NO: 50588 - protein, 328 aa, Homo sapiens
MTTPGKENFRLKSYKNKSLNPDEMRRRREEEGLQLRKQKREEQLFKRRNVATAEEETEEEVMSDGGFHEAQISNMEMAPGGVITSDMIEMIFSKSPEQQLSATQKFRKLLSKEPNPPIDEVISTPGVVARFVEFLKRKENCTLQFESAWVLTNIASGNSLQTRIVIQAGAVPIFIELLSSEFEDVQEQAVWALGNIAGDSTMCRDYVLDCNILPPLLQLFSKQNRLTMTRNAVWALSNLCRGKSPPPEFAKVSPCLNVLSWLLFVSDTDVLADACWALSYLSDGPNDKIQAVIDAGVCRRLVELLMHNDYKVVSPALRAVGNIVTGDD

SEQ ID NO: 50589 - protein, 215 aa, Homo sapiens
MTTPGKENFRLKSYKNKSLNPDEMRRRREEEGLQLRKQKREEQLFKRRNVATAEEETEEEVMSDGGFHEAQISNMEMAPGGVITSDMIEMIFSKSPEQQLSATQKFRKLLSKEPNPPIDEVISTPGVVARFVEFLKRKENCTLQFESAWVLTNIASGNSLQTRIVIQAGAVPIFIELLSSEFEDVQEQAVWALGNIAGDSTMCRDYVLDCNILPP

SEQ ID NO: 50590 - protein, 174 aa, Homo sapiens
MTTPGKENFRLKSYKNKSLNPDEMRRRREEEGLQLRKQKREEQLFKRRNVATAEEETEEEVMSDGGFHEAQISNMEMAPGGVITSDMIEMIFSKSPEQQLSATQKFRKLLSKEPNPPIDEVISTPGVVARFVEFLKRKENCTLQFESAWVLTNIASGNSLQTRIVIQAGAVPIF

SEQ ID NO: 50591 - protein, 521 aa, Homo sapiens
MAENPSLENHRIKSFKNKGRDVETMRRHRNEVTVELRKNKRDEHLLKKRNVPQEESLEDSDVDADFKAQNVTLEAILQNATSDNPVVQLSAVQAARKLLSSDRNPPIDDLIKSGILPILVKCLERDDNPSLQFEAAWALTNIASGTSAQTQAVVQSNAVPLFLRLLRSPHQNVCEQAVWALGNIIGDGPQCRDYVISLGVVKPLLSFISPSIPITFLRNVTWVIVNLCRNKDPPPPMETVQEILPALCVLIYHTDINILVDTVWALSYLTDGGNEQIQMVIDSGVVPFLVPLLSHQEVKVQTAALRAVGNIVTGTDEQTQVVLNCDVLSHFPNLLSHPKEKINKEAVWFLSNITAGNQQQVQAVIDAGLIPMIIHQLAKGDFGTQKEAAWAISNLTISGRKDQVEYLVQQNVIPPFCNLLSVKDSQVVQVVLDGLKNILIMAGDEASTIAEIIEECGGLEKIEVLQQHENEDIYKLAFEIIDQYFSGDDIDEDPCLIPEATQGGTYNFDPTANLQTKEFNF

SEQ ID NO: 50592 - protein, 521 aa, Homo sapiens
MADNEKLDNQRLKNFKNKGRDLETMRRQRNEVVVELRKNKRDEHLLKRRNVPHEDICEDSDIDGDYRVQNTSLEAIVQNASSDNQGIQLSAVQAARKLLSSDRNPPIDDLIKSGILPILVHCLERDDNPSLQFEAAWALTNIASGTSEQTQAVVQSNAVPLFLRLLHSPHQNVCEQAVWALGNIIGDGPQCRDYVISLGVVKPLLSFISPSIPITFLRNVTWVMVNLCRHKDPPPPMETIQEILPALCVLIHHTDVNILVDTVWALSYLTDAGNEQIQMVIDSGIVPHLVPLLSHQEVKVQTAALRAVGNIVTGTDEQTQVVLNCDALSHFPALLTHPKEKINKEAVWFLSNITAGNQQQVQAVIDANLVPMIIHLLDKGDFGTQKEAAWAISNLTISGRKDQVAYLIQQNVIPPFCNLLTVKDAQVVQVVLDGLSNILKMAEDEAETIGNLIEECGGLEKIEQLQNHENEDIYKLAYEIIDQFFSSDDIDEDPSLVPEAIQGGTFGFNSSANVPTEGFQF

SEQ ID NO: 50593 - protein, 516 aa, Homo sapiens
MPTLDAPEERRRKFKYRGKDVSLRRQQRMAVSLELRKAKKDEQTLKRRNITSFCPDTPSEKTAKGVAVSLTLGEIIKGVNSSDPVLCFQATQTARKMLSQEKNPPLKLVIEAGLIPRMVEFLKSSLYPCLQFEAAWALTNIASGTSEQTRAVVEGGAIQPLIELLSSSNVAVCEQAVWALGNIAGDGPEFRDNVITSNAIPHLLALISPTLPITFLRNITWTLSNLCRNKNPYPCDTAVKQILPALLHLLQHQDSEVLSDACWALSYLTDGSNKRIGQVVNTGVLPRLVVLMTSSELNVLTPSLRTVGNIVTGTDEQTQMAIDAGMLNVLPQLLQHNKPSIQKEAAWALSNVAAGPCHHIQQLLAYDVLPPLVALLKNGEFKVQKEAVWMVANFATGATMDQLIQLVHSGVLEPLVNLLTAPDVKIVLIILDVISCILQAAEKRSEKENLCLLIEELGGIDRIEALQLHENRQIGQSALNIIEKHFGEEEDESQTLLSQVIDQDYEFIDYECLAKK

SEQ ID NO: 50594 - protein, 1105 aa, Homo sapiens
MAAMAPALTDAAAEAHHIRFKLAPPSSTLSPGSAENNGNANILIAANGTKRKAIAAEDPSLDFRNNPTKEDLGKLQPLVASYLCSDVTSVPSKESLKLQGVFSKQTVLKSHPLLSQSYELRAELLGRQPVLEFSLENLRTMNTSGQTALPQAPVNGLAKKLTKSSTHSDHDNSTSLNGGKRALTSSALHGGEMGGSESGDLKGGMTNCTLPHRSLDVEHTTLYSNNSTANKSSVNSMEQPALQGSSRLSPGTDSSSNLGGVKLEGKKSPLSSILFSALDSDTRITALLRRQADIESRARRLQKRLQVVQAKQVERHIQHQLGGFLEKTLSKLPNLESLRPRSQLMLTRKAEAALRKAASETTTSEGLSNFLKSNSISEELERFTASGIANLRCSEQAFDSDVTDSSSGGESDIEEEELTRADPEQRHVPLRRRSEWKWAADRAAIVSRWNWLQAHVSDLEYRIRQQTDIYKQIRANKGLIVLGEVPPPEHTTDLFLPLSSEVKTDHGTDKLIESVSQPLENHGARIIGHISESLSTKSCGALRPVNGVINTLQPVLADHIPGDSSDAEEQLHKKQRLNLVSSSSDGTCVAARTRPVLSCKKRRLVRPNSIVPLSKKVHRNSTIRPGCDVNPSCALCGSGSINTMPPEIHYEAPLLERLSQLDSCVHPVLAFPDDVPTSLHFQSMLKSQWQNKPFDKIKPPKKLSLKHRAPMPGSLPDSARKDRHKLVSSFLTTAKLSHHQTRPDRTHRQHLDDVGAVPMVERVTAPKAERLLNPPPPVHDPNHSKMRLRDHSSERSEVLKHHTDMSSSSYLAATHHPPHSPLVRQLSTSSDSPAPASSSSQVTASTSQQPVRRRRGESSFDINNIVIPMSVAATTRVEKLQYKEILTPSWREVDLQSLKGSPDEENEEIEDLSDAAFAALHAKCEEMERARWLWTTSVPPQRRGSRSYRSSDGRTTPQLGSANPSTPQPASPDVSSSHSLSEYSHGQSPRSPISPELHSAPLTPVARDTPRHLASEDTRCSTPELGLDEQSVQPWERRTFPLAHSPQAECEDQLDAQERAARCTRRTSGSKTGRETEAAPTSPPIVPLKSRHLVAAATAQRPTHR

SEQ ID NO: 50595 - protein, 399 aa, Homo sapiens
MPPEIHYEAPLLERLSQLDSCVHPVLAFPDDVPTSLHFQSMLKSQWQNKPFDKIKPPKKLSLKHRAPMPGSLPDSARKDRHKLVSSFLTTAMLKHHTDMSSSSYLAATHHPPHSPLVRQLSTSSDSPAPASSSSQVTASTSQQPVRRRRGESSFDINNIVIPMSVAATTRVEKLQYKEILTPSWREVDLQSLKGSPDEENEEIEDLSDAAFAALHAKCEEMERARWLWTTSVPPQRRGSRSYRSSDGRTTPQLGSANPSTPQPASPDVSSSHSLSEYSHGQSPRSPISPELHSAPLTPVARDTPRHLASEDTRCSTPELGLDEQSVQPWERRTFPLAHSPQAECEDQLDAQERAARCTRRTSGSKTGRETEAAPTSPPIVPLKSRHLVAAATAQRPTHR

SEQ ID NO: 50596 - protein, 1105 aa, Homo sapiens; identical to SEQ ID NO: 50594

SEQ ID NO: 50597 - protein, 1105 aa, Homo sapiens; identical to SEQ ID NO: 50594

SEQ ID NO: 50598 - protein, 1105 aa, Homo sapiens; identical to SEQ ID NO: 50594

SEQ ID NO: 50599 - protein, 311 aa, Homo sapiens
MSLLMISENVKLAREYALLGNYDSAMVYYQGVLDQMNKYLYSVKDTYLQQKWQQVWQEINVEAKHVKDIMKTLESFKLDSTPLKAAQHDLPASEGEVWSMPVPVERRPSPGPRKRQSSQYSDPKSHGNRPSTTVRVHRSSAQNVHNDRGKAVRCREKKEQNKGREEKGVLMVGPPGTGKTLLAKAVATECKTTFFNVSSSTLTSKYRGESEKLVRLLFEMARFYSPATIFIDEIDSICSRRGTSEEHEASRRVKAELLVQMDGVGGTSENDDPSKMVMVLAATNFPWDIDEALRRRLEKRIYIPLPSGMRP

SEQ ID NO: 50600 - protein, 491 aa, Homo sapiens
MSLLMISENVKLAREYALLGNYDSAMVYYQGVLDQMNKYLYSVKDTYLQQKWQQVWQEINVEAKHVKDIMKTLESFKLDSTPLKAAQHDLPASEGEVWSMPVPVERRPSPGPRKRQSSQYSDPKSHGNRPSTTVRVHRSSAQNVHNDRGKAVRCREKKEQNKGREEKNKSPAAVTEPETNKFDSTGYDKDLVEALERDIISQNPNVRWDDIADLVEAKKLLKEAVVLPMWMPEFFKGIRRPWKGVLMVGPPGTGKTLLAKAVATECKTTFFNVSSSTLTSKYRGESEKLVRLLFEMARFYSPATIFIDEIDSICSRRGTSEEHEASRRVKAELLVQMDGVGGTSENDDPSKMVMVLAATNFPWDIDEALRRRLEKRIYIPLPSAKGREELLRISLRELELADDVDLASIAENMEGYSGADITNVCRDASLMAMRRRIEGLTPEEIRNLSKEEMHMPTTMEDFEMALKKVSKSVSAADIERYEKWIFEFGSC

SEQ ID NO: 50601 - protein, 491 aa, Homo sapiens; identical to SEQ ID NO: 50600

SEQ ID NO: 50602 - protein, 211 aa, Homo sapiens
MSLLMISENVKLAREYALLGNYDSAMVYYQGVLDQMNKYLYSVKDTYLQQKWQQVWQEINVEAKHVKDIMKTLESFKLDSTPLKAAQHDLPASEGEVWSMPVPVERRPSPGPRKRQSSQYSDPKSHGNRPSTTVRVHRSSAQNVHNDRGKAVRCREKKEQNKGREEKNKSPAAVTEPETNKFDSTGYDKDLVEALERDIISQNPNVRWDDI

SEQ ID NO: 50603 - protein, 280 aa, Homo sapiens
MSLLMISENVKLAREYALLGNYDSAMVYYQGVLDQMNKYLYSVKDTYLQQKWQQVWQEINVEAKHVKDIMKTLESFKLDSTPLKAAQHDLPASEGEVWSMPVPVERRPSPGPRKRQSSQYSDPKSHGNRPSTTVRVHRSSAQNVHNDRGKAVRCREKKEQNKGREEKNKSPAAVTEPETNKFDSTGYDKDLVEALERDIISQNPNVRWDDIADLVEAKKLLKEAVVLPMWMPEFFKGIRRPWKGVLMVGPPGTGKTLLAKAVATECKTTFFNVSSSTLTS

SEQ ID NO: 50604 - protein, 142 aa, Homo sapiens
MNCSESQRLRTLLSRLLLELHHRGNASGLGAGPRPSMGMGVVPDPFVGREVTSAKGDDAYLYILLIMIFYACLAGGLILAYTRSRKLVEAKDEPSQACAEHEWAPGGALTADAEAAAGSQAEGRRQLASEGLPALAQGAERV

SEQ ID NO: 50605 - protein, 502 aa, Homo sapiens
MFGTLLLYCFFLATVPALAETGGERQLSPEKSEIWGPGLKADVVLPARYFYIQAVDTSGNKFTSSPGEKVFQVKVSAPEEQFTRVGVQVLDRKDGSFIVRYRMYASYKNLKVEIKFQGQHVAKSPYILKGPVYHENCDCPLQDSAAWLREMNCPETIAQIQRDLAHFPAVDPEKIAVEIPKRFGQRQSLCHYTLKDNKVYIKTHGEHVGFRIFMDAILLSLTRKVKMPDVELFVNLGDWPLEKKKSNSNIHPIFSWCGSTDSKDIVMPTYDLTDSVLETMGRVSLDMMSVQANTGPPWESKNSTAVWRGRDSRKERLELVKLSRKHPELIDAAFTNFFFFKHDENLYGPIVKHISFFDFFKHKYQINIDGTVAAYRLPYLLVGDSVVLKQDSIYYEHFYNELQPWKHYIPVKSNLSDLLEKLKWAKDHDEEAKKIAKAGQEFARNNLMGDDIFCYYFKLFQEYANLQVSEPQIREGMKRVEPQTEDDLFPCTCHRKKTKDEL

SEQ ID NO: 50606 - protein, 354 aa, Homo sapiens
MSAGGGRAFAWQVFPPMPTCRVYGTVAHQDGHLLVLGGCGRAGLPLDTAETLDMASHTWLALAPLPTARAGAAAVVLGKQVLVVGGVDEVQSPVAAVEAFLMDEGRWERRATLPQAAMGVATVERDGMVYALGGMGPDTAPQAQVRVYEPRRDCWLSLPSMPTPCYGASTFLHGNKIYVLGGRQGKLPVTAFEAFDLEARTWTRHPSLPSRRAFAGCAMAEGSVFSLGGLQQPGPHNFYSRPHFVNTVEMFDLEHGSWTKLPRSLRMRDKRADFVVGSLGGHIVAIGGLGNQPCPLGSVESFSLARRRWEALPAMPTARCSCSSLQAGPRLFVIGGVAQGPSQAVEALCLRDGV

SEQ ID NO: 50607 - protein, 138 aa, Homo sapiens
MFDLEHGSWTKLPRSLRMRDKRADFVVGSLGGHIVAIGGLGNQPCPLGSVESFSLARRRWEALPAMPTARCSCSSLQAGPRLFVIGGVAQGPSQAVEALCLRDGEGLVGAVHWSSSLPEAAISMAPFAAEDTHCGSVG

SEQ ID NO: 50608 - protein, 606 aa, Homo sapiens
MDSQRELAEELRLYQSTLLQDGLKDLLDEKKFIDCTLKAGDKSLPCHRLILSACSPYFREYFLSEIDEAKKKEVVLDNVDPAILDLIIKYLYSASIDLNDGNVQDIFALASRFQIPSVFTVCVSYLQKRLAPGNCLAILRLGLLLDCPRLAISAREFVSDRFVQICKEEDFMQLSPQELISVISNDSLNVEKEEAVFEAVMKWVRTDKENRVKNLSEVFDCIRFRLMTEKYFKDHVEKDDIIKSNPDLQKKIKVLKDAFAGKLPEPSKNAAKTGAGEVNGDVGDEDLLPGYLNDIPRHGMFVKDLILLVNDTAAVAYDPTENECYLTALAEQIPRNHSSIVTQQNQIYVVGGLYVDEENKDQPLQSYFFQLDSIASEWVGLPPLPSARCLFGLGEVDDKIYVVAGKDLQTEASLDSVLCYDPVAAKWNEVKKLPIKVYGHNVISHKGMIYCLGGKTDDKKCTNRVFIFNPKKGDWKDLAPMKIPRSMFGVAVHKGKIVIAGGVTEDGLSASVEAFDLTTNKWDVMTEFPQERSSISLVSLAGSLYAIGGFAMIQLESKEFAPTEVNDIWKYEDDKKEWAGMLKEIRYASGASCLATRLNLFKLSKL

SEQ ID NO: 50609 - protein, 458 aa, Homo sapiens
MARGPQTLVQVWVGGQLFQADRALLVEHCGFFRGLFRSGMRETRAAEVRLGVLSAGGFRATLQVLRGDRPALAAEDELLQAVECAAFLQAPALARFLEHNLTSDNCALLCDAAAAFGLRDVFHSAALFICDGERELAAELALPEARAYVAALRPSSYAAVSTHTPAPGFLEDASRTLCYLDEEEDAWRTLAALPLEASTLLAGVATLGNKLYIVGGVRGASKEVVELGFCYDPDGGTWHEFPSPHQPRYDTALAGFDGRLYAIGGEFQRTPISSVERYDPAAGCWSFVADLPQPAAGVPCAQACGRLFVCLWRPADTTAVVEYAVRTDAWLPVAELRRPQSYGHCMVAHRDSLYVVRNGPSDDFLHCAIDCLNLATGQWTALPGQFVNSKGALFTAVVRGDTVYTVNRMFTLLYAIEGGTWRLLREKAGFPRPGSLQTFLLRLPPGAPGPVTSTTAEL

SEQ ID NO: 50610 - protein, 748 aa, Homo sapiens
MSGSGRKDFDVKHILRLRWKLFSHPSPSTGGPAGGGCLQQDGSGSFEHWGPSQSRLLKSQERSGVSTFWKKPSSSSSSSSSPSSSSSSFNPLNGTLLPVATRLQQGAPGQGTQQPARTLFYVESLEEEVVPGMDFPGPHEKGLVLQELKVEPDNSSQATGEGCGHRLSSTGHSMTPQSDLDSSSSEEFYQAVHHAEQTFRKMESYLKQQQLCDVILIVGNRKIPAHRLVLSSVSDYFAAMFTSDVCEAKQEEIKMEGIDPNALWDLVQFAYTGCLELKEDTIENLLAAACLLQLPQVVEVCCHFLMKLLHPSNCLGIRAFADAQGCIELMKVAHSYTMENIMEVIRNQEFLLLPAEELHKLLASDDVNVPDEETIFHALMMWVKYDMQSRCNDLSMLLAFIRLPLLPPQILADLENHALFKNDLECQKLILEAMKYHLLPERRTLMQSPRTKPRKSTVGTLYAVGGMDNNKGATTIEKYDLRTNLWIQAGMMNGRRLQFGVAVIDDKLFVIGGRDGLKTLNTVECYNPKTKTWTVLPPMSTHRHGLGVTVLEGPIYAVGGHDGWSYLNTVERWDPQSQQWTFVASMSIARSTVGVAALNGKLYSVGGRDGSSCLSSMEYYDPHTNKWNMCAPMCKRRGGVGVATCDGFLYAVGGHDAPASNHCSRLLDYVERYDPKTDTWTMVAPLSMPRDAVGVCLLGDRLYAVGGYDGQTYLNTMESYDPQTNEWTQMASLNIGRAGACVVVIKQP

SEQ ID NO: 50611 - protein, 555 aa, Homo sapiens
MDFPGPHEKGLVLQELKVEPDNSSQATGEGCGHRLVLSSVSDYFAAMFTSDVCEAKQEEIKMEGIDPNALWDLVQFAYTGCLELKEDTIENLLAAACLLQLPQVVEVCCHFLMKLLHPSNCLGIRAFADAQGCIELMKVAHSYTMENIMEVIRNQEFLLLPAEELHKLLASDDVNVPDEETIFHALMMWVKYDMQSRCNDLSMLLAFIRLPLLPPQILADLENHALFKNDLECQKLILEAMKYHLLPERRTLMQSPRTKPRKSTVGTLYAVGGMDNNKGATTIEKYDLRTNLWIQAGMMNGRRLQFGVAVIDDKLFVIGGRDGLKTLNTVECYNPKTKTWTVLPPMSTHRHGLGVTVLEGPIYAVGGHDGWSYLNTVERWDPQSQQWTFVASMSIARSTVGVAALNGKLYSVGGRDGSSCLSSMEYYDPHTNKWNMCAPMCKRRGGVGVATCDGFLYAVGGHDAPASNHCSRLLDYVERYDPKTDTWTMVAPLSMPRDAVGVCLLGDRLYAVGGYDGQTYLNTMESYDPQTNEWTQMASLNIGRAGACVVVIKQP

SEQ ID NO: 50612 - protein, 388 aa, Homo sapiens
MSRSGDRTSTFDPSHSDNLLHGLNLLWRKQLFCDVTLTAQGQQFHCHKAVLASCSQYFRSLFSSHPPLGGGVGGQDGLGAPKDQQQPPQQQPSQQQQPPPQEEPGTPSSSPDDKLLTSPRAINNLVLQGCSSIGLRLVLEYLYTANVTLSLDTVEEVLSVSKILHIPQVTKLCVQFLNDQISVQNYKQVCKIAALHGLEETKKLANKYLVEDVLLLNFEEMRALLDSLPPPVESELALFQMSVLWLEHDRETRMQYAPDLMKRLRFALIPAPELVERVQSVDFMRTDPVCQKLLLDAMNYHLMPFRQHCRQSLASRIRSNKKMLLLVGGLPPGPDRLPSNLVQYYDDEKKTWKILTITGPHPISGKQESASSPEFRRRKTREFSNNTM

SEQ ID NO: 50613 - protein, 628 aa, Homo sapiens
MSRSGDRTSTFDPSHSDNLLHGLNLLWRKQLFCDVTLTAQGQQFHCHKAVLASCSQYFRSLFSSHPPLGGGVGGQDGLGAPKDQQQPPQQQPSQQQQPPPQEEPGTPSSSPDDKLLTSPRAINNLVLQGCSSIGLRLVLEYLYTANVTLSLDTVEEVLSVSKILHIPQVTKLCVQFLNDQISVQNYKQVCKIAALHGLEETKKLANKYLVEDVLLLNFEEMRALLDSLPPPVESELALFQMSVLWLEHDRETRMQYAPDLMKRLRFALIPAPELVERVQSVDFMRTDPVCQKLLLDAMNYHLMPFRQHCRQSLASRIRSNKKMLLLVGGLPPGPDRLPSNLVQYYDDEKKTWKILTIMPYNSAHHCVVEVENFLFVLGGEDQWNPNGKHSTNFVSRYDPRFNSWIQLPPMQERRASFYACRLDKHLYVIGGRNETGYLSSVECYNLETNEWRYVSSLPQPLAAHAGAVHNGKIYISGGVHNGEYVPWLYCYDPVMDVWARKQDMNTKRAIHTLAVMNDRLYAIGGNHLKGFSHLDVMLVECYDPKGDQWNILQTPILEGRSGPGCAVLDDSIYLVGGYSWSMGAYKSSTICYCPEKGTWTELEGDVAEPLAGPACVTVILPSCVPYNK

SEQ ID NO: 50614 - protein, 597 aa, Homo sapiens
MVWLEARPQILFVCTKQGHQKPLDSKDDNTEKHCPVTVNPWHMKKAFKVMNELRSQNLLCDVTIVAEDMEISAHRVVLAACSPYFHAMFTGEMSESRAKRVRIKEVDGWTLRMLIDYVYTAEIQVTEENVQVLLPAAGLLQLQDVKKTCCEFLESQLHPVNCLGIRAFADMHACTDLLNKANTYAEQHFADVVLSEEFLNLGIEQVCSLISSDKLTISSEEKVFEAVIAWVNHDKDVRQEFMARLMEHVRLPLLPREYLVQRVEEEALVKNSSACKDYLIEAMKYHLLPTEQRILMKSVRTRLRTPMNLPKLMVVVGGQAPKAIRSVECYDFKEERWHQVAELPSRRCRAGMVYMAGLVFAVGGFNGSLRVRTVDSYDPVKDQWTSVANMRDRRSTLGAAVLNGLLYAVGGFDGSTGLSSVEAYNIKSNEWFHVAPMNTRRSSVGVGVVGGLLYAVGGYDGASRQCLSTVECYNATTNEWTYIAEMSTRRSGAGVGVLNNLLYAVGGHDGPLVRKSVEVYDPTTNAWRQVADMNMCRRNAGVCAVNGLLYVVGGDDGSCNLASVEYYNPTTDKWTVVSSCMSTGRSYAGVTVIDKPL

SEQ ID NO: 50615 - protein, 593 aa, Homo sapiens
METPPLPPACTKQGHQKPLDSKDDNTEKHCPVTVNPWHMKKAFKVMNELRSQNLLCDVTIVAEDMEISAHRVVLAACSPYFHAMFTGEMSESRAKRVRIKEVDGWTLRMLIDYVYTAEIQVTEENVQVLLPAAGLLQLQDVKKTCCEFLESQLHPVNCLGIRAFADMHACTDLLNKANTYAEQHFADVVLSEEFLNLGIEQVCSLISSDKLTISSEEKVFEAVIAWVNHDKDVRQEFMARLMEHVRLPLLPREYLVQRVEEEALVKNSSACKDYLIEAMKYHLLPTEQRILMKSVRTRLRTPMNLPKLMVVVGGQAPKAIRSVECYDFKEERWHQVAELPSRRCRAGMVYMAGLVFAVGGFNGSLRVRTVDSYDPVKDQWTSVANMRDRRSTLGAAVLNGLLYAVGGFDGSTGLSSVEAYNIKSNEWFHVAPMNTRRSSVGVGVVGGLLYAVGGYDGASRQCLSTVECYNATTNEWTYIAEMSTRRSGAGVGVLNNLLYAVGGHDGPLVRKSVEVYDPTTNAWRQVADMNMCRRNAGVCAVNGLLYVVGGDDGSCNLASVEYYNPTTDKWTVVSSCMSTGRSYAGVTVIDKPL

SEQ ID NO: 50616 - protein, 505 aa, Homo sapiens
MSESRAKRVRIKEVDGWTLRMLIDYVYTAEIQVTEENVQVLLPAAGLLQLQDVKKTCCEFLESQLHPVNCLGIRAFADMHACTDLLNKANTYAEQHFADVVLSEEFLNLGIEQVCSLISSDKLTISSEEKVFEAVIAWVNHDKDVRQEFMARLMEHVRLPLLPREYLVQRVEEEALVKNSSACKDYLIEAMKYHLLPTEQRILMKSVRTRLRTPMNLPKLMVVVGGQAPKAIRSVECYDFKEERWHQVAELPSRRCRAGMVYMAGLVFAVGGFNGSLRVRTVDSYDPVKDQWTSVANMRDRRSTLGAAVLNGLLYAVGGFDGSTGLSSVEAYNIKSNEWFHVAPMNTRRSSVGVGVVGGLLYAVGGYDGASRQCLSTVECYNATTNEWTYIAEMSTRRSGAGVGVLNNLLYAVGGHDGPLVRKSVEVYDPTTNAWRQVADMNMCRRNAGVCAVNGLLYVVGGDDGSCNLASVEYYNPTTDKWTVVSSCMSTGRSYAGVTVIDKPL

SEQ ID NO: 50617 - protein, 587 aa, Homo sapiens
MEGESVKLSSQTLIQAGDDEKNQRTITVNPAHMGKAFKVMNELRSKQLLCDVMIVAEDVEIEAHRVVLAACSPYFCAMFTGDMSESKAKKIEIKDVDGQTLSKLIDYIYTAEIEVTEENVQVLLPAASLLQLMDVRQNCCDFLQSQLHPTNCLGIRAFADVHTCTDLLQQANAYAEQHFPEVMLGEEFLSLSLDQVCSLISSDKLTVSSEEKVFEAVISWINYEKETRLEHMAKLMEHVRLPLLPRDYLVQTVEEEALIKNNNTCKDFLIEAMKYHLLPLDQRLLIKNPRTKPRTPVSLPKVMIVVGGQAPKAIRSVECYDFEEDRWDQIAELPSRRCRAGVVFMAGHVYAVGGFNGSLRVRTVDVYDGVKDQWTSIASMQERRSTLGAAVLNDLLYAVGGFDGSTGLASVEAYSYKTNEWFFVAPMNTRRSSVGVGVVEGKLYAVGGYDGASRQCLSTVEQYNPATNEWIYVADMSTRRSGAGVGVLSGQLYATGGHDGPLVRKSVEVYDPGTNTWKQVADMNMCRRNAGVCAVNGLLYVVGGDDGSCNLASVEYYNPVTDKWTLLPTNMSTGRSYAGVAVIHKSL

SEQ ID NO: 50618 - protein, 301 aa, Homo sapiens
MEGESVKLSSQTLIQAGDDEKNQRTITVNPAHMGKAFKVMNELRSKQLLCDVMIVAEDVEIEAHRVVLAACSPYFCAMFTGDMSESKAKKIEIKDVDGQTLSKLIDYIYTAEIEVTEENVQVLLPAASLLQLMDVRQNCCDFLQSQLHPTNCLGIRAFADVHTCTDLLQQANAYAEQHFPEVMLGEEFLSLSLDQVCSLISSDKLTVSSEEKVFEAVISWINYEKETRLEHMAKLMEHVRLPLLPRDYLVQTVEEEALIKNNNTCKDFLIEAMKYHLLPLDQRLLIKNPRTKPRTPVSLPK

SEQ ID NO: 50619 - protein, 505 aa, Homo sapiens
MSESKAKKIEIKDVDGQTLSKLIDYIYTAEIEVTEENVQVLLPAASLLQLMDVRQNCCDFLQSQLHPTNCLGIRAFADVHTCTDLLQQANAYAEQHFPEVMLGEEFLSLSLDQVCSLISSDKLTVSSEEKVFEAVISWINYEKETRLEHMAKLMEHVRLPLLPRDYLVQTVEEEALIKNNNTCKDFLIEAMKYHLLPLDQRLLIKNPRTKPRTPVSLPKVMIVVGGQAPKAIRSVECYDFEEDRWDQIAELPSRRCRAGVVFMAGHVYAVGGFNGSLRVRTVDVYDGVKDQWTSIASMQERRSTLGAAVLNDLLYAVGGFDGSTGLASVEAYSYKTNEWFFVAPMNTRRSSVGVGVVEGKLYAVGGYDGASRQCLSTVEQYNPATNEWIYVADMSTRRSGAGVGVLSGQLYATGGHDGPLVRKSVEVYDPGTNTWKQVADMNMCRRNAGVCAVNGLLYVVGGDDGSCNLASVEYYNPVTDKWTLLPTNMSTGRSYAGVAVIHKSL

SEQ ID NO: 50620 - protein, 200 aa, Homo sapiens
MSRCCSRQPACCSSWMFGRTAVTSCSLSCIPPIAWASVHLQMYTPALTFCSRPMPTQHFPEVMLGEEFLSLSLDQVCSLISSDKLTVSSEEKVFEAVISWINYEKETRLEHMAKLMEHVRLPLLPRDYLVQTVEEEALIKNNNTCKDFLIEAMKYHLLPLDQRLLIKNPRTKPRTPVSLPKGLECLADSCTPQVGMMGLW

SEQ ID NO: 50621 - protein, 555 aa, Homo sapiens
MGKAFKVMNELRSKQLLCDVMIVAEDVEIEAHRVVLAACSPYFCAMFTGDMSESKAKKIEIKDVDGQTLSKLIDYIYTAEIEVTEENVQVLLPAASLLQLMDVRQNCCDFLQSQLHPTNCLGIRAFADVHTCTDLLQQANAYAEQHFPEVMLGEEFLSLSLDQVCSLISSDKLTVSSEEKVFEAVISWINYEKETRLEHMAKLMEHVRLPLLPRDYLVQTVEEEALIKNNNTCKDFLIEAMKYHLLPLDQRLLIKNPRTKPRTPVSLPKVMIVVGGQAPKAIRSVECYDFEEDRWDQIAELPSRRCRAGVVFMAGHVYAVGGFNGSLRVRTVDVYDGVKDQWTSIASMQERRSTLGAAVLNDLLYAVGGFDGSTGLASVEAYSYKTNEWFFVAPMNTRRSSVGVGVVEGKLYAVGGYDGASRQCLSTVEQYNPATNEWIYVADMSTRRSGAGVGVLSGQLYATGGHDGPLVRKSVEVYDPGTNTWKQVADMNMCRRNAGVCAVNGLLYVVGGDDGSCNLASVEYYNPVTDKWTLLPTNMSTGRSYAGVAVIHKSL

SEQ ID NO: 50622 - protein, 634 aa, Homo sapiens
MAPKKKIVKKNKGDINEMTIIVEDSPLNKLNALNGLLEGGNGLSCISSELTDASYGPNLLEGLSKMRQENFLCDLVIGTKTKSFDVHKSVMASCSEYFYNILKKDPSIQRVDLNDISPLGLATVIAYAYTGKLTLSLYTIGSIISAAVYLQIHTLVKMCSDFLIREMSVENCMYVVNIAETYSLKNAKAAAQKFIRDNFLEFAESDQFMKLTFEQINELLIDDDLQLPSEIVAFQIAMKWLEFDQKRVKYAADLLSNIRFGTISAQDLVNYVQSVPRMMQDADCHRLLVDAMNYHLLPYHQNTLQSRRTRIRGGCRVLVTVGGRPGLTEKSLSRDILYRDPENGWSKLTEMPAKSFNQCVAVMDGFLYVAGGEDQNDARNQAKHAVSNFCRYDPRFNTWIHLASMNQKRTHFSLSVFNGLVYAAGGRNAEGSLASLECYVPSTNQWQPKTPLEVARCCHASAVADGRVLVTGGYIANAYSRSVCAYDPASDSWQELPNLSTPRGWHCAVTLSDRVYVMGGSQLGPRGERVDVLTVECYSPATGQWSYAAPLQVGVSTAGVSALHGRAYLVGGWNEGEKKYKKCIQCFSPELNEWTEDDELPEATVGVSCCTLSMPNNVTRESRASSVSSVPVSI

SEQ ID NO: 50623 - protein, 634 aa, Homo sapiens; identical to SEQ ID NO: 50622

SEQ ID NO: 50624 - protein, 770 aa, Homo sapiens
MNVIYFPLHIFVVYSRAYTSLVLVGCTNLCAVLFARCLDDHLVSLRMSGSRKEFDVKQILKIRWRWFGHQASSPNSTVDSQQGEFWNRGQTGANGGRKFLDPCSLQLPLASIGYRRSSQLDFQNSPSWPMASTSEVPAFEFTAEDCGGAHWLDRPEVDDGTSEEENESDSSSCRTSNSSQTLSSCHTMEPCTSDEFFQALNHAEQTFKKMENYLRHKQLCDVILVAGDRRIPAHRLVLSSVSDYFAAMFTNDVREARQEEIKMEGVEPNSLWSLIQYAYTGRLELKEDNIECLLSTACLLQLSQVVEACCKFLMKQLHPSNCLGIRSFADAQGCTDLHKVAHNYTMEHFMEVIRNQEFVLLPASEIAKLLASDDMNIPNEETILNALLTWVRHDLEQRRKDLSKLLAYIRLPLLAPQFLADMENNVLFRDDIECQKLIMEAMKYHLLPERRPMLQSPRTKPRKSTVGTLFAVGGMDSTKGATSIEKYDLRTNMWTPVANMNGRRLQFGVAVLDDKLYVVGGRDGLKTLNTVECYNPKTKTWSVMPPMSTHRHGLGVAVLEGPMYAVGGHDGWSYLNTVERWDPQARQWNFVATMSTPRSTVGVAVLSGKLYAVGGRDGSSCLKSVECFDPHTNKWTLCAQMSKRRGGVGVTTWNGLLYAIGGHDAPASNLTSRLSDCVERYDPKTDMWTAVASMSISRDAVGVCLLGDKLYAVGGYDGQAYLNTVEAYDPQTNEWTQVFSHTFEDSKDHLVAIKQTIWRQNSLSEEFRSH

SEQ ID NO: 50625 - protein, 757 aa, Homo sapiens
MNVIYFPLHIFVVYSRAYTSLVLVGCTNLCAVLFARCLDDHLVSLRMSGSRKEFDVKQILKIRWRWFGHQASSPNSTVDSQQGEFWNRGQTGANGGRKFLDPCSLQLPLASIGYRRSSQLDFQNSPSWPMASTSEVPAFEFTAEDCGGAHWLDRPEVDDGTSEEENESDSSSCRTSNSSQTLSSCHTMEPCTSDEFFQALNHAEQTFKKMENYLRHKQLCDVILVAGDRRIPAHRLVLSSVSDYFAAMFTNDVREARQEEIKMEGVEPNSLWSLIQYAYTGRLELKEDNIECLLSTACLLQLSQVVEACCKFLMKQLHPSNCLGIRSFADAQGCTDLHKVAHNYTMEHFMEVIRNQEFVLLPASEIAKLLASDDMNIPNEETILNALLTWVRHDLEQRRKDLSKLLAYIRLPLLAPQFLADMENNVLFRDDIECQKLIMEAMKYHLLPERRPMLQSPRTKPRKSTVGTLFAVGGMDSTKGATSIEKYDLRTNMWTPVANMNGRRLQFGVAVLDDKLYVVGGRDGLKTLNTVECYNPKTKTWSVMPPMSTHRHGLGVAVLEGPMYAVGGHDGWSYLNTVERWDPQARQWNFVATMSTPRSTVGVAVLSGKLYAVGGRDGSSCLKSVECFDPHTNKWTLCAQMSKRRGGVGVTTWNGLLYAIGGHDAPASNLTSRLSDCVERYDPKTDMWTAVASMSISRDAVGVCLLGDKLYAVGGYDGQAYLNTVEAYDPQTNEWTQVWHSCFIITLTLFLLKQFLW

SEQ ID NO: 50626 - protein, 755 aa, Homo sapiens
MNVIYFPLHIFVVYSRAYTSLVLVGCTNLCAVLFARCLDDHLVSLRMSGSRKEFDVKQILKIRWRWFGHQASSPNSTVDSQQGEFWNRGQTGANGGRKFLDPCSLQLPLASIGYRRSSQLDFQNSPSWPMASTSEVPAFEFTAEDCGGAHWLDRPEVDDGTSEEENESDSSSCRTSNSSQTLSSCHTMEPCTSDEFFQALNHAEQTFKKMENYLRHKQLCDVILVAGDRRIPAHRLVLSSVSDYFAAMFTNDVREARQEEIKMEGVEPNSLWSLIQYAYTGRLELKEDNIECLLSTACLLQLSQVVEACCKFLMKQLHPSNCLGIRSFADAQGCTDLHKVAHNYTMEHFMEVIRNQEFVLLPASEIAKLLASDDMNIPNEETILNALLTWVRHDLEQRRKDLSKLLAYIRLPLLAPQFLADMENNVLFRDDIECQKLIMEAMKYHLLPERRPMLQSPRTKPRKSTVGTLFAVGGMDSTKGATSIEKYDLRTNMWTPVANMNGRRLQFGVAVLDDKLYVVGGRDGLKTLNTVECYNPKTKTWSVMPPMSTHRHGLGVAVLEGPMYAVGGHDGWSYLNTVERWDPQARQWNFVATMSTPRSTVGVAVLSGKLYAVGGRDGSSCLKSVECFDPHTNKWTLCAQMSKRRGGVGVTTWNGLLYAIGGHDAPASNLTSRLSDCVERYDPKTDMWTAVASMSISRDAVGVCLLGDKLYAVGGYDGQAYLNTVEAYDPQTNEWTQVAPLCLGRAGACVVTVKL

SEQ ID NO: 50627 - protein, 282 aa, Homo sapiens
  VARIANT 1: note = MOD_RES - Any amino acid
XRTNMWTPVANMNGRRLQFGVAVLDDKLYVVGGRDGLKTLNTVECYNPKTKTWSVMPPMSTHRHGLGVAVLEGPMYAVGGHDGWSYLNTVERWDPQARQWNFVATMSTPRSTVGVAVLSGKLYAVGGRDGSSCLKSVECFDPHTNKWTLCAQMSKRRGGVGVTTWNGLLYAIGGHDAPASNLTSRLSDCVERYDPKTDMWTAVASMSISRDAVGVCLLGDKLYAVGGYDGQAYLNTVEAYDPQTNEWTQVFSHTFEDSKDHLVAIKQTIWRQNSLSEEFRSH

SEQ ID NO: 50628 - protein, 789 aa, Homo sapiens
MRLPGQGLGAREGPSIPLSSPAPAPASPAPPAWPPRPAVTHGRLRSPTRRAYTSLVLVGCTNLCAVLFARCLDDHLVSLRMSGSRKEFDVKQILKIRWRWFGHQASSPNSTVDSQQGEFWNRGQTGANGGRKFLDPCSLQLPLASIGYRRSSQLDFQNSPSWPMASTSEVPAFEFTAEDCGGAHWLDRPEVDDGTSEEENESDSSSCRTSNSSQTLSSCHTMEPCTSDEFFQALNHAEQTFKKMENYLRHKQLCDVILVAGDRRIPAHRLVLSSVSDYFAAMFTNDVREARQEEIKMEGVEPNSLWSLIQYAYTGRLELKEDNIECLLSTACLLQLSQVVEACCKFLMKQLHPSNCLGIRSFADAQGCTDLHKVAHNYTMEHFMEVIRNQEFVLLPASEIAKLLASDDMNIPNEETILNALLTWVRHDLEQRRKDLSKLLAYIRLPLLAPQFLADMENNVLFRDDIECQKLIMEAMKYHLLPERRPMLQSPRTKPRKSTVGTLFAVGGMDSTKGATSIEKYDLRTNMWTPVANMNGRRLQFGVAVLDDKLYVVGGRDGLKTLNTVECYNPKTKTWSVMPPMSTHRHGLGVAVLEGPMYAVGGHDGWSYLNTVERWDPQARQWNFVATMSTPRSTVGVAVLSGKLYAVGGRDGSSCLKSVECFDPHTNKWTLCAQMSKRRGGVGVTTWNGLLYAIGGHDAPASNLTSRLSDCVERYDPKTDMWTAVASMSISRDAVGVCLLGDKLYAVGGYDGQAYLNTVEAYDPQTNEWTQVAPLCLGRAGACVVTVKL

SEQ ID NO: 50629 - protein, 349 aa, Homo sapiens
KKHPSTVMVPQFLADMENNVLFRDDIECQKLIMEAMKYHLLPERRPMLQSPRTKPRKSTVGTLFAVGGMDSTKGATSIEKYDLRTNMWTPVANMNGRRLQFGVAVLDDKLYVVGGRDGLKTLNTVECYNPKTKTWSVMPPMSTHRHGLGVAVLEGPMYAVGGHDGWSYLNTVERWDPQARQWNFVATMSTPRSTVGVAVLSGKLYAVGGRDGSSCLKSVECFDPHTNKWTLCAQMSKRRGGVGVTTWNGLLYAIGGHDAPASNLTSRLSDCVERYDPKTDMWTAVASMSISRDAVGVCLLGDKLYAVGGYDGQAYLNTVEAYDPQTNEWTQVAPLCLGRAGACVVTVKL

SEQ ID NO: 50630 - protein, 709 aa, Homo sapiens
MSGSRKEFDVKQILKIRWRWFGHQASSPNSTVDSQQGEFWNRGQTGANGGRKFLDPCSLQLPLASIGYRRSSQLDFQNSPSWPMASTSEVPAFEFTAEDCGGAHWLDRPEVDDGTSEEENESDSSSCRTSNSSQTLSSCHTMEPCTSDEFFQALNHAEQTFKKMENYLRHKQLCDVILVAGDRRIPAHRLVLSSVSDYFAAMFTNDVREARQEEIKMEGVEPNSLWSLIQYAYTGRLELKEDNIECLLSTACLLQLSQVVEACCKFLMKQLHPSNCLGIRSFADAQGCTDLHKVAHNYTMEHFMEVIRNQEFVLLPASEIAKLLASDDMNIPNEETILNALLTWVRHDLEQRRKDLSKLLAYIRLPLLAPQFLADMENNVLFRDDIECQKLIMEAMKYHLLPERRPMLQSPRTKPRKSTVGTLFAVGGMDSTKGATSIEKYDLRTNMWTPVANMNGRRLQFGVAVLDDKLYVVGGRDGLKTLNTVECYNPKTKTWSVMPPMSTHRHGLGVAVLEGPMYAVGGHDGWSYLNTVERWDPQARQWNFVATMSTPRSTVGVAVLSGKLYAVGGRDGSSCLKSVECFDPHTNKWTLCAQMSKRRGGVGVTTWNGLLYAIGGHDAPASNLTSRLSDCVERYDPKTDMWTAVASMSISRDAVGVCLLGDKLYAVGGYDGQAYLNTVEAYDPQTNEWTQVAPLCLGRAGACVVTVKL

SEQ ID NO: 50631 - protein, 694 aa, Homo sapiens
MNVIYFPLHIFVVYSRAYTSLVLVGCTNLCAVLFARCLDDHLVSLRMSGSRKEFDVKQILKIRWRWFGHQASSPNSTVDSQQGEFWNRGQTGANGGRKFLDPCSLQLPLASIGYRRSSQLDFQNSPSWPMASTSEVPAFEFTAEDCGGAHWLDRPEVDDGTSEEENESDSSSCRLVLSSVSDYFAAMFTNDVREARQEEIKMEGVEPNSLWSLIQYAYTGRLELKEDNIECLLSTACLLQLSQVVEACCKFLMKQLHPSNCLGIRSFADAQGCTDLHKVAHNYTMEHFMEVIRNQEFVLLPASEIAKLLASDDMNIPNEETILNALLTWVRHDLEQRRKDLSKLLAYIRLPLLAPQFLADMENNVLFRDDIECQKLIMEAMKYHLLPERRPMLQSPRTKPRKSTVGTLFAVGGMDSTKGATSIEKYDLRTNMWTPVANMNGRRLQFGVAVLDDKLYVVGGRDGLKTLNTVECYNPKTKTWSVMPPMSTHRHGLGVAVLEGPMYAVGGHDGWSYLNTVERWDPQARQWNFVATMSTPRSTVGVAVLSGKLYAVGGRDGSSCLKSVECFDPHTNKWTLCAQMSKRRGGVGVTTWNGLLYAIGGHDAPASNLTSRLSDCVERYDPKTDMWTAVASMSISRDAVGVCLLGDKLYAVGGYDGQAYLNTVEAYDPQTNEWTQVAPLCLGRAGACVVTVKL

SEQ ID NO: 50632 - protein, 568 aa, Homo sapiens
MEPCTSDEFFQALNHAEQTFKKMENYLRHKQLCDVILVAGDRRIPAHRLVLSSVSDYFAAMFTNDVREARQEEIKMEGVEPNSLWSLIQYAYTGRLELKEDNIECLLSTACLLQLSQVVEACCKFLMKQLHPSNCLGIRSFADAQGCTDLHKVAHNYTMEHFMEVIRNQEFVLLPASEIAKLLASDDMNIPNEETILNALLTWVRHDLEQRRKDLSKLLAYIRLPLLAPQFLADMENNVLFRDDIECQKLIMEAMKYHLLPERRPMLQSPRTKPRKSTVGTLFAVGGMDSTKGATSIEKYDLRTNMWTPVANMNGRRLQFGVAVLDDKLYVVGGRDGLKTLNTVECYNPKTKTWSVMPPMSTHRHGLGVAVLEGPMYAVGGHDGWSYLNTVERWDPQARQWNFVATMSTPRSTVGVAVLSGKLYAVGGRDGSSCLKSVECFDPHTNKWTLCAQMSKRRGGVGVTTWNGLLYAIGGHDAPASNLTSRLSDCVERYDPKTDMWTAVASMSISRDAVGVCLLGDKLYAVGGYDGQAYLNTVEAYDPQTNEWTQVAPLCLGRAGACVVTVKL

SEQ ID NO: 50633 - protein, 621 aa, Homo sapiens
MLMAGQRGAWTMGDVVEKSLEGPLAPSTDEPSQKTGDLVEILNGEKVKFDDAGLSLILQNGLETLRMENALTDVILCVDIQEFSCHRVVLAAASNYFRAMFCNDLKEKYEKRIIIKGVDAETMHTLLDYTYTSKALITKQNVQRVLEAANLFQFLRMVDACASFLTEALNPENCVGILRLADTHSLDSLKKQVQSYIIQNFVQILNSEEFLDLPVDTLHHILKSDDLYVTEEAQVFETVMSWVRHKPSERLCLLPYVLENVRLPLLDPWYFVETVEADPLIRQCPEVFPLLQEARMYHLSGNEIISERTKPRMHEFQSEVFMIIGGCTKDERFVAEVTCLDPLRRSRLEVAKLPLTEHELESENKKWVEFACVTLKNEVYISGGKETQHDVWKYNSSINKWIQIEYLNIGRWRHKMVVLGGKVYVIGGFDGLQRINNVETYDPFHNCWSEAAPLLVHVSSFAATSHKKKLYVIGGGPNGKLATDKTQCYDPSTNKWSLKAAMPVEAKCINAVSFRDRIYVVGGAMRALYAYSPLEDSWCLVTQLSHERASCGIAPCNNRLYITGGRDEKNEVIATVLCWDPEAQKLTEECVLPRGVSHHGSVTIRKSYTHIRRIVPGAVSV

SEQ ID NO: 50634 - protein, 564 aa, Homo sapiens
MLGGTDCRTFLTSHINLKKTLCDVILMVQERKIPAHRVVLAAASHFFNLMFTTNMLESKSFEVELKDAEPDIIEQLVEFAYTARISVNSNNVQSLLDAANQYQIEPVKKMCVDFLKEQVDASNCLGISVLAECLDCPELKATADDFIHQHFTEVYKTDEFLQLDVKRVTHLLNQDTLTVRAEDQVYDAAVRWLKYDEPNRQPFMVDILAKVRFPLISKNFLSKTVQAEPLIQDNPECLKMVISGMRYHLLSPEDREELVDGTRPRRKKHDYRIALFGGSQPQSCRYFNPKDYSWTDIRCPFEKRRDAACVFWDNVVYILGGSQLFPIKRMDCYNVVKDSWYSKLGPPTPRDSLAACAAEGKIYTSGGSEVGNSALYLFECYDTRTESWHTKPSMLTQRCSHGMVEANGLIYVCGGSLGNNVSGRVLNSCEVYDPATETWTELCPMIEARKNHGLVFVKDKIFAVGGQNGLGGLDNVEYYDIKLNEWKMVSPMPWKGVTVKCAAVGSIVYVLAGFQGVGRLGHILEYNTETDKWVANSKVRAFPVTSCLICVVDTCGANEETLET

SEQ ID NO: 50635 - protein, 586 aa, Homo sapiens
MAASGVEKSSKKKTEKKLAAREEAKLLAGFMGVMNNMRKQKTLCDVILMVQERKIPAHRVVLAAASHFFNLMFTTNMLESKSFEVELKDAEPDIIEQLVEFAYTARISVNSNNVQSLLDAANQYQIEPVKKMCVDFLKEQVDASNCLGISVLAECLDCPELKATADDFIHQHFTEVYKTDEFLQLDVKRVTHLLNQDTLTVRAEDQVYDAAVRWLKYDEPNRQPFMVDILAKVRFPLISKNFLSKTVQAEPLIQDNPECLKMVISGMRYHLLSPEDREELVDGTRPRRKKHDYRIALFGGSQPQSCRYFNPKDYSWTDIRCPFEKRRDAACVFWDNVVYILGGSQLFPIKRMDCYNVVKDSWYSKLGPPTPRDSLAACAAEGKIYTSGGSEVGNSALYLFECYDTRTESWHTKPSMLTQRCSHGMVEANGLIYVCGGSLGNNVSGRVLNSCEVYDPATETWTELCPMIEARKNHGLVFVKDKIFAVGGQNGLGGLDNVEYYDIKLNEWKMVSPMPWKGVTVKCAAVGSIVYVLAGFQGVGRLGHILEYNTETDKWVANSKVRAFPVTSCLICVVDTCGANEETLET

SEQ ID NO: 50636 - protein, 538 aa, Homo sapiens
MVQERKIPAHRVVLAAASHFFNLMFTTNMLESKSFEVELKDAEPDIIEQLVEFAYTARISVNSNNVQSLLDAANQYQIEPVKKMCVDFLKEQVDASNCLGISVLAECLDCPELKATADDFIHQHFTEVYKTDEFLQLDVKRVTHLLNQDTLTVRAEDQVYDAAVRWLKYDEPNRQPFMVDILAKVRFPLISKNFLSKTVQAEPLIQDNPECLKMVISGMRYHLLSPEDREELVDGTRPRRKKHDYRIALFGGSQPQSCRYFNPKDYSWTDIRCPFEKRRDAACVFWDNVVYILGGSQLFPIKRMDCYNVVKDSWYSKLGPPTPRDSLAACAAEGKIYTSGGSEVGNSALYLFECYDTRTESWHTKPSMLTQRCSHGMVEANGLIYVCGGSLGNNVSGRVLNSCEVYDPATETWTELCPMIEARKNHGLVFVKDKIFAVGGQNGLGGLDNVEYYDIKLNEWKMVSPMPWKGVTVKCAAVGSIVYVLAGFQGVGRLGHILEYNTETDKWVANSKVRAFPVTSCLICVVDTCGANEETLET

SEQ ID NO: 50637 - protein, 386 aa, Homo sapiens
MAASGVEKSSKKKTEKKLAAREEAKLLAGFMGVMNNMRKQKTLCDVILMVQERKIPAHRVVLAAASHFFNLMFTTNMLESKSFEVELKDAEPDIIEQLLHYKFFKMKNRKDGRVSVSYAILIQGLKIYEIYSTNFPEHFTEVYKTDEFLQLDVKRVTHLLNQDTLTVRAEDQVYDAAVRWLKYDEPNRQPFMVDILAKVRFPLISKNFLSKTVQAEPLIQDNPECLKMVISGMRYHLLSPEDREELVDGTRPRRKKHDYRIALFGGSQPQSCRYFNPKDYSWTDIRCPFEKRRDAACVFWDNVVYILGGSQLFPIKRMDCYNVVKDSWYSKLGPPTPRDSLAACAAEGKIYTSGGSEVGNSALYLFCLIPVKFMILPQKHGLSCVQ

SEQ ID NO: 50638 - protein, 427 aa, Homo sapiens
MAASGVEKSSKKKTEKKLAAREEAKLLAGFMGVMNNMRKQKTLCDVILMVQERKIPAHRVVLAAASHFFNLMFTTNMLESKNFLSKTVQAEPLIQDNPECLKMVISGMRYHLLSPEDREELVDGTRPRRKKHDYRIALFGGSQPQSCRYFNPKDYSWTDIRCPFEKRRDAACVFWDNVVYILGGSQLFPIKRMDCYNVVKDSWYSKLGPPTPRDSLAACAAEGKIYTSGGSEVGNSALYLFECYDTRTESWHTKPSMLTQRCSHGMVEANGLIYVCGGSLGNNVSGRVLNSCEVYDPATETWTELCPMIEARKNHGLVFVKDKIFAVGGQNGLGGLDNVEYYDIKLNEWKMVSPMPWKGVTVKCAAVGSIVYVLAGFQGVGRLGHILEYNTETDKWVANSKVRAFPVTSCLICVVDTCGANEETLET

SEQ ID NO: 50639 - protein, 510 aa, Homo sapiens
MLESKSFEVELKDAEPDIIEQLVEFAYTARISVNSNNVQSLLDAANQYQIEPVKKMCVDFLKEQVDASNCLGISVLAECLDCPELKATADDFIHQHFTEVYKTDEFLQLDVKRVTHLLNQDTLTVRAEDQVYDAAVRWLKYDEPNRQPFMVDILAKVRFPLISKNFLSKTVQAEPLIQDNPECLKMVISGMRYHLLSPEDREELVDGTRPRRKKHDYRIALFGGSQPQSCRYFNPKDYSWTDIRCPFEKRRDAACVFWDNVVYILGGSQLFPIKRMDCYNVVKDSWYSKLGPPTPRDSLAACAAEGKIYTSGGSEVGNSALYLFECYDTRTESWHTKPSMLTQRCSHGMVEANGLIYVCGGSLGNNVSGRVLNSCEVYDPATETWTELCPMIEARKNHGLVFVKDKIFAVGGQNGLGGLDNVEYYDIKLNEWKMVSPMPWKGVTVKCAAVGSIVYVLAGFQGVGRLGHILEYNTETDKWVANSKVRAFPVTSCLICVVDTCGANEETLET

SEQ ID NO: 50640 - protein, 361 aa, Homo sapiens
MVDILAKVRFPLISKNFLSKTVQAEPLIQDNPECLKMVISGMRYHLLSPEDREELVDGTRPRRKKHDYRIALFGGSQPQSCRYFNPKDYSWTDIRCPFEKRRDAACVFWDNVVYILGGSQLFPIKRMDCYNVVKDSWYSKLGPPTPRDSLAACAAEGKIYTSGGSEVGNSALYLFECYDTRTESWHTKPSMLTQRCSHGMVEANGLIYVCGGSLGNNVSGRVLNSCEVYDPATETWTELCPMIEARKNHGLVFVKDKIFAVGGQNGLGGLDNVEYYDIKLNEWKMVSPMPWKGVTVKCAAVGSIVYVLAGFQGVGRLGHILEYNTETDKWVANSKVRAFPVTSCLICVVDTCGANEETLET

SEQ ID NO: 50641 - protein, 564 aa, Homo sapiens; identical to SEQ ID NO: 50634

SEQ ID NO: 50642 - protein, 143 aa, Homo sapiens
MLGGTDCRTFLTSHINLKKTLCDVILMVQERKIPAHRVVLAAASHFFNLMFTTNMLESKSFEVELKDAEPDIIEQLVEFAYTARISVNSNNVQSLLDAANQYQIEPVKKMCVDFLKEQVDASNCLGKKYQIPVVCLFCFILYF

SEQ ID NO: 50643 - protein, 166 aa, Homo sapiens
MAASGVEKSSKKKTEKKLAAREEAKLLAGFMGVMNNMRKQKTLCDVILMVQERKIPAHRVVLAAASHFFNLMFTTNMLESKSFEVELKDAEPDIIEQLVEFAYTARISVNSNNVQSLLDAANQYQIEPVKKMCVDFLKEQVDASNCLGEAEKVDQSLPECGMLFTV

SEQ ID NO: 50644 - protein, 620 aa, Homo sapiens
MASDSMSSKQARNHITKGKRQQQHQQIKNRSSISDGDGEDSFIFEANEAWKDFHGSLLRFYENGELCDVTLKVGSKLISCHKLVLACVIPYFRAMFLSEMAEAKQTLIEIRDFDGDAIEDLVKFVYSSRLTLTVDNVQPLLYAACILQVELVARACCEYMKLHFHPSNCLAVRAFAESHNRIDLMDMADQYACDHFTEVVECEDFVSVSPQHLHKLLSSSDLNIENEKQVYNAAIKWLLANPQHHSKWLDETLAQVRLPLLPVDFLMGVVAKEQIVKQNLKCRDLLDEARNYHLHLSSRAVPDFEYSIRTTPRKHTAGVLFCVGGRGGSGDPFRSIECYSINKNSWFFGPEMNSRRRHVGVISVEGKVYAVGGHDGNEHLGSMEMFDPLTNKWMMKASMNTKRRGIALASLGGPIYAIGGLDDNTCFNDVERYDIESDQWSTVAPMNTPRGGVGSVALVNHVYAVGGNDGMASLSSVERYDPHLDKWIEVKEMGQRRAGNGVSKLHGCLYVVGGFDDNSPLSSVERYDPRSNKWDYVAALTTPRGGVGIATVMGKIFAVGGHNGNAYLNTVEAFDPVLNRWELVGSVSHCRAGAGVAVCSCLTSQIRDVGHGSNNVVDCM

SEQ ID NO: 50645 - protein, 620 aa, Homo sapiens; identical to SEQ ID NO: 50644

SEQ ID NO: 50646 - protein, 269 aa, Homo sapiens [sequence omitted]

SEQ ID NO: 50647 - protein, 624 aa, Homo sapiens
MQPDPRPSGAGACCRFLPLQSQCPEGAGDAVMYASTECKAEVTPSQHGNRTFSYTLEDHTKQAFGIMNELRLSQQLCDVTLQVKYQDAPAAQFMAHKVVLASSSPVFKAMFTNGLREQGMEVVSIEGIHPKVMERLIEFAYTASISMGEKCVLHVMNGAVMYQIDSVVRACSDFLVQQLDPSNAIGIANFAEQIGCVELHQRAREYIYMHFGEVAKQEEFFNLSHCQLVTLISRDDLNVRCESEVFHACINWVKYDCEQRRFYVQALLRAVRCHSLTPNFLQMQLQKCEILQSDSRCKDYLVKIFEELTLHKPTQVMPCRAPKVGRLIYTAGGYFRQSLSYLEAYNPSDGTWLRLADLQVPRSGLAGCVVGGLLYAVGGRNNSPDGNTDSSALDCYNPMTNQWSPCAPMSVPRNRIGVGVIDGHIYAVGGSHGCIHHNSVERYEPERDEWHLVAPMLTRRIGVGVAVLNRLLYAVGGFDGTNRLNSAECYYPERNEWRMITAMNTIRSGAGVCVLHNCIYAAGGYDGQDQLNSVERYDVETETWTFVAPMKHRRSALGITVHQGRIYVLGGYDGHTFLDSVECYDPDTDTWSEVTRMTSGRSGVGVAVTMEPCRKQIDQQNCTC

SEQ ID NO: 50648 - protein, 624 aa, Homo sapiens; identical to SEQ ID NO: 50647

SEQ ID NO: 50649 - protein, 732 aa, Homo sapiens
MEGGDQSEEEPRERSQAGGMGTLWSQESTPEERLPVEGSRPWAVARRVLTAILILGLLLCFSVLLFYNFQNCGPRPCETSVCLDLRDHYLASGNTSVAPCTDFFSFACGRAKETNNSFQELATKNKNRLRRILEVQNSWHPGSGEEKAFQFYNSCMDTLAIEAAGTGPLRQVIEELGGWRISGKWTSLNFNRTLRLLMSQYGHFPFFRAYLGPHPASPHTPVIQIDQPEFDVPLKQDQEQKIYAQIFREYLTYLNQLGTLLGGDPSKVQEHSSLSISITSRLFQFLRPLEQRRAQGKLFQMVTIDQLKEMAPAIDWLSCLQATFTPMSLSPSQSLVVHDVEYLKNMSQLVEEMLLKQRDFLQSHMILGLVVTLSPALDSQFQEARRKLSQKLRELTEQPPMPARPRWMKCVEETGTFFEPTLAALFVREAFGPSTRSAAMKLFTAIRDALITRLRNLPWMNEETQNMAQDKVAQLQVEMGASEWALKPELARQEYNDIQLGSSFLQSVLSCVRSLRARIVQSFLQPHPQHRWKVSPWDVNAYYSVSDHVVVFPAGLLQPPFFHPGYPRAVNFGAAGSIMAHELLHIFYQLLLPGGCLACDNHALQEAHLCLKRHYAAFPLPSRTSFNDSLTFLENAADVGGLAIALQAYSKRLLRHHGETVLPSLDLSPQQIFFRSYAQVMCRKPSPQDSHDTHSPPHLRVHGPLSSTPAFARYFRCARGALLNPSSRCQLW

SEQ ID NO: 50650 - protein, 644 aa, Homo sapiens
MSRQFSSRSGYRSGGGFSSGSAGIINYQRRTTSSSTRRSGGGGGRFSSCGGGGGSFGAGGGFGSRSLVNLGGSKSISISVARGGGRGSGFGGGYGGGGFGGGGFGGGGFGGGGIGGGGFGGFGSGGGGFGGGGFGGGGYGGGYGPVCPPGGIQEVTINQSLLQPLNVEIDPEIQKVKSREREQIKSLNNQFASFIDKVRFLEQQNQVLQTKWELLQQVDTSTRTHNLEPYFESFINNLRRRVDQLKSDQSRLDSELKNMQDMVEDYRNKYEDEINKRTNAENEFVTIKKDVDGAYMTKVDLQAKLDNLQQEIDFLTALYQAELSQMQTQISETNVILSMDNNRSLDLDSIIAEVKAQYEDIAQKSKAEAESLYQSKYEELQITAGRHGDSVRNSKIEISELNRVIQRLRSEIDNVKKQISNLQQSISDAEQRGENALKDAKNKLNDLEDALQQAKEDLARLLRDYQELMNTKLALDLEIATYRTLLEGEESRMSGECAPNVSVSVSTSHTTISGGGSRGGGGGGYGSGGSSYGSGGGSYGSGGGGGGGRGSYGSGGSSYGSGGGSYGSGGGGGGHGSYGSGSSSGGYRGGSGGGGGGSSGGRGSGGGSSGGSIGGRGSSSGGVKSSGGSSSVKFVSTTYSGVTR

SEQ ID NO: 50651 - protein, 584 aa, Homo sapiens
MSVRYSSSKHYSSSRSGGGGGGGGCGGGGGVSSLRISSSKGSLGGGFSSGGFSGGSFSRGSSGGGCFGGSSGGYGGLGGFGGGSFRGSYGSSSFGGSYGGIFGGGSFGGGSFGGGSFGGGGFGGGGFGGGFGGGFGGDGGLLSGNEKVTMQNLNDRLASYLDKVRALEESNYELEGKIKEWYEKHGNSHQGEPRDYSKYYKTIDDLKNQILNLTTDNANILLQIDNARLAADDFRLKYENEVALRQSVEADINGLRRVLDELTLTKADLEMQIESLTEELAYLKKNHEEEMKDLRNVSTGDVNVEMNAAPGVDLTQLLNNMRSQYEQLAEQNRKDAEAWFNEKSKELTTEIDNNIEQISSYKSEITELRRNVQALEIELQSQLALKQSLEASLAETEGRYCVQLSQIQAQISALEEQLQQIRAETECQNTEYQQLLDIKIRLENEIQTYRSLLEGEGSSGGGGRGGGSFGGGYGGGSSGGGSSGGGHGGGHGGSSGGGYGGGSSGGGSSGGGYGGGSSSGGHGGSSSGGYGGGSSGGGGGGYGGGSSGGGSSSGGGYGGGSSSGGHKSSSSGSVGESSSKGPRY

SEQ ID NO: 50652 - protein, 494 aa, Homo sapiens
MDLSNNTMSLSVRTPGLSRRLSSQSVIGRPRGMSASSVGSGYGGSAFGFGASCGGGFSAASMFGSSSGFGGGSGSSMAGGLGAGYGRALGGGSFGGLGMGFGGSPGGGSLGILSGNDGGLLSGSEKETMQNLNDRLASYLDKVRALEEANTELENKIREWYETRGTGTADASQSDYSKYYPLIEDLRNKIISASIGNAQLLLQIDNARLAAEDFRMKYENELALRQGVEADINGLRRVLDELTLTRTDLEMQIESLNEELAYMKKNHEDELQSFRVGGPGEVSVEMDAAPGVDLTRLLNDMRAQYETIAEQNRKDAEAWFIEKSGELRKEISTNTEQLQSSKSEVTDLRRAFQNLEIELQSQLAMKKSLEDSLAEAEGDYCAQLSQVQQLISNLEAQLLQVRADAERQNVDHQRLLNVKARLELEIETYRRLLDGEAQGDGLEESLFVTDSKSQAQSTDSSKDPTKTRKIKTVVQEMVNGEVVSSQVQEIEELM

SEQ ID NO: 50653 - protein, 355 aa, Homo sapiens
MSLRLQSSSASYGGGFGGGSCQLGGGRGVSTCSTRFVSGGSAGGYGGGVSCGFGGGAGSGFGGGLGGGFGGGFAGGFVDFGACDGGLLTGNEKITMQNLNDRLASYLEKVRALEEANADLEVKIRDWHLKQSPASPERDYSPYYKTIEELRDKILTATIENNRVILEIDNARLAADDFRLKYENELALRQSVEADINGLRRVLDELTLSKTDLEMQIESLNEELAYMKKNHEEEMKEFSNQVVGQVNVEMDATPGIDLTRVLAEMREQYEAMAERNRRDAEEWFHTKSAELNKEVSTNTAMIQTSKTEITELRRTLQGLEIELQSQLSMKAGLENTAADPGTHQQHRGPAERAPQ

SEQ ID NO: 50654 - protein, 458 aa, Homo sapiens
MSLRLQSSSASYGGGFGGGSCQLGGGRGVSTCSTRFVSGGSAGGYGGGVSCGFGGGAGSGFGGGYGGGLGGGYGGGLGGGFGGGFAGGFVDFGACDGGLLTGNEKITMQNLNDRLASYLEKVRALEEANADLEVKIRDWHLKQSPASPERDYSPYYKTIEELRDKILTATIENNRVILEIDNARLAADDFRLKYENELALRQSVEADINGLRRVLDELTLSKTDLEMQIESLNEELAYMKKNHEEEMKEFSNQVVGQVNVEMDATPGIDLTRVLAEMREQYEAMAERNRRDAEEWFHTKSAELNKEVSTNTAMIQTSKTEITELRRTLQGLEIELQSQLSMKAGLENTVAETECRYALQLQQIQGLISSIEAQLSELRSEMECQNQEYKMLLDIKTRLEQEIATYRSLLEGQDAKMIGFPSSAGSVSPRSTSVTTTSSASVTTTSNASGRRTSDVRRP

SEQ ID NO: 50655 - protein, 420 aa, Homo sapiens
MSLRLQSSSASYGGGFGGGSCQLGGGRGVSTCSTRFVSGGSAGGYGGGVSCGFGGGAGSGFGGGYGGGLGGGYGGGLGGGFGGGFAGGFVDFGACDGGLLTGNEKITMQNLNDRLASYLEKVRALEEANADLEVKIRDWHLKQSPASPERDYSPYYKTIEELRDKILTATIENNRVILEIDNARLAADDFRLKYENELALRQSVEADINGLRRVLDELTLSKTDLEMQIESLNEELAYMKKNHEEEMKEFSNQVVGQVNVEMDATPGIDLTRVLAEMREQYEAMAERNRRDAEEWFHTKSAELNKEVSTNTAMIQTSKTEITELRRTLQGLEIELQSQLSMKAGLENTVAETECRYALQLQQIQGLISSIEAQLSELRSEMECQNQEYKMLLDIKTRLEQEIATYRSLLEGQDAKKRQPP

SEQ ID NO: 50656 - protein, 456 aa, Homo sapiens
MTTTFLQTSSSTFGGGSTRGGSLLAGGGGFGGGSLSGGGGSRSISASSARFVSSGSGGGYGGGMRVCGFGGGAGSVFGGGFGGGVGGGFGGGFGGGDGGLLSGNEKITMQNLNDRLASYLDKVRALEEANADLEVKIHDWYQKQTPTSPECDYSQYFKTIEELRDKIMATTIDNSRVILEIDNARLAADDFRLKYENELALRQGVEADINGLRRVLDELTLARTDLEMQIEGLNEELAYLKKNHEEEMKEFSSQLAGQVNVEMDAAPGVDLTRVLAEMREQYEAMAEKNRRDVEAWFFSKTEELNKEVASNTEMIQTSKTEITDLRRTMQELEIELQSQLSMKAGLENSLAETECRYATQLQQIQGLIGGLEAQLSELRCEMEAQNQEYKMLLDIKTRLEQEIATYRSLLEGQDAKMAGIAIREASSGGGGSSSNFHINVEESVDGQVVSSHKREI

SEQ ID NO: 50657 - protein, 291 aa, Homo sapiens
MTGTRSRPQPAQNATTANTSRPLKSSGTRYENELALRQGVEADINGLRRVLDELTLARTDLEMQIEGLNEELAYLKKNHEEEMKEFSSQLAGQVNVEMDAAPGVDLTRVLAEMREQYEAMAEKNRRDVEAWFFSKTEELNKEVASNTEMIQTSKTEITDLRRTMQELEIELQSQLSMKAGLENSLAETECRYATQLQQIQGLIGGLEAQLSELRCEMEAQNQEYKMLLDIKTRLEQEIATYRSLLEGQDAKMAGIAIREASSGGGGSSSNFHINVEESVDGQVVSSHKREI

SEQ ID NO: 50658 - protein, 456 aa, Homo sapiens; identical to SEQ ID NO: 50656

SEQ ID NO: 50659 - protein, 251 aa, Homo sapiens
MTGTRSRPQPAQNATTANTSRPLKSSGTRYENELALRQGVEADINGLRRVLDELTLARTDLEMQIEGLNEELAYLKKNHEEEMKEFSSQLAGQVNVEMDAAPGVDLTRVLAEMREQYEAMAEKNRRDVEAWFFSKTEELNKEVASNTEMIQTSKTEITDLRRTMQELEIELQSQLSMKAGLENSLAETECRYATQLQQIQGLIGGLEAQLSELRCEMEAQNQEYKMLLDIKTRLEQEIATYRSLLEGQDAK

SEQ ID NO: 50660 - protein, 220 aa, Homo sapiens
MTGTRSRPQPAQNATTANTSRPLKSSGTRYENELALRQGVEADINGLRRVLDELTLARTDLEMQIEGLNEELAYLKKNHEEEMKEFSSQLAGQVNVEMDAAPGVDLTRVLAEMREQYEAMAEKNRRDVEAWFFSKTEELNKEVASNTEMIQTSKTEITDLRRTMQELEIELQSQLSMKAGLENSLAETECRYATQLQQIQGLIGGLEAQLSELRCEMEAQ

SEQ ID NO: 50661 - protein, 473 aa, Homo sapiens
MTTCSRQFTSSSSMKGSCGIGGGIGGGSSRISSVLAGGSCRAPSTYGGGLSVSSRFSSGGACGLGGGYGGGFSSSSSFGSGFGGGYGGGLGAGFGGGLGAGFGGGFAGGDGLLVGSEKVTMQNLNDRLASYLDKVRALEEANADLEVKIRDWYQRQRPSEIKDYSPYFKTIEDLRNKIIAATIENAQPILQIDNARLAADDFRTKYEHELALRQTVEADVNGLRRVLDELTLARTDLEMQIEGLKEELAYLRKNHEEEMLALRGQTGGDVNVEMDAAPGVDLSRILNEMRDQYEQMAEKNRRDAETWFLSKTEELNKEVASNSELVQSSRSEVTELRRVLQGLEIELQSQLSMKASLENSLEETKGRYCMQLSQIQGLIGSVEEQLAQLRCEMEQQSQEYQILLDVKTRLEQEIATYRRLLEGEDAHLSSQQASGQSYSSREVFTSSSSSSSRQTRPILKEQSSSSFSQGQSS

SEQ ID NO: 50662 - protein, 432 aa, Homo sapiens
MTTSIRQFTSSSSIKGSSGLGGGSSRTSCRLSGGLGAGSCRLGSAGGLGSTLGGSSYSSCYSFGSGGGYGSSFGGVDGLLAGGEKATMQNLNDRLASYLDKVRALEEANTELEVKIRDWYQRQAPGPARDYSQYYRTIEELQNKILTATVDNANILLQIDNARLAADDFRTKFETEQALRLSVEADINGLRRVLDELTLARADLEMQIENLKEELAYLKKNHEEEMNALRGQVGGEINVEMDAAPGVDLSRILNEMRDQYEKMAEKNRKDAEDWFFSKTEELNREVATNSELVQSGKSEISELRRTMQALEIELQSQLSMKASLEGNLAETENRYCVQLSQIQGLIGSVEEQLAQLRCEMEQQNQEYKILLDVKTRLEQEIATYRRLLEGEDAHLTQYKKEPVTTRQVRTIVEEVQDGKVISSREQVHQTTR

SEQ ID NO: 50663 - protein, 639 aa, Homo sapiens
MSCQISCKSRGRGGGGGGFRGFSSGSAVVSGGSRRSTSSFSCLSRHGGGGGGFGGGGFGSRSLVGLGGTKSISISVAGGGGGFGAAGGFGGRGGGFGGGSSFGGGSGFSGGGFGGGGFGGGRFGGFGGPGGVGGLGGPGGFGPGGYPGGIHEVSVNQSLLQPLNVKVDPEIQNVKAQEREQIKTLNNKFASFIDKVRFLEQQNQVLQTKWELLQQMNVGTRPINLEPIFQGYIDSLKRYLDGLTAERTSQNSELNNMQDLVEDYKKKYEDEINKRTAAENDFVTLKKDVDNAYMIKVELQSKVDLLNQEIEFLKVLYDAEISQIHQSVTDTNVILSMDNSRNLDLDSIIAEVKAQYEEIAQRSKEEAEALYHSKYEELQVTVGRHGDSLKEIKIEISELNRVIQRLQGEIAHVKKQCKNVQDAIADAEQRGEHALKDARNKLNDLEEALQQAKEDLARLLRDYQELMNVKLALDVEIATYRKLLEGEECRMSGDLSSNVTVSVTSSTISSNVASKAAFGGSGGRGSSSGGGYSSGSSSYGSGGRQSGSRGGSGGGGSISGGGYGSGGGSGGRYGSGGGSKGGSISGGGYGSGGGKHSSGGGSRGGSSSGGGYGSGGGGSSSVKGSSGEAFGSSVTFSFR

SEQ ID NO: 50664 - protein, 424 aa, Homo sapiens
MDFSRRSFHRSLSSSLQAPVVSTVGMQRLGTTPSVYGGAGGRGIRISNSRHTVNYGSDLTGGGDLFVGNEKMAMQNLNDRLASYLEKVRTLEQSNSKLEVQIKQWYETNAPRAGRDYSAYYRQIEELRSQIKDAQLQNARCVLQIDNAKLAAEDFRLKYETERGIRLTVEADLQGLNKVFDDLTLHKTDLEIQIEELNKDLALLKKEHQEEVDGLHKHLGNTVNVEVDAAPGLNLGVIMNEMRQKYEVMAQKNLQEAKEQFERQTAVLQQQVTVNTEELKGTEVQLTELRRTSQSLEIELQSHLSMKESLEHTLEETKARYSSQLANLQSLLSSLEAQLMQIRSNMERQNNEYHILLDIKTRLEQEIATYRRLLEGEDVKTTEYQLSTLEERDIKKTRKIKTVVQEVVDGKVVSSEVKEVEENI

SEQ ID NO: 50665 - protein, 525 aa, Homo sapiens
MSCSSRASSSRAGGSSSARVSAGGSSFSSGSRCGLGGSSAQGFRGGASSCSLSGGSSGAFGGSFGGGFGSCSVGGGFGGASGSGTGFGGGSSFGGVSGFGRGSGFCGSSRFSSGATGGFYSYGGGMGGGVGDGGLFSGGEKQTMQNLNDRLANYLDKVRALEEANTDLENKIKEWYDKYGPGSGDGGSGRDYSKYYSIIEDLRNQIIAATVENAGIILHIDNARLAADDFRLKYENELCLRQSVEADINGLRKVLDDLTMTRSDLEMQIESFTEELAYLRKNHEEEMKNMQGSSGGEVTVEMNAAPGTDLTKLLNDMRAQYEELAEQNRREAEERFNKQSASLQAQISTDAGAATSAKNEITELKRTLQALEIELQSQLAMKSSLEGTLADTEAGYVAQLSEIQTQISALEEEICQIWGETKCQNAEYKQLLDIKTRLEVEIETYRRLLDGEGGGSSFAEFGGRNSGSVNMGSRDLVSGDSRSGSCSGQGRDSSKTRVTKTIVEELVDGKVVSSQVSSISEVKVK

SEQ ID NO: 50666 - protein, 629 aa, Homo sapiens
MSRQASKTSGGGSQGFSGRSAVVSGSSRMSCVAHSGGAGGGAYGFRSGAGGFGSRSLYNLGGNKSISISVAAGGSRAGGFGGGRSSCAFAGGYGGGFGSGYGGGFGGGFGGGRGMGGGFGGAGGFGGAGGFGGAGGFGGPGGFGGSGGFGGPGSLGSPGGFGPGGFPGGIQEVTINQSLLQPLNVEIDPQIGQVKAQEREQIKTLNNKFASFIDKVRFLEQQNKVLETKWNLLQQQGTSSISGTNNLEPLFENHINYLRSYLDNILGERGRLDSELKNMEDLVEDFKKKYEDEINKRTAAENEFVTLKKDVDSAYMNKVELQAKVDALIDEIDFLRTLYDAELSQMQSHISDTSVVLSMDNNRSLDLDSIIAEVRAQYEDIAQRSKAEAEALYQTKLGELQTTAGRHGDDLRNTKSEIIELNRMIQRLRAEIEGVKKQNANLQTAIAEAEQHGEMALKDANAKLQELQAALQQAKDDLARLLRDYQELMNVKLALDVEIATYRKLLEGEEYSRMSGECPSAVSISVVSSSTTSASAGGYGGGYGGGMGGGLGGGFSAGGGSGSGFGRGGGGGIGGGFGGGSSGFSGGSGFGSISGARYGVSGGGFSSASNRGGSIKFSQSSQSSQRYSR

SEQ ID NO: 50667 - protein, 628 aa, Homo sapiens
MSRQASKTSGGGSQGFSGRSAVVSGSSRMSCVAHSGGAGGGAYGFRSGAGGFGSRSLYNLGGNKSISISVAAGGSRAGGFGGGRSSCAFAGGYGGGFGSGYGGGFGGGFGGGRGMGGGFGGAGGFGGAGGFGGAGGFGGPGGFGGSGGFGGPGSLGSPGGFGPGGFPGGIQEVTINQSLLQPLNVEIDPQIGQVKAQEREQIKTLNNKFASFIDKVRFLEQQNKVLETKWNLLQQQGTSSISGTNNLEPLFENHINYLRSYLDNILGERGRLDSELKNMEDLVEDFKKKYEDEINKRTAAENEFVTLKKDVDSAYMNKVELQAKVDALIDEIDFLRTLYDAELSQMQSHISDTSVVLSMDNNRSLDLDSIIAEVRAQYEDIAQRSKAEAEALYQTKLGELQTTAGRHGDDLRNTKSEIIELNRMIQRLRAEIEGVKKQNANLQTAIAEAEQHGEMALKDANAKLQELQAALQQAKDDLARLLRDYQELMNVKLALDVEIATYRKLLEGEEYRMSGECPSAVSISVVSSSTTSASAGGYGGGYGGGMGGGLGGGFSAGGGSGSGFGRGGGGGIGGGFGGGSSGFSGGSGFGSISGARYGVSGGGFSSASNRGGSIKFSQSSQSSQRYSR

SEQ ID NO: 50668 - protein, 416 aa, Homo sapiens [sequence omitted]

SEQ ID NO: 50669 - protein, 448 aa, Homo sapiens
MTSSCCVTNNLQASLKSCPRPASVCSSGVNCRPELCLGYVCQPMACLPSVCLPTTFRPASCLSKTYLSSSCQAASGISGSMGPGSWYSEGAFNGNEKETMQFLNDRLASYLTRVRQLEQENAELESRIQEASHSQVLTMTPDYQSHFRTIEELQQKILCTKAENARMVVNIDNAKLAADDFRAKYEAELAMRQLVEADINGLRRILDDLTLCKADLEAQVESLKEELMCLKKNHEEEVGSLRCQLGDRLNIEVDAAPPVDLTRVLEEMRCQYEAMVEANRRDVEEWFNMQMEELNQQVATSSEQLQNYQSDIIDLRRTVNTLEIELQAQHSLRDSLENTLTESEARYSSQLAQMQCMITNVEAQLAEIRADLERQNQEYQVLLDVRARLEGEINTYRSLLENEDCKLPCNPCSTPSCTTCVPSPCVPRTVCVPRTVGMPCSPCPQGRY

SEQ ID NO: 50670 - protein, 404 aa, Homo sapiens
MSYSCGLPSLSCRTSCSSRPCVPPSCHGCTLPGACNIPANVSNCNWFCEGSFNGSEKETMQFLNDRLASYLEKVRQLERDNAELENLIRERSQQQEPLVCASYQSYFKTIEELQQKILCSKSENARLVVQIDNAKLASDDFRTKYETELSLRQLVESDINGLRRILDELTLCRSDLEAQVESLKEELLCLKQNHEQEVNTLRCQLGDRLNVEVDAAPTVDLNQVLNETRSQYEALVETNRREVEQWFATQTEELNKQVVSSSEQLQSYQAEIIELRRTVNALEIELQAQHNLRDSLENTLTESEARYSSQLSQVQRLITNVESQLAEIRSDLERQNQEYQVLLDVRARLECEINTYRSLLESEDCKLPSNPCATTNACDKSTGPCISNPCGLRARCGPCNTFGY

SEQ ID NO: 50671 - protein, 404 aa, Homo sapiens
MPYNFCLPSLSCRTSCSSRPCVPPSCHGYTLPGACNIPANVSNCNWFCEGSFNGSEKETMQFLNDRLASYLEKVRQLERDNAELENLIRERSQQQEPLLCPSYQSYFKTIEELQQKILCSKSENARLVVQIDNAKLAADDFRTKYQTEQSLRQLVESDINSLRRILDELTLCRSDLEAQMESLKEELLSLKQNHEQEVNTLRCQLGDRLNVEVDAAPAVDLNQVLNETRNQYEALVETNRREVEQWFATQTEELNKQVVSSSEQLQSYQAEIIELRRTVNALEIELQAQHNLRYSLENTLTESEARYSSQLSQVQSLITNVESQLAEIRSDLERQNQEYQVLLDVRARLECEINTYRSLLESEDCKLPSNPCATTNACEKPIGSCVTNPCGPRSRCGPCNTFGY

SEQ ID NO: 50672 - protein, 436 aa, Homo sapiens
MLYAKPPPTINGIKGLQRKERLKPAHIHLQQLTCFSITCSSTMSYSCCLPSLGCRTSCSSRPCVPPSCHGYTLPGACNIPANVSNCNWFCEGSFNGSEKETMQFLNDRLASYLEKVRQLERDNAELEKLIQERSQQQEPLLCPSYQSYFKTIEELQQKILCAKAENARLVVNIDNAKLASDDFRSKYQTEQSLRLLVESDINSIRRILDELTLCKSDLESQVESLREELICLKKNHEEEVNTLRSQLGDRLNVEVDTAPTVDLNQVLNETRSQYEALVEINRREVEQWFATQTEELNKQVVSSSEQLQSCQAEIIELRRTVNALEIELQAQHNLRDSLENTLTESEAHYSSQLSQVQSLITNVESQLAEIRCDLERQNQEYQVLLDVRARLECEINTYRSLLESEDCKLPCNPCATTNASGNSCGPCGTSQKGCCN

SEQ ID NO: 50673 - protein, 394 aa, Homo sapiens
MSYSCCLPSLGCRTSCSSRPCVPPSCHGYTLPGACNIPANVSNCNWFCEGSFNGSEKETMQFLNDRLASYLEKVRQLERDNAELEKLIQERSQQQEPLLCPSYQSYFKTIEELQQKILCAKAENARLVVNIDNAKLASDDFRSKYQTEQSLRLLVESDINSIRRILDELTLCKSDLESQVESLREELICLKKNHEEEVNTLRSQLGDRLNVEVDTAPTVDLNQVLNETRSQYEALVEINRREVEQWFATQTEELNKQVVSSSEQLQSCQAEIIELRRTVNALEIELQAQHNLRDSLENTLTESEAHYSSQLSQVQSLITNVESQLAEIRCDLERQNQEYQVLLDVRARLECEINTYRSLLESEDCKLPCNPCATTNASGNSCGPCGTSQKGCCN

SEQ ID NO: 50674 - protein, 425 aa, Homo sapiens
MYSSSSCKLPSLSPVARSFSACSVGLGRSSYRATSCLPALCLPAGGFATSYSGGGGWFGEGILTGNEKETMQSLNDRLAGYLEKVRQLEQENASLESRIREWCEQQVPYMCPDYQSYFRTIEELQKKTLCSKAENARLVVEIDNAKLAADDFRTKYETEVSLRQLVESDINGLRRILDDLTLCKSDLEAQVESLKEELLCLKKNHEEEVNSLRCQLGDRLNVEVDAAPPVDLNRVLEEMRCQYETLVENNRRDAEDWLDTQSEELNQQVVSSSEQLQSCQAEIIELRRTVNALEIELQAQHSMRDALESTLAETEARYSSQLAQMQCMITNVEAQLAEIRADLERQNQEYQVLLDVRARLECEINTYRGLLESEDSKLPCNPCAPDYSPSKSCLPCLPAASCGPSAARTNCSPRPICVPCPGGRF

SEQ ID NO: 50675 - protein, 455 aa, Homo sapiens
MASKCLKAGFSSGSLKSPGGASGGSTRVSAMYSSSSCKLPSLSPVARSFSACSVGLGRSSYRATSCLPALCLPAGGFATSYSGGGGWFGEGILTGNEKETMQSLNDRLAGYLEKVRQLEQENASLESRIREWCEQQVPYMCPDYQSYFRTIEELQKKTLCSKAENARLVVEIDNAKLAADDFRTKYETEVSLRQLVESDINGLRRILDDLTLCKSDLEAQVESLKEELLCLKKNHEEEVNSLRCQLGDRLNVEVDAAPPVDLNRVLEEMRCQYETLVENNRRDAEDWLDTQSEELNQQVVSSSEQLQSCQAEIIELRRTVNALEIELQAQHSMRDALESTLAETEARYSSQLAQMQCMITNVEAQLAEIRADLERQNQEYQVLLDVRARLECEINTYRGLLESEDSKLPCNPCAPDYSPSKSCLPCLPAASCGPSAARTNCSPRPICVPCPGGRF

SEQ ID NO: 50676 - protein, 467 aa, Homo sapiens
MATQTCTPTFSTGSIKGLCGTAGGISRVSSIRSVGSCRVPSLAGAAGYISSARSGLSGLGSCLPGSYLSSECHTSGFVGSGGWFCEGSFNGSEKETMQFLNDRLANYLEKVRQLERENAELESRIQEWYEFQIPYICPDYQSYFKTIEDFQQKILLTKSENARLVLQIDNAKLAADDFRTKYETELSLRQLVEADINGLRRILDELTLCKADLEAQVESLKEELMCLKKNHEEEVSVLRCQLGDRLNVEVDAAPPVDLNKILEDMRCQYEALVENNRRDVEAWFNTQTEELNQQVVSSSEQLQCCQTEIIELRRTVNALEIELQAQHSMRNSLESTLAETEARYSSQLAQMQCLISNVEAQLSEIRCDLERQNQEYQVLLDVKARLEGEIATYRHLLEGEDCKLPPQPCATACKPVIRVPSVPPVPCVPSVPCTPAPQVGTQIRTITEEIRDGKVISSREHVQSRPL

SEQ ID NO: 50677 - protein, 417 aa, Homo sapiens
MLRSGLSGLGSCLPGSYLSSECHTSGFVGSGGWFCEGSFNGSEKETMQFLNDRLANYLEKVRQLERENAELESRIQEWYEFQIPYICPDYQSYFKTIEDFQQKILLTKSENARLVLQIDNAKLAADDFRTKYETELSLRQLVEADINGLRRILDELTLCKADLEAQVESLKEELMCLKKNHEEEVSVLRCQLGDRLNVEVDAAPPVDLNKILEDMRCQYEALVENNRRDVEAWFNTQTEELNQQVVSSSEQLQCCQTEIIELRRTVNALEIELQAQHSMRNSLESTLAETEARYSSQLAQMQCLISNVEAQLSEIRCDLERQNQEYQVLLDVKARLEGEIATYRHLLEGEDCKLPPQPCATACKPVIRVPSVPPVPCVPSVPCTPAPQVGTQIRTITEEIRDGKVISSREHVQSRPL

SEQ ID NO: 50678 - protein, 449 aa, Homo sapiens
MTSFYSTSSCPLGCTMAPGARNVFVSPIDVGCQPVAEANAASMCLLANVAHANRVRVGSTPLGRPSLCLPPTSHTACPLPGTCHIPGNIGICGAYGKNTLNGHEKETMKFLNDRLANYLEKVRQLEQENAELETTLLERSKCHESTVCPDYQSYFRTIEELQQKILCSKAENARLIVQIDNAKLAADDFRIKLESERSLHQLVEADKCGTQKLLDDATLAKADLEAQQESLKEEQLSLKSNHEQEVKILRSQLGEKFRIELDIEPTIDLNRVLGEMRAQYEAMVETNHQDVEQWFQAQSEGISLQAMSCSEELQCCQSEILELRCTVNALEVERQAQHTLKDCLQNSLCEAEDRYGTELAQMQSLISNLEEQLSEIRADLERQNQEYQVLLDVKARLENEIATYRNLLESEDCKLPCNPCSTPASCTSCPSCGPVTGGSPSGHGASMGR

SEQ ID NO: 50679 - protein, 456 aa, Homo sapiens
MTSSYSSSSCPLGCTMAPGARNVSVSPIDIGCQPGAEANIAPMCLLANVAHANRVRVGSTPLGRPSLCLPPTCHTACPLPGTCHIPGNIGICGAYGENTLNGHEKETMQFLNDRLANYLEKVRQLEQENAELEATLLERSKCHESTVCPDYQSYFHTIEELQQKILCSKAENARLIVQIDNAKLAADDFRIKLESERSLRQLVEADKCGTQKLLDDATLAKADLEAQQESLKEEQLSLKSNHEQEVKILRSQLGEKLRIELDIEPTIDLNRVLGEMRAQYEAMLETNRQDVEQWFQAQSEGISLQDMSCSEELQCCQSEILELRCTVNALEVERQAQHTLKDCLQNSLCEAEDRFGTELAQMQSLISNVEEQLSEIRADLERQNQEYQVLLDVKTRLENEIATYRNLLESEDCKLPCNPCSTSPSCVTAPCAPRPSCGPCTTCGPTCGASTTGSRF

SEQ ID NO: 50680 - protein, 594 aa, Homo sapiens
MTSVGVFSDMLNGCGKDGLVPRAKPRDVSDFSLYAPATKPCCSRTYKRRRLRAPALTGLGPVTSLIAPSSLSAAMIARQQCVRGGPRGFSCGSAIVGGGKRGAFSSVSMSGGAGRCSSGGFGSRSLYNLRGNKSISMSVAGSRQGACFGGAGGFGTGGFGGGFGGSFSGKGGPGFPVCPAGGIQEVTINQSLLTPLHVEIDPEIQKVRTEEREQIKLLNNKFASFIDKVQFLEQQNKVLETKWNLLQQQTTTTSSKNLEPLFETYLSVLRKQLDTLGNDKGRLQSELKTMQDSVEDFKTKYEEEINKRTAAENDFVVLKKDVDAAYLNKVELEAKVDSLNDEINFLKVLYDAELSQMQTHVSDTSVVLSMDNNRNLDLDSIIAEVRAQYEEIAQRSKAEAEALYQTKVQQLQISVDQHGDNLKNTKSEIAELNRMIQRLRAEIENIKKQCQTLQVSVADAEQRGENALKDAHSKRVELEAALQQAKEELARMLREYQELMSVKLALDIEIATYRKLLEGEEYRMSGECQSAVSISVVSGSTSTGGISGGLGSGSGFGLSSGFGSGSGSGFGFGGSVSGSSSSKIISTTTLNKRR

SEQ ID NO: 50681 - protein, 500 aa, Homo sapiens
MIARQQCVRGGPRGFSCGSAIVGGGKRGAFSSVSMSGGAGRCSSGGFGSKGACFGGAGGFGTGGFGGGFGGSFSGKGGPGFPVCPAGGIQEVTINQSLLTPLHVEIDPEIQKVRTEEREQIKLLNNKFASFIDKVQFLEQQNKVLETKWNLLQQQTTTTSSKNLEPLFETYLSVLRKQLDTLGNDKGRLQSELKTMQDSVEDFKTKYEEEINKRTAAENDFVVLKKDVDAAYLNKVELEAKVDSLNDEINFLKVLYDAELSQMQTHVSDTSVVLSMDNNRNLDLDSIIAEVRAQYEEIAQRSKAEAEALYQTKVQQLQISVDQHGDNLKNTKSEIAELNRMIQRLRAEIENIKKQCQTLQVSVADAEQRGENALKDAHSKRVELEAALQQAKEELARMLREYQELMSVKLALDIEIATYRKLLEGEEYRMSGECQSAVSISVVSGSTSTGGISGGLGSGSGFGLSSGFGSGSGSGFGFGGSVSGSSSSKIISTTTLNKRR

SEQ ID NO: 50682 - protein, 520 aa, Homo sapiens
MIARQQCVRGGPRGFSCGSAIVGGGKRGAFSSVSMSGGAGRCSSGGFGSRSLYNLRGNKSISMSVAGSRQGACFGGAGGFGTGGFGGGFGGSFSGKGGPGFPVCPAGGIQEVTINQSLLTPLHVEIDPEIQKVRTEEREQIKLLNNKFASFIDKVQFLEQQNKVLETKWNLLQQQTTTTSSKNLEPLFETYLSVLRKQLDTLGNDKGRLQSELKTMQDSVEDFKTKYEEEINKRTAAENDFVVLKKDVDAAYLNKVELEAKVDSLNDEINFLKVLYDAELSQMQTHVSDTSVVLSMDNNRNLDLDSIIAEVRAQYEEIAQRSKAEAEALYQTKVQQLQISVDQHGDNLKNTKSEIAELNRMIQRLRAEIENIKKQCQTLQVSVADAEQRGENALKDAHSKRVELEAALQQAKEELARMLREYQELMSVKLALDIEIATYRKLLEGEEYRMSGECQSAVSISVVSGSTSTGGISGGLGSGSGFGLSSGFGSGSGSGFGFGGSVSGSSSSKIISTTTLNKRR

SEQ ID NO: 50683 - protein, 564 aa, Homo sapiens
MASTSTTIRSHSSSRRGFSANSARLPGVSRSGFSSVSVSRSRGSGGLGGACGGAGFGSRSLYGLGGSKRISIGGGSCAISGGYGSRAGGSYGFGGAGSGFGFGGGAGIGFGLGGGAGLAGGFGGPGFPVCPPGGIQEVTVNQSLLTPLNLQIDPTIQRVRAEEREQIKTLNNKFASFIDKVRFLEQQNKVLETKWTLLQEQGTKTVRQNLEPLFEQYINNLRRQLDSIVGERGRLDSELRGMQDLVEDFKNKYEDEINKRTAAENEFVTLKKDVDAAYMNKVELQAKADTLTDEINFLRALYDAELSQMQTHISDTSVVLSMDNNRNLDLDSIIAEVKAQYEEIAQRSRAEAESWYQTKYEELQVTAGRHGDDLRNTKQEIAEINRMIQRLRSEIDHVKKQCANLQAAIADAEQRGEMALKDAKNKLEGLEDALQKAKQDLARLLKEYQELMNVKLALDVEIATYRKLLEGEECRLNGEGVGQVNISVVQSTVSSGYGGASGVGSGLGLGGGSSYSYGSGLGVGGGFSSSSGRAIGGGLSSVGGGSSTIKYTTTSSSSRKSYKH

SEQ ID NO: 50684 - protein, 520 aa, Homo sapiens
MASTSTTIRSHSGSRSLYGLGGSKRISIGGGSCAISGGYGSRAGGSYGFGGAGSGFGFGGGAGIGFGLGGGAGLAGGFGGPGFPVCPPGGIQEVTVNQSLLTPLNLQIDPTIQRVRAEEREQIKTLNNKFASFIDKVRFLEQQNKVLETKWTLLQEQGTKTVRQNLEPLFEQYINNLRRQLDSIVGERGRLDSELRGMQDLVEDFKNKYEDEINKRTAAENEFVTLKKDVDAAYMNKVELQAKADTLTDEINFLRALYDAELSQMQTHISDTSVVLSMDNNRNLDLDSIIAEVKAQYEEIAQRSRAEAESWYQTKYEELQVTAGRHGDDLRNTKQEIAEINRMIQRLRSEIDHVKKQCANLQAAIADAEQRGEMALKDAKNKLEGLEDALQKAKQDLARLLKEYQELMNVKLALDVEIATYRKLLEGEECRLNGEGVGQVNISVVQSTVSSGYGGASGVGSGLGLGGGSSYSYGSGLGVGGGFSSSSGRAIGGGLSSVGGGSSTIKYTTTSSSSRKSYKH

SEQ ID NO: 50685 - protein, 564 aa, Homo sapiens
MASTSTTIRSHSSSRRGFSANSARLPGVSRSGFSSISVSRSRGSGGLGGACGGAGFGSRSLYGLGGSKRISIGGGSCAISGGYGSRAGGSYGFGGAGSGFGFGGGAGIGFGLGGGAGLAGGFGGPGFPVCPPGGIQEVTVNQSLLTPLNLQIDPAIQRVRAEEREQIKTLNNKFASFIDKVRFLEQQNKVLDTKWTLLQEQGTKTVRQNLEPLFEQYINNLRRQLDNIVGERGRLDSELRNMQDLVEDLKNKYEDEINKRTAAENEFVTLKKDVDAAYMNKVELQAKADTLTDEINFLRALYDAELSQMQTHISDTSVVLSMDNNRNLDLDSIIAEVKAQYEEIAQRSRAEAESWYQTKYEELQITAGRHGDDLRNTKQEIAEINRMIQRLRSEIDHVKKQCANLQAAIADAEQRGEMALKDAKNKLEGLEDALQKAKQDLARLLKEYQELMNVKLALDVEIATYRKLLEGEECRLNGEGVGQVNISVVQSTVSSGYGGASGVGSGLGLGGGSSYSYGSGLGVGGGFSSSSGRATGGGLSSVGGGSSTIKYTTTSSSSRKSYKH

SEQ ID NO: 50686 - protein, 524 aa, Homo sapiens
MASTSTTIRSHSSSRRGFSANSARLPGVSRSGFSSISVSRSRGSGGLGGACGGAGFGSRSLYGLGGSKRISIGGGSCAISGGYGSRAGGSYGFGGAGSGFGFGGGAGIGFGLGGGAGLAGGFGGPGFPVCPPGGIQEVTVNQSLLTPLNLQIDPAIQRVRAEEREQIKTLNNKFASFIDKVRFLEQQNKVLDTKWTLLQEQGTKTVRQNLEPLFEQYINNLRRQLDNIVGERGRLDSELRNMQDLVEDLKNKDEINFLRALYDAELSQMQTHISDTSVVLSMDNNRNLDLDSIIAEVKAQYEEIAQRSRAEAESWYQTKYEELQITAGRHGDDLRNTKQEIAEINRMIQRLRSEIDHVKKQCANLQAAIADAEQRGEMALKDAKNKLEGLEDALQKAKQDLARLLKEYQELMNVKLALDVEIATYRKLLEGEECRLNGEGVGQVNISVVQSTVSSGYGGASGVGSGLGLGGGSSYSYGSGLGVGGGFSSSSGRATGGGLSSVGGGSSTIKYTTTSSSSRKSYKH

SEQ ID NO: 50687 - protein, 564 aa, Homo sapiens
MASTSTTIRSHSSSRRGFSANSARLPGVSRSGFSSISVSRSRGSGGLGGACGGAGFGSRSLYGLGGSKRISIGGGSCAISGGYGSRAGGSYGFGGAGSGFGFGGGAGIGFGLGGGAGLAGGFGGPGFPVCPPGGIQEVTVNQSLLTPLNLQIDPAIQRVRAEEREQIKTLNNKFASFIDKVRFLEQQNKVLDTKWTLLQEQGTKTVRQNLEPLFEQYINNLRRQLDSIVGERGRLDSELRNMQDLVEDLKNKYEDEINKRTAAENEFVTLKKDVDAAYMNKVELQAKADTLTDEINFLRALYDAELSQMQTHISDTSVVLSMDNNRNLDLDSIIAEVKAQYEEIAQRSRAEAESWYQTKYEELQVTAGRHGDDLRNTKQEIAEINRMIQRLRSEIDHVKKQCASLQAAIADAEQRGEMALKDAKNKLEGLEDALQKAKQDLARLLKEYQELMNVKLALDVEIATYRKLLEGEECRLNGEGVGQVNVSVVQSTISSGYGGASGVGSGLGLGGGSSYSYGSGLGIGGGFSSSSGRAIGGGLSSVGGGSSTIKYTTTSSSSRKSYKH

SEQ ID NO: 50688 - protein, 549 aa, Homo sapiens
MASTSTTIRSHSSSRSGFSSISVSRSRGSGGLGGACGGAGFGSRSLYGLGGSKRISIGGGSCAISGGYGSRAGGSYGFGGAGSGFGFGGGAGIGFGLGGGAGLAGGFGGPGFPVCPPGGIQEVTVNQSLLTPLNLQIDPAIQRVRAEEREQIKTLNNKFASFIDKVRFLEQQNKVLDTKWTLLQEQGTKTVRQNLEPLFEQYINNLRRQLDSIVGERGRLDSELRNMQDLVEDLKNKYEDEINKRTAAENEFVTLKKDVDAAYMNKVELQAKADTLTDEINFLRALYDAELSQMQTHISDTSVVLSMDNNRNLDLDSIIAEVKAQYEEIAQRSRAEAESWYQTKYEELQVTAGRHGDDLRNTKQEIAEINRMIQRLRSEIDHVKKQCASLQAAIADAEQRGEMALKDAKNKLEGLEDALQKAKQDLARLLKEYQELMNVKLALDVEIATYRKLLEGEECRLNGEGVGQVNVSVVQSTISSGYGGASGVGSGLGLGGGSSYSYGSGLGIGGGFSSSSGRAIGGGLSSVGGGSSTIKYTTTSSSSRKSYKH

SEQ ID NO: 50689 - protein, 523 aa, Homo sapiens
MSRQFTCKSGAAAKGGFSGCSAVLSGGSSSSFRAGSKGLSGGFGSRSLYSLGGVRSLNVASGSGKSGGYGFGRGRASGFAGSMFGSVALGPVCPTVCPPGGIHQVTVNESLLAPLNVELDPEIQKVRAQEREQIKALNNKFASFIDKVRFLEQQNQVLETKWELLQQLDLNNCKNNLEPILEGYISNLRKQLETLSGDRVRLDSELRNVRDVVEDYKKRYEEEINKRTAAENEFVLLKKDVDAAYANKVELQAKVESMDQEIKFFRCLFEAEITQIQSHISDMSVILSMDNNRNLDLDSIIDEVRTQYEEIALKSKAEAEALYQTKFQELQLAAGRHGDDLKNTKNEISELTRLIQRIRSEIENVKKQASNLETAIADAEQRGDNALKDARAKLDELEGALHQAKEELARMLREYQELMSLKLALDMEIATYRKLLESEECRMSGEFPSPVSISIISSTSGGSVYGFRPSMVSGGYVANSSNCISGVCSVRGGEGRSRGSANDYKDTLGKGSSLSAPSKKTSR

SEQ ID NO: 50690 - protein, 511 aa, Homo sapiens
MSRQLTHFPRGERLGFSGCSAVLSGGIGSSSASFRARVKGSASFGSKSLSCLGGSRSLALSAAARRGGGRLGGFVGTAFGSAGLGPKCPSVCPPGGIPQVTVNKSLLAPLNVEMDPEIQRVRAQEREQIKALNNKFASFIDKVRFLEQQNQVLETKWNLLQQLDLNNCRKNLEPIYEGYISNLQKQLEMLSGDGVRLDSELRNMQDLVEDYKKRYEVEINRRTAAENEFVVLKKDVDAAYMNKVELQAKVDSLTDEIKFFKCLYEGEITQIQSHISDTSIVLSMDNNRDLDLDSIIAEVRAQYEEIALKSKAEAETLYQTKIQELQVTAGQHGDDLKLTKAEISELNRLIQRIRSEIGNVKKQCADLETAIADAEQRGDCALKDARAKLDELEGALHQAKEELARMLREYQELVSLKLALDMEIATYRKLLESEECRMSGEYPNSVSISVISSTNAGAGGAGFSMGFGASSSYSYKTAAADVKTKGSCGSELKDPLAKTSGSSCATKKASR

SEQ ID NO: 50691 - protein, 469 aa, Homo sapiens
MSRQLTHFPRGERLGFSGCSAVLSGGIGSSSASFRARVKGSASFGSKSLSCLGGSRSLALSAAARRGGGRLGGFVGTAFGSAGLGPKCPSVCPPGGIPQVTVNKSLLAPLNVEMDPEIQRVRAQEREQIKALNNKFASFIDKVRFLEQQNQVLETKWNLLQQLDLNNCRKNLEPIYEGYISNLQKQLEMLSGDGVRLDSELRNMQDLVEDYKKRYEVEINRRTAAENEFVVLKKDVDAAYMNKVELQAKVDSLTDEIKFFKCLYEGEITQIQSHISDTSIVLSMDNNRDLDLDSIIAEVRAQYEEIALKSKAEAETLYQTKCADLETAIADAEQRGDCALKDARAKLDELEGALHQAKEELARMLREYQELVSLKLALDMEIATYRKLLESEECRMSGEYPNSVSISVISSTNAGAGGAGFSMGFGASSSYSYKTAAADVKTKGSCGSELKDPLAKTSGSSCATKKASR

SEQ ID NO: 50692 - protein, 323 aa, Homo sapiens
MLSGDGVRLDSELRNMQDLVEDYKKRYEVEINRRTAAENEFVVLKKDVDAAYMNKVELQAKVDSLTDEIKFFKCLYEGEITQIQSHISDTSIVLSMDNNRDLDLDSIIAEVRAQYEEIALKSKAEAETLYQTKIQELQVTAGQHGDDLKLTKAEISELNRLIQRIRSEIGNVKKQCADLETAIADAEQRGDCALKDARAKLDELEGALHQAKEELARMLREYQELVSLKLALDMEIATYRKLLESEECRMSGEYPNSVSISVISSTNAGAGGAGFSMGFGASSSYSYKTAAADVKTKGSCGSELKDPLAKTSGSSCATKKASR

SEQ ID NO: 50693 - protein, 511 aa, Homo sapiens; identical to SEQ ID NO: 50690

SEQ ID NO: 50694 - protein, 540 aa, Homo sapiens
MSRQFTYKSGAAAKGGFSGCSAVLSGGSSSSYRAGGKGLSGGFSSRSLYSLGGARSISFNVASGSGWAGGYGFGRGRASGFAGSMFGSVALGSVCPSLCPPGGIHQVTINKSLLAPLNVELDPEIQKVRAQEREQIKVLNNKFASFIDKVRFLEQQNQVLETKWELLQQLDLNNCKNNLEPILEGYISNLRKQLETLSGDRVRLDSELRSVREVVEDYKKRYEEEINKRTTAENEFVVLKKDVDAAYTSKVELQAKVDALDGEIKFFKCLYEGETAQIQSHISDTSIILSMDNNRNLDLDSIIAEVRAQYEEIARKSKAEAEALYQTKFQELQLAAGRHGDDLKHTKNEISELTRLIQRLRSEIESVKKQCANLETAIADAEQRGDCALKDARAKLDELEGALQQAKEELARMLREYQELLSVKLSLDIEIATYRKLLEGEECRMSGEYTNSVSISVINSSMAGMAGTGAGFGFSNAGTYGYWPSSVSGGYSMLPGGCVTGSGNCSPRGEARTRLGSASEFRDSQGKTLALSSPTKKTMR

SEQ ID NO: 50695 - protein, 529 aa, Homo sapiens
MSRQLNIKSSGDKGNFSVHSAVVPRKAVGSLASYCAAGRGAGAGFGSRSLYSLGGNRRISFNVAGGGVRAGGYGFRPGSGYGGGRASGFAGSMFGSVALGPACLSVCPPGGIHQVTVNKSLLAPLNVELDPEIQKVRAQEREQIKVLNDKFASFIDKVRFLEQQNQVLETKWELLQQLDLNNCKKNLEPILEGYISNLRKQLETLSGDRVRLDSELRSMRDLVEDYKKRYEVEINRRTTAENEFVVLKKDADAAYAVKVELQAKVDSLDKEIKFLKCLYDAEIAQIQTHASETSVILSMDNNRDLDLDSIIAEVRMHYEEIALKSKAEAEALYQTKIQELQLAASRHGDDLKHTRSEMVELNRLIQRIRCEIGNVKKQRASLETAIADAEQRGDNALKDAQAKLDELEGALHQAKEELARMLREYQELMSLKLALDMEIATYRKLLEGEECRMSGENPSSVSISVISSSSYSYHHPSSAGVDLGASAVAGSSGSTQSGQTKTTEARGGDLKDTQGKSTPASIPARKATR

SEQ ID NO: 50696 - protein, 551 aa, Homo sapiens
MSRQSSITFQSGSRRGFSTTSAITPAAGRSRFSSVSVARSAAGSGGLGRISSAGASFGSRSLYNLGGAKRVSINGCGSSCRSGFGGRASNRFGVNSGFGYGGGVGGGFSGPSFPVCPPGGIQEVTVNQSLLTPLHLQIDPTIQRVRAEEREQIKTLNNKFASFIDKVRFLEQQNKVLETKWALLQEQGSRTVRQNLEPLFDSYTSELRRQLESITTERGRLEAELRNMQDVVEDFKVRYEDEINKRTAAENEFVALKKDVDAAYMNKVELEAKVKSLPEEINFIHSVFDAELSQLQTQVGDTSVVLSMDNNRNLDLDSIIAEVKAQYEDIANRSRAEAESWYQTKYEELQVTAGRHGDDLRNTKQEISEMNRMIQRLRAEIDSVKKQCSSLQTAIADAEQRGELALKDARAKLVDLEEALQKAKQDMARLLREYQELMNIKLALDVEIATYRKLLEGEECRLSGEGVSPVNISVVTSTLSSGYGSGSSIGGGNLGLGGGSGYSFTTSGGHSLGAGLGGSGFSATSNRGLGGSGSSVKFVSTTSSSQKSYTH

SEQ ID NO: 50697 - protein, 578 aa, Homo sapiens
MSHQFSSQSAFSSMSRRVYSTSSSAGSGGGSPAVGSVCYARGRCGGGGYGIHGRGFGSRSLYNLGGSRSISINLMGRSTSGFCQGGGVGGFGGGRGFGVGSTGAGGFGGGGFGGAGFGTSNFGLGGFGPYCPPGGIQEVTINQSLLEPLHLEVDPEIQRIKTQEREQIMVLNNKFASFIDKVRFLEQQNQVLQTKWELLQQVNTSTGTNNLEPLLENYIGDLRRQVDLLSAEQMRQNAEVRSMQDVVEDYKSKYEDEINKRTGSENDFVVLKKDVDAAYVSKVDLESRVDTLTGEVNFLKYLFLTELSQVQTHISDTNVILSMDNNRSLDLDSIIDAVRTQYELIAQRSKDEAEALYQTKYQELQITAGRHGDDLKNSKMEIAELNRTVQRLQAEISNVKKQIEQMQSLISDAEERGEQALQDAWQKLQDLEEALQQSKEELARLLRDYQAMLGVKLSLDVEIATYRQLLEGEESRMSGELQSHVSISVQNSQVSVNGGAGGGGSYGSGGYGGGSGGGYGGGRSYRGGGARGRSGGGYGSGCGGGGGSYGGSGRSGRGSSRVQIIQTSTNTSHRRILE

SEQ ID NO: 50698 - protein, 345 aa, Homo sapiens
MRQNAEVRSMQDVVEDYKSKYEDEINKRTGSENDFVVLKKDVDAAYVSKVDLESRVDTLTGEVNFLKYLFLTELSQVQTHISDTNVILSMDNNRSLDLDSIIDAVRTQYELIAQRSKDEAEALYQTKYQELQITAGRHGDDLKNSKMEIAELNRTVQRLQAEISNVKKQIEQMQSLISDAEERGEQALQDAWQKLQDLEEALQQSKEELARLLRDYQAMLGVKLSLDVEIATYRQLLEGEESRMSGELQSHVSISVQNSQVSVNGGAGGGGSYGSGGYGGGSGGGYGGGRSYRGGGARGRSGGGYGSGCGGGGGSYGGSGRSGRGSSRVQIIQTSTNTSHRRILE

SEQ ID NO: 50699 - protein, 520 aa, Homo sapiens
MSLSPCRAQRGFSARSACSARSRGRSRGGFSSRGGFSSRSLNSFGGCLEGSRGSTWGSGGRLGVRFGEWSGGPGLSLCPPGGIQEVTINQNLLTPLKIEIDPQFQVVRTQETQEIRTLNNQFASFIDKVRFLEQQNKVLETKWHLLQQQGLSGSQQGLEPVFEACLDQLRKQLEQLQGERGALDAELKACRDQEEEYKSKYEEEAHRRATLENDFVVLKKDVDGVFLSKMELEGKLEALREYLYFLKHLNEEELGQLQTQASDTSVVLSMDNNRYLDFSSIITEVRARYEEIARSSKAEAEALYQTKYQELQVSAQLHGDRMQETKVQISQLHQEIQRLQSQTENLKKQNASLQAAITDAEQRGELALKDAQAKVDELEAALRMAKQNLARLLCEYQELTSTKLSLDVEIATYRRLLEGEECRMSGECTSQVTISSVGGSAVMSGGVGGGLGSTCGLGSGKGSPGSCCTSIVTGGSNIILGSGKDPVLDSCSVSGSSAGSSCHTILKKTVESSLKTSITY

SEQ ID NO: 50700 - protein, 410 aa, Homo sapiens
MEGHEASPAQVGQGDRGKVRFLEQQNKVLETKWHLLQQQGLSGSQQGLEPVFEACLDQLRKQLEQLQGERGALDAELKACRDQEEEYKSKYEEEAHRRATLENDFVVLKKDVDGVFLSKMELEGKLEALREYLYFLKHLNEEELGQLQTQASDTSVVLSMDNNRYLDFSSIITEVRARYEEIARSSKAEAEALYQTKYQELQVSAQLHGDRMQETKVQISQLHQEIQRLQSQTENLKKQNASLQAAITDAEQRGELALKDAQAKVDELEAALRMAKQNLARLLCEYQELTSTKLSLDVEIATYRRLLEGEECRMSGECTSQVTISSVGGSAVMSGGVGGGLGSTCGLGSGKGSPGSCCTSIVTGGSNIILGSGKDPVLDSCSVSGSSAGSSCHTILKKTVESSLKTSITY

SEQ ID NO: 50701 - protein, 291 aa, Homo sapiens
MELEGKLEALREYLYFLKHLNEEELGQLQTQASDTSVVLSMDNNRYLDFSSIITEVRARYEEIARSSKAEAEALYQTKYQELQVSAQLHGDRMQETKVQISQLHQEIQRLQSQTENLKKQNASLQAAITDAEQRGELALKDAQAKVDELEAALRMAKQNLARLLCEYQELTSTKLSLDVEIATYRRLLEGEECRMSGECTSQVTISSVGGSAVMSGGVGGGLGSTCGLGSGKGSPGSCCTSIVTGGSNIILGSGKDPVLDSCSVSGSSAGSSCHTILKKTVESSLKTSITY

SEQ ID NO: 50702 - protein, 535 aa, Homo sapiens
MRSSVSRQTYSTKGGFSSNSASGGSGSQARTSFSSVTVSRSSGSGGGAHCGPGTGGFGSRSLYNLGGHKSISVSVAGGALLGRALGGFGFGSRAFMGQGAGRQTFGPACPPGGIQEVTVNQSLLTPLHVEIDPEIQRVRTQEREQIKTLNNKFASFIDKVRFLEQQNKVLETKWALLQEQGQNLGVTRNNLEPLFEAYLGSMRSTLDRLQSERGRLDSELRNVQDLVEDFKNKYEDEINKHTAAENEFVVLKKDVDAAYMGRMDLHGKVGTLTQEIDFLQQLYEMELSQVQTHVSNTNVVLSMDNNRNLDLDSIIAEVKAQYELIAQRSRAEAEAWYQTKYEELQVTAGKHGDNLRDTKNEIAELTRTIQRLQGEADAAKKQCQQLQTAIAEAEQRGELALKDAQKKLGDLDVALHQAKEDLTRLLRDYQELMNVKLALDVEIATYRKLLESEESRMSGECPSAVSISVTGNSTTVCGGGAASFGGGISLGGSGGATKGGFSTNVGYSTVKGGPVSAGTSILRKTTTVKTSSQRY

SEQ ID NO: 50703 - protein, 422 aa, Homo sapiens
MACRSCVVGFSSLSSCEVTPVGSPRPGTSGWDSCRAPGPGFSSRSLTGCWSAGTISKVTVNPGLLVPLDVKLDPAVQQLKNQEKEEMKALNDKFASLIGKVQALEQRNQLLETRWSFLQGQDSAIFDLGHLYEEYQGRLQEELRKVSQERGQLEANLLQVLEKVEEFRIRYEDEISKRTDMEFTFVQLKKDLDAECLHRTELETKLKSLESFVELMKTIYEQELKDLAAQVKDVSVTVGMDSRCHIDLSGIVEEVKAQYDAVAARSLEEAEAYSRSQLEEQAARSAEYGSSLQSSRSEIADLNVRIQKLRSQILSVKSHCLKLEENIKTAEEQGELAFQDAKTKLAQLEAALQQAKQDMARQLRKYQELMNVKLALDIEIATYRKLVEGEEGRMDSPSATVVSAVQSRCKTAPSLPYPLCSL

SEQ ID NO: 50704 - protein, 452 aa, Homo sapiens
MACRSCVVGFSSLSSCEVTPVGSPRPGTSGWDSCRAPGPGFSSRSLTGCWSAGTISKVTVNPGLLVPLDVKLDPAVQQLKNQEKEEMKALNDKFASLIGKVQALEQRNQLLETRWSFLQGQDSAIFDLGHLYEEYQGRLQEELRKVSQERGQLEANLLQVLEKVEEFRIRYEDEISKRTDMEFTFVQLKKDLDAECLHRTELETKLKSLESFVELMKTIYEQELKDLAAQVKDVSVTVGMDSRCHIDLSGIVEEVKAQYDAVAARSLEEAEAYSRSQLEEQAARSAEYGSSLQSSRSEIADLNVRIQKLRSQILSVKSHCLKLEENIKTAEEQGELAFQDAKTKLAQLEAALQQAKQDMARQLRKYQELMNVKLALDIEIATYRKLVEGEEGRMDSPSATVVSAVQSRCKTAASRSGLSKAPSRKKKGSKGPVIKITEMSEKYFSQESEVSE

SEQ ID NO: 50705 - protein, 505 aa, Homo sapiens
MTCGSGFGGRAFSCISACGPRPGRCCITAAPYRGISCYRGLTGGFGSHSVCGGFRAGSCGRSFGYRSGGVCGPSPPCITTVSVNESLLTPLNLEIDPNAQCVKQEEKEQIKSLNSRFAAFIDKVRFLEQQNKLLETKLQFYQNRECCQSNLEPLFEGYIETLRREAECVEADSGRLASELNHVQEVLEGYKKKYEEEVSLRATAENEFVALKKDVDCAYLRKSDLEANVEALIQEIDFLRRLYEEEILILQSHISDTSVVVKLDNSRDLNMDCIIAEIKAQYDDIVTRSRAEAESWYRSKCEEMKATVIRHGETLRRTKEEINELNRMIQRLTAEVENAKCQNSKLEAAVAQSEQQGEAALSDARCKLAELEGALQKAKQDMACLIREYQEVMNSKLGLDIEIATYRRLLEGEEQRLCEGIGAVNVCVSSSRGGVVCGDLCVSGSRPVTGSVCSAPCNGNVAVSTGLCAPCGQLNTTCGGGSCGVGSCGISSLGVGSCGSSCRKC

SEQ ID NO: 50706 - protein, 484 aa, Homo sapiens
MTCGSGFGGRAFSCISACGPRPGRCCITAAPYRGISCYRGLTGGFGSHSVCGGFRAGSCGRSFGYRSGGVCGPSPPCITTVSVNESLLTPLNLEIDPNAQCVKQEEKEQIKSLNSRFAAFIDKVRFLEQQNKLLETKLQFYQNRECCQSNLEPLFEGYIETLRREAECVEADSGRLASELNHVQEVLEGYKKKYEEEVSLRATAENEFVALKKDVDCAYLRKSDLEANVEALIQEIDFLRRLYEEEILILQSHISDTSVVVKLDNSRDLNMDCIIAEIKAQYDDIVTRSRAEAESWYRSKCEEMKATVIRHGETLRRTKEEINELNRMIQRLTAEVENAKCQNSKLEAAVAQSEQQGEAALSDARCKLAELEGALQKAKQDMACLIREYQEVMNSKLGLDIEIATYRRLLEGEEQRLCEGIGAVNVCVSSSRGGVVCGDLCVSGSRPVTGSVCSAPCNGNVAVSTGLCAPCGQVGSCGSSCRKC

SEQ ID NO: 50707 - protein, 493 aa, Homo sapiens
MTCGFNSIGCGFRPGNFSCVSACGPRPSRCCITAAPYRGISCYRGLTGGFGSHSVCGGFRAGSCGRSFGYRSGGVCGPSPPCITTVSVNESLLTPLNLEIDPNAQCVKQEEKEQIKSLNSRFAAFIDKVRFLEQQNKLLETKLQFYQNRECCQSNLEPLFAGYIETLRREAECVEADSGRLASELNHVQEVLEGYKKKYEEEVALRATAENEFVALKKDVDCAYLRKSDLEANVEALIQEIDFLRRLYEEEIRILQSHISDTSVVVKLDNSRDLNMDCIVAEIKAQYDDIATRSRAEAESWYRSKCEEMKATVIRHGETLRRTKEEINELNRMIQRLTAEVENAKCQNSKLEAAVAQSEQQGEAALSDARCKLAELEGALQKAKQDMACLIREYQEVMNSKLGLDIEIATYRRLLEGEEQRLCEGVEAVNVCVSSSRGGVVCGDLCVSGSRPVTGSVCSAPCNGNLVVSTGLCKPCGQLNTTCGGGSCGQGRH

SEQ ID NO: 50708 - protein, 507 aa, Homo sapiens
MSCRSYRISSGCGVTRNFSSCSAVAPKTGNRCCISAAPYRGVSCYRGLTGFGSRSLCNLGSCGPRIAVGGFRAGSCGRSFGYRSGGVCGPSPPCITTVSVNESLLTPLNLEIDPNAQCVKQEEKEQIKSLNSRFAAFIDKVRFLEQQNKLLETKWQFYQNQRCCESNLEPLFSGYIETLRREAECVEADSGRLASELNHVQEVLEGYKKKYEEEVALRATAENEFVVLKKDVDCAYLRKSDLEANVEALVEESSFLRRLYEEEIRVLQAHISDTSVIVKMDNSRDLNMDCIIAEIKAQYDDVASRSRAEAESWYRSKCEEMKATVIRHGETLRRTKEEINELNRMIQRLTAEIENAKCQRAKLEAAVAEAEQQGEAALSDARCKLAELEGALQKAKQDMACLLKEYQEVMNSKLGLDIEIATYRRLLEGEEHRLCEGVGSVNVCVSSSRGGVSCGGLSYSTTPGRQITSGPSAIGGSITVVAPDSCAPCQPRSSSFSCGSSRSVRFA

SEQ ID NO: 50709 - protein, 295 aa, Homo sapiens
MVFKVQFLSSRPSLSHTQDVDCAYLRKSDLEANVEALVEESSFLRRLYEEEIRVLQAHISDTSVIVKMDNSRDLNMDCIIAEIKAQYDDVASRSRAEAESWYRSKCEEMKATVIRHGETLRRTKEEINELNRMIQRLTAEIENAKCQRAKLEAAVAEAEQQGEAALSDARCKLAELEGALQKAKQDMACLLKEYQEVMNSKLGLDIEIATYRRLLEGEEHRLCEGVGSVNVCVSSSRGGVSCGGLSYSTTPGRQITSGPSAIGGSITVVAPDSCAPCQPRSSSFSCGSSRSVRFA

SEQ ID NO: 50710 - protein, 486 aa, Homo sapiens
MTCGSYCGGRAFSCISACGPRPGRCCITAAPYRGISCYRGLTGGFGSHSVCGGFRAGSCGRSFGYRSGGVCGPSPPCITTVSVNESLLTPLNLEIDPNAQCVKQEEKEQIKSLNSRFAAFIDKVRFLEQQNKLLETKLQFYQNRECCQSNLEPLFEGYIETLRREAECVEADSGRLASELNHVQEVLEGYKKKYEEEVSLRATAENEFVALKKDVDCAYLRKSDLEANVEALIQEIDFLRRLYEEEIRVLQSHISDTSVVVKLDNSRDLNMDCIIAEIKAQYDDIVTRSRAEAESWYRSKCEEMKATVIRHGETLRRTKEEINELNRMIQRLTAEVENAKCQNSKLEAAVAQSEQQGEAALSDARCKLAELEGALQKAKQDMACLIREYQEVMNSKLGLDIEIATYRRLLEGEEQRLCEGVGSVNVCVSSSRGGVVCGDLCASTTAPVVSTRVSSVPSNSNVVVGTTNACAPSARVGVCGGSCKRC

SEQ ID NO: 50711 - protein, 623 aa, Homo sapiens
MSCRQFSSSYLSRSGGGGGGGLGSGGSIRSSYSRFSSSGGGGGGGRFSSSSGYGGGSSRVCGRGGGGSFGYSYGGGSGGGFSASSLGGGFGGGSRGFGGASGGGYSSSGGFGGGFGGGSGGGFGGGYGSGFGGFGGFGGGAGGGDGGILTANEKSTMQELNSRLASYLDKVQALEEANNDLENKIQDWYDKKGPAAIQKNYSPYYNTIDDLKDQIVDLTVGNNKTLLDIDNTRMTLDDFRIKFEMEQNLRQGVDADINGLRQVLDNLTMEKSDLEMQYETLQEELMALKKNHKEEMSQLTGQNSGDVNVEINVAPGKDLTKTLNDMRQEYEQLIAKNRKDIENQYETQITQIEHEVSSSGQEVQSSAKEVTQLRHGVQELEIELQSQLSKKAALEKSLEDTKNRYCGQLQMIQEQISNLEAQITDVRQEIECQNQEYSLLLSIKMRLEKEIETYHNLLEGGQEDFESSGAGKIGLGGRGGSGGSYGRGSRGGSGGSYGGGGSGGGYGGGSGSRGGSGGSYGGGSGSGGGSGGGYGGGSGGGHSGGSGGGHSGGSGGNYGGGSGSGGGSGGGYGGGSGSRGGSGGSHGGGSGFGGESGGSYGGGEEASGSGGGYGGGSGKSSHS

SEQ ID NO: 50712 - protein, 177 aa, Homo sapiens
MACCQTSFCGFPSCSTSGTCGSSCCQPSCCETSSCQPRCCETSCCQPSCCQTSFCGFPSFSTGGTCDSSCCQPSCCETSCCQPSCYQTSSCGTGCGIGGGIGYGQEGSSGAVSTRIRWCRPDCRVEGTCLPPCCVVSCTPPSCCQLHHAEASCCRPSYCGQSCCRPVCCCYCSEPTC

SEQ ID NO: 50713 - protein, 167 aa, Homo sapiens
MACCQTSFCGFPSCSTSGTCGSSCCQPRCCETSCCQPSCCQTSFCGFPSFSTGGTCDSSCCQPSCCETSCCQPSCYQTSSCGTGCGIGGGIGYGQEGSSGAVSTRIRWCRPDCRVEGTCLPPCCVVSCTPPSCCQLHHAEASCCRPSYCGQSCCRPVCCCYCSEPTC

SEQ ID NO: 50714 - protein, 163 aa, Homo sapiens
MSFNCSTRNCSSRPIGGRCIVPVAQVTTTSTTDADCLGGICLPSSFQTGSWLLDHCQETCCEPTACQPTCYRRTSCVSNPCQVTCSRQTTCISNPCSTTYSRPLTFVSSGCQPLGGISSVCQPVGGISTVCQPVGGVSTVCQPACGVSRTYQQSCVSSCRRTC

SEQ ID NO: 50715 - protein, 167 aa, Homo sapiens
MTCCQTSFCGYPSCSTSGTCGSSCCQPSCCETSCCQPSCCQTSFCGFPSFSTSGTCSSSCCQPSCCETSCCQPSCCQTSSCGTGCGIGGGIGYGQEGSSGAVSTRIRWCRPDCRVEGTCLPPCCVVSCTPPTCCQLHHAEASCCRPSYCGQSCCRPVCCCYSCEPTC

SEQ ID NO: 50716 - protein, 121 aa, Homo sapiens
MASCSTSGTCGSSCCQPSCCETSCCQPSCCQTSSCGTGCGIGGGIGYGQEGSGGSVSTRIRWCHPDCHVEGTCLPPCYLVSCTPPSCCQLHHAEASCCRPSYCGQSCCRPACCCHCCEPTC

SEQ ID NO: 50717 - protein, 278 aa, Homo sapiens
MGCCGCSGGCGSSCGGCGSGCGGCGSGCGGCGSGCGGSGSSCCVPVCCCKPVCCRVPTCSCSSCGKGGCGSSGGSKGGCGSCGGCKGGCGSCGGSKGGCGSCGGSKGGCGSCGGSKGGCGSGCGGCGSSCCVPVCCCKPMCCCVPACSCSSCGKGGCGSCGCSKGACGSCGGSKGGCGSCGGCKGGCGSCGGSKGGCGSGCGGCGSGCGVPVCCCSCSSCGSCAGSKGGCGSSCSQCSCCKPCCCSSGCGSSCCQSSCCKPCCSQSSCCVPVCCQCKI

SEQ ID NO: 50718 - protein, 169 aa, Homo sapiens
MGCCGCSGGCGSSCGGCDSSCGSCGSGCRGCGPSCCAPVYCCKPVCCCVPACSCSSCGKRGCGSCGGSKGGCGSCGCSQCSCCKPCCCSSGCGSSCCQCSCCKPYCSQCSCCKPCCSSSGRGSSCCQSSCCKPCCSSSGCGSSCCQSSCCKPCCSQSRCCVPVCYQCKI

SEQ ID NO: 50719 - protein, 579 aa, Homo sapiens
MCDQQQIQCRLPLQQCCVKGPSFCSSQSPFAQSQVVVQAPCEMQIVDCPASCPVQVCQVSDQAPCQSQTTQVKCQSKTKQVKGQAQCQSKTTQVKGQAASQSQTSSVQSQAPCQSEVSYVQCEASQPVQTCFVECAPVCYTETCYVECPVQNYVPCPAPQPVQMYRGRPAVCQPQGRFSTQCQYQGSYSSCGPQFQSRATCNNYTPQFQLRPSYSSCFPQYRSRTSFSPCVPQCQTQGSYGSFTEQHRSRSTSRCLPPPRRLQLFPRSCSPPRRFEPCSSSYLPLRPSEGFPNYCTPPRRSEPIYNSRCPRRPISSCSQRRGPKCRIEISSPCCPRQVPPQRCPVEIPPIRRRSQSCGPQPSWGASCPELRPHVEPRPLPSFCPPRRLDQCPESPLQRCPPPAPRPRLRPEPCISLEPRPRPLPRQLSEPCLYPEPLPALRPTPRPVPLPRPGQCEIPEPRPCLQPCEHPEPCPRPEPIPLPAPCPSPEPCRETWRSPSPCWGPNPVPYPGDLGCHESSPHRLDTEAPYCGPSSYNQGQESGAGCGPGDVFPERRGQDGHGDQGNAFAGVKGEAKSAYF

SEQ ID NO: 50720 - protein, 352 aa, Homo sapiens
MAGTICFIMWVLFITDTVWSRSVRQVYEVHDSDDWTIHDFECPMECFCPPSFPTALYCENRGLKEIPAIPSRIWYLYLQNNLIETIPEKPFENATQLRWINLNKNKITNYGIEKGALSQLKKLLFLFLEDNELEEVPSPLPRSLEQLQLARNKVSRIPQGTFSNLENLTLLDLQNNKLVDNAFQRDTFKGLKNLMQLNMAKNALRNMPPRLPANTMQLFLDNNSIEGIPENYFNVIPKVAFLRLNHNKLSDEGLPSRGFDVSSILDLQLSHNQLTKVPRISAHLQHLHLDHNKIKSVNVSVICPSPSMLPAERDSFSYGPHLRYLRLDGNEIKPPIPMALMTCFRLLQAVII

SEQ ID NO: 50721 - protein, 298 aa, Homo sapiens
MEEKQILCVGLVVLDVISLVDKYPKEDSEIRCLSQRWQRGGNASNSCTVLSLLGAPCAFMGSMAPGHVADFLVADFRRRGVDVSQVAWQSKGDTPSSCCIINNSNGNRTIVLHDTSLPDVSATDFEKVDLTQFKWIHIEGRNASEQVKMLQRIDAHNTRQPPEQKIRVSVEVEKPREELFQLFGYGDVVFVSKDVAKHLGFQSAEEALRGLYGRVRKGAVLVCAWAEEGADALGPDGKLLHSDAFPPPRVVDTLGAGDTFNASVIFSLSQGRSVQEALRFGCQVAGKKCGLQGFDGIV

SEQ ID NO: 50722 - protein, 298 aa, Homo sapiens
MEEKQILCVGLVVLDVISLVDKYPKEDSEIRCLSQRWQRGGNASNSCTVLSLLGAPCAFMGSMAPGHVADFVLDDLRRYSVDLRYTVFQTTGSVPIATVIINEASGSRTILYYDRSLPDVSATDFEKVDLTQFKWIHIEGRNASEQVKMLQRIDAHNTRQPPEQKIRVSVEVEKPREELFQLFGYGDVVFVSKDVAKHLGFQSAEEALRGLYGRVRKGAVLVCAWAEEGADALGPDGKLLHSDAFPPPRVVDTLGAGDTFNASVIFSLSQGRSVQEALRFGCQVAGKKCGLQGFDGIV

SEQ ID NO: 50723 - protein, 346 aa, Homo sapiens
MEEKYLPELMAEKDSLDPSFTHALRLVNQEIEKFQKGEGKDEEKYIDVVINKNMKLGQKVLIPVKQFPKFNFVGKLLGPRGNSLKRLQEETLTKMSILGKGSMRDKAKEEELRKSGEAKYFHLNDDLHVLIEVFAPPAEAYARMGHALEEIKKFLIPDYNDEIRQAQLQELTYLNGGSENADVPVVRGKPTLRTRGVPAPAITRGRGGVTARPVGVVVPRGTPTPRGVLSTRGPVSRGRGLLTPRARGVPPTGYRPPPPPPTQETYGEYDYDDGYGTAYDEQSYDSYDNSYSTPAQSGADYYDYGHGLSEETYDSYGQEEWTNSRHKAPSARTAKGVYRDQPYGRY

SEQ ID NO: 50724 - protein, 164 aa, Homo sapiens
MDMGTSALSKKPWWTLPQNFHAPMVFHMEEDQEELIFGHGDTYLRCIEVHSHTLIQLESWFTATGQTRVTVVGPHRARQWLLHMFCCVGSQDSYHHARGLEMLERVRSQPLTNDDLVTSISVPPYTGDLSLAPRISGTVCLSVPQPSPYQVIGCSGFHLSSLYP

SEQ ID NO: 50725 - protein, 237 aa, Homo sapiens
MLSAFQRLFRVLFVIETVSEYGVLIFIYGWPFLQTLAMLLIGTVSFHLWIRRNRERNSRSGKTRCRSKRSEQSMDMGTSALSKKPWWTLPQNFHAPMVFHMEEDQEELIFGHGDTYLRCIEVHSHTLIQLESWFTATGQTRVTVVGPHRARQWLLHMFCCVGSQDSYHHARGLEMLERVRSQPLTNDDLVTSISVPPYTGDLSLAPRISGTVCLSVPQPSPYQVIGCSGFHLSSLYP

SEQ ID NO: 50726 - protein, 98 aa, Homo sapiens
MDMGTSALSKKPWWTLPQNFHAPMVFHMEEDQEELIFGHGDTYLRCIEVHSHTLIQLESWFTATGQTRVTVVGPHRARQWLLHMFCCVGSQDSYHHAR

SEQ ID NO: 50727 - protein, 710 aa, Homo sapiens
MSDYSTGGPPPGPPPPAGGGGGAGGAGGGPPPGPPGAGDRGGGGPGGGGPGGGSAGGPSQPPGGGGPGIRKDAFADAVQRARQIAAKIGGDAATTVNNSTPDFGFGGQKRQLEDGDQPESKKLASQGDSISSQLGPIHPPPRTSMTEEYRVPDGMVGLIIGRGGEQINKIQQDSGCKVQISPDSGGLPERSVSLTGAPESVQKAKMMLDDIVSRGRGGPPGQFHDNANGGQNGTVQEIMIPAGKAGLVIGKGGETIKQLQERAGVKMILIQDGSQNTNVDKPLRIIGDPYKVQQACEMVMDILRERDQGGFGDRNEYGSRIGGGIDVPVPRHSVGVVIGRSGEMIKKIQNDAGVRIQFKQDDGTGPEKIAHIMGPPDRCEHAARIINDLLQSLRSGPPGPPGGPGMPPGGRGRGRGQGNWGPPGGEMTFSIPTHKCGLVIGRGGENVKAINQQTGAFVEISRQLPPNGDPNFKLFIIRGSPQQIDHAKQLIEEKIEGPLCPVGPGPGGPGPAGPMGPFNPGPFNQGPPGAPPHAGGPPPHQYPPQGWGNTYPQWQPPAPHDPSKAAAAAADPNAAWAAYYSHYYQQPPGPVPGPAPAPAAPPAQGEPPQPPPTGQSDYTKAWEEYYKKIGQQPQQPGAPPQQDYTKAWEEYYKKQAQVATGGGPGAPPGFLAPPTVFQPLLSSALAQLPRPRPSPLPGLVCCLFICSRGD

SEQ ID NO: 50728 - protein, 711 aa, Homo sapiens
MSDYSTGGPPPGPPPPAGGGGGAGGAGGGPPPGPPGAGDRGGGGPGGGGPGGGSAGGPSQPPGGGGPGIRKDAFADAVQRARQIAAKIGGDAATTVNNSTPDFGFGGQKRQLEDGDQPESKKLASQGDSISSQLGPIHPPPRTSMTEEYRVPDGMVGLIIGRGGEQINKIQQDSGCKVQISPDSGGLPERSVSLTGAPESVQKAKMMLDDIVSRGRGGPPGQFHDNANGGQNGTVQEIMIPAGKAGLVIGKGGETIKQLQERAGVKMILIQDGSQNTNVDKPLRIIGDPYKVQQACEMVMDILRERDQGGFGDRNEYGSRIGGGIDVPVPRHSVGVVIGRSGEMIKKIQNDAGVRIQFKQDDGTGPEKIAHIMGPPDRCEHAARIINDLLQSLRSGPPGPPGGPGMPPGGRGRGRGQGNWGPPGGEMTFSIPTHKCGLVIGRGGENVKAINQQTGAFVEISRQLPPNGDPNFKLFIIRGSPQQIDHAKQLIEEKIEGPLCPVGPGPGGPGPAGPMGPFNPGPFNQGPPGAPPHAGGPPPHQYPPQGWGNTYPQWQPPAPHDPSKAAAAAADPNAAWAAYYSHYYQQPPGPVPGPAPAPAAPPAQGEPPQPPPTGQSDYTKAWEEYYKKIGQQPQQPGAPPQQDYTKAWEEYYKKQAQVATGGGPGAPPGSQPDYSAAWAEYYRQQAAYYGQTPGPGGPQPPPTQQGQQQAQ

SEQ ID NO: 50729 - protein, 364 aa, Homo sapiens
MSDYSPGGGSAGGPSQPPGGGGPGIRKDAFADAVQRARQIAAKIGGDAATTVNNSTPDFGFGGQKRQLEDGDQPESKKLASQGDSISSQLGPIHPPPRTSMTEEYRVPDGMVGLIIGRGGEQINKIQQDSGCKVQISPDSGGLPERSVSLTGAPESVQKAKMMLDDIVSRGRGGPPGQFHDNANGGQNGTVQEIMIPAGKAGLVIGKGGETIKQLQERAGVKMILIQDGSQNTNVDKPLRIIGDPYKVQQACEMVMDILRERDQGGFGDRNEYGSRIGGGIDVPVPRHSVGVVIGRSGEMIKKIQNDAGVRIQFKQDDGTGPEKIAHIMGPPDRCEHAARIINDPSSSSFLLPTPGHRPSCLSG

SEQ ID NO: 50730 - protein, 84 aa, Homo sapiens
MDDDAAPRVEGVPVAVHKHALHDGLRQVAGPGAAAAHLPRWPPPQLAASRREAPPLSQRPHRTQGAGSPPETNEKLTNPQVKEK

SEQ ID NO: 50731 - protein, 273 aa, Homo sapiens
MSMSPTVIILACLGFFLDQSVWAHVGGQDKPFCSAWPSAVVPQGGHVTLRCHYRRGFNIFTLYKKDGVPVPELYNRIFWNSFLISPVTPAHAGTYRCRGFHPHSPTEWSAPSNPLVIMVTGLYEKPSLTARPGPTVRAGENVTLSCSSQSSFDIYHLSREGEAHELRLPAVPSINGTFQADFPLGPATHGETYRCFGSFHGSPYEWSDPSDPLPVSVTGNPSSSWPSPTEPSFKTGIARHLHAVIRYSVAIILFTILPFFLLHRWCSKKKMLL

SEQ ID NO: 50732 - protein, 422 aa, Homo sapiens
MGGQDKPFLSAWPSAVVPRGGHVTLRCHYRHRFNNFMLYKEDRIHIPIFHGRIFQESFNMSPVTTAHAGNYTCRGSHPHSPTGWSAPSNPVVIMVTGNHRKPSLLAHPGPLVKSGERVILQCWSDIMFEHFFLHKEGISKDPSRLVGQIHDGVSKANFSIGPMMLALAGTYRCYGSVTHTPYQLSAPSDPLDIVVTGPYEKPSLSAQPGPKVQAGESVTLSCSSRSSYDMYHLSREGGAHERRLPAVRKVNRTFQADFPLGPATHGGTYRCFGSFRHSPYEWSDPSDPLLVSVTGNPSSSWPSPTEPSSKSGNPRHLHILIGTSVVIILFILLLFFLLHLWCSNKKNAAVMDQEPAGNRTANSEDSDEQDPEEVTYAQLDHCVFTQRKITRPSQRPKTPPTDTILYTELPNAKPRSKVVSCP

SEQ ID NO: 50733 - protein, 349 aa, Homo sapiens
MSLMVVSMACVGLFLVQRAGPHMGNHRKPSLLAHPGPLVKSGERVILQCWSDIMFEHFFLHKEGISKDPSRLVGQIHDGVSKANFSIGPMMLALAGTYRCYGSVTHTPYQLSAPSDPLDIVVTGPYEKPSLSAQPGPKVQAGESVTLSCSSRSSYDMYHLSREGGAHERRLPAVRKVNRTFQADFPLGPATHGGTYRCFGSFRHSPYEWSDPSDPLLVSVTGNPSSSWPSPTEPSSKSGNPRHLHILIGTSVVIILFILLLFFLLHLWCSNKKNAAVMDQEPAGNRTANSEDSDEQDPEEVTYAQLDHCVFTQRKITRPSQRPKTPPTDTILYTELPNAKPRSKVVSCP

SEQ ID NO: 50734 - protein, 444 aa, Homo sapiens
MSLMVVSMACVGLFLVQRAGPHMGGQDKPFLSAWPSAVVPRGGHVTLRCHYRHRFNNFMLYKEDRIHIPIFHGRIFQESFNMSPVTTAHAGNYTCRGSHPHSPTGWSAPSNPVVIMVTGNHRKPSLLAHPGPLVKSGERVILQCWSDIMFEHFFLHKEGISKDPSRLVGQIHDGVSKANFSIGPMMLALAGTYRCYGSVTHTPYQLSAPSDPLDIVVTGPYEKPSLSAQPGPKVQAGESVTLSCSSRSSYDMYHLSREGGAHERRLPAVRKVNRTFQADFPLGPATHGGTYRCFGSFRHSPYEWSDPSDPLLVSVTGNPSSSWPSPTEPSSKSGNPRHLHILIGTSVVIILFILLLFFLLHLWCSNKKNAAVMDQEPAGNRTANSEDSDEQDPEEVTYAQLDHCVFTQRKITRPSQRPKTPPTDTILYTELPNAKPRSKVVSCP

SEQ ID NO: 50735 - protein, 455 aa, Homo sapiens
MSLMVVSMACVGLFLVQRAGPHMGGQDKPFLSAWPSAVVPRGGHVTLRCHYRHRFNNFMLYKEDRIHIPIFHGRIFQESFNMSPVTTAHAGNYTCRGSHPHSPTGWSAPSNPVVIMVTGNHRKPSLLAHPGPLVKSGERVILQCWSDIMFEHFFLHKEGISKDPSRLVGQIHDGVSKANFSIGPMMLALAGTYRCYGSVTHTPYQLSAPSDPLDIVVTGPYEKPSLSAQPGPKVQAGESVTLSCSSRSSYDMYHLSREGGAHERRLPAVRKVNRTFQADFPLGPATHGGTYRCFGSFRHSPYEWSDPSDPLLVSVTGNPSSSWPSPTEPSSKSGICRHLHVLIGTSVVIFLFILLLFFLLYRWCSNKKNAAVMDQEPAGDRTVNRQDSDEQDPQEVTYAQLDHCVFIQRKISRPSQRPKTPLTDTSVYTELPNAEPRSKVVSCPRAPQSGLEGVF

SEQ ID NO: 50736 - protein, 444 aa, Homo sapiens; identical to SEQ ID NO: 50734

SEQ ID NO: 50737 - protein, 427 aa, Homo sapiens
MSLMVVSMACVGLFLVQRAGPHMGGQDKPFLSAWPSAVVPRGGHVTLRCHYRHRFNNFMLYKEDRIHIPIFHGRIFQESFNMSPVTTAHAGNYTCRGSHPHSPTGWSAPSNPVVIMVTGNHRKPSLLAHPGPLVKSGERVILQCWSDIMFEHFFLHKEGISKDPSRLVGQIHDGVSKANFSIGPMMLALAGTYRCYGSVTHTPYQLSAPSDPLDIVVTGPYEKPSLSAQPGPKVQAGESVTLSCSSRSSYDMYHLSREGGAHERRLPAVRKVNRTFQADFPLGPATHGGTYRCFGSFRHSPYEWSDPSDPLLVSVTGNPRHLHILIGTSVVIILFILLLFFLLHLWCSNKKNAAVMDQEPAGNRTANSEDSDEQDPEEVTYAQLDHCVFTQRKITRPSQRPKTPPTDTILYTELPNAKPRSKVVSCP

SEQ ID NO: 50738 - protein, 455 aa, Homo sapiens
MSLTVVSMACVGFFLLQGAWPLMGGQDKPFLSARPSTVVPRGGHVALQCHYRRGFNNFMLYKEDRSHVPIFHGRIFQESFIMGPVTPAHAGTYRCRGSRPHSLTGWSAPSNPLVIMVTGNHRKPSLLAHPGPLLKSGETVILQCWSDVMFEHFFLHREGISEDPSRLVGQIHDGVSKANFSIGPLMPVLAGTYRCYGSVPHSPYQLSAPSDPLDIVITGLYEKPSLSAQPGPTVQAGENVTLSCSSWSSYDIYHLSREGEAHERRLRAVPKVNRTFQADFPLGPATHGGTYRCFGSFRALPCVWSNSSDPLLVSVTGNPSSSWPSPTEPSSKSGICRHLHVLIGTSVVIFLFILLLFFLLYRWCSNKKNAAVMDQEPAGDRTVNRQDSDEQDPQEVTYAQLDHCVFIQRKISRPSQRPKTPLTDTSVYTELPNAEPRSKVVSCPRAPQSGLEGVF

SEQ ID NO: 50739 - protein, 348 aa, Homo sapiens
MSLMVVSMACVGFFLLQGAWPHEGVHRKPSLLAHPGRLVKSEETVILQCWSDVRFEHFLLHREGKFKDTLHLIGEHHDGVSKANFSIGPMMQDLAGTYRCYGSVTHSPYQLSAPSDPLDIVITGLYEKPSLSAQPGPTVLAGESVTLSCSSRSSYDMYHLSREGEAHECRFSAGPKVNGTFQADFPLGPATHGGTYRCFGSFRDSPYEWSNSSDPLLVSVTGNPSNSWPSPTEPSSKTGNPRHLHILIGTSVVIILFILLFFLLHRWCSNKKNAAVMDQESAGNRTANSEDSDEQDPQEVTYTQLNHCVFTQRKITRPSQRPKTPPTDIIVYTELPNAESRSKVVSCP

SEQ ID NO: 50740 - protein, 375 aa, Homo sapiens
MSLMVVSMACVGFFLLQGAWPHEGGQDKPLLSAWPSAVVPRGGHVTLLCRSRLGFTIFSLYKEDGVPVPELYNKIFWKSILMGPVTPAHAGTYRCRGSHPRSPIEWSAPSNPLVIVVTGLFGKPSLSAQPGPTVRTGENVTLSCSSRSSFDMYHLSREGRAHEPRLPAVPSVNGTFQADFPLGPATHGGTYTCFGSLHDSPYEWSDPSDPLLVSVTGNSSSSSSSPTEPSSKTGIRRHLHILIGTSVAIILFIILFFFLLHCCCSNKKNAAVMDQEPAGDRTVNREDSDDQDPQEVTYAQLDHCVFTQTKITSPSQRPKTPPTDTTMYMELPNAKPRSLSPAHKHHSQALRGSSRETTALSQNRVASSHVPAAGI

SEQ ID NO: 50741 - protein, 375 aa, Homo sapiens
MSLMVISMACVGFFLLQGAWTHEGGQDKPLLSAWPSAVVPRGGHVTLLCRSRLGFTIFSLYKEDGVPVPELYNKIFWKSILMGPVTPAHAGTYRCRGSHPRSPIEWSAPSNPLVIVVTGLFGKPSLSAQPGPTVRTGENVTLSCSSRSSFDMYHLSREGRAHEPRLPAVPSVNGTFQADFPLGPATHGGTYTCFGSLHDSPYEWSDPSDPLLVSVTGNSSSSSSSPTEPSSKTGIRRHLHILIGTSVAIILFIILFFFLLHCCCSNKKNAAVMDQEPAGDRTVNREDSDDQDPQEVTYAQLDHCVFTQTKITSPSQRPKTPPTDTTMYMELPNAKPRSLSPAHKHHSQALRGSSRETTALSQNRVASSHVPAAGI

SEQ ID NO: 50742 - protein, 387 aa, Homo sapiens
MSLMVVSMACVGLFLVQRAGPHMGGQDKPFLSAWPSAVVPRGGHVTLRCHYRHRFNNFMLYKEDRIHVPIFHGRIFQEGFNMSPVTTAHAGNYTCRGSHPHSPTGWSAPSNPMVIMVTGNHRKPSLLAHPGPLVKSGERVILQCWSDIMFEHFFLHKEWISKDPSRLVGQIHDGVSKANFSIGSMMRALAGTYRCYGSVTHTPYQLSAPSDPLDIVVTGLYEKPSLSAQPGPKVQAGESVTLSCSSRSSYDMYHLSREGGAHERRLPAVRKVNRTFQADFPLGPATHGGTYRCFGSFRHSPYEWSDPSDPLLVSVTGNPSSSWPSPTEPSSKSGNLRHLHILIGTSVVKIPFTILLFFLLHRWCSNKKNAAVMDQEPAGNRSEQRGF

SEQ ID NO: 50743 - protein, 382 aa, Homo sapiens
MLLMVVSMACVGLFLVQRAGPHMGGQDKPFLSAWPSAVVPRGGHVTLRCHYRHRFNNFMLYKEDRIHVPIFHGRIFQEGFNMSPVTTAHAGNYTCRGSHPHSPTGWSAPSNPMVIMVTGNHRKPSLLAHPGPLVKSGERVILQCWSDIMFEHFFLHKEWISKDPSRLVGQIHDGVSKANFSIGSMMRALAGTYRCYGSVTHTPYQLSAPSDPLDIVVTGLYEKPSLSAQPGPKVQAGESVTLSCSSRSSYDMYHLSREGGAHERRLPAVRKVNRTFQADFPLGPATHGGTYRCFGSFRHSPYEWSDPSDPLLVSVTGNPSSSWPSPTEPSSKSGNLRHLHILIGTSVVKIPFTILLFFLLHRWCSNKKKCCCNGPRACREQK

SEQ ID NO: 50744 - protein, 397 aa, Homo sapiens
MSLMVVSMACVGFFLDQSVWAHVGGQDKPFCSAWPSAVVPQGGHVTLRCHCRRGFNIFTLYKKDGVPVPELYNRIFWNSFLISPVTPAHAGTYRCRGFHPHSPTEWSAPSNPLVIMVTGLYEKPSLTARPGPTVRAGENVTLSCSSQSSFDIYHLSREGEAHELRLPAVPSINGTFQADFPLGPATHGETYRCFGSFHGSPYEWSDPSDPLPVSVTGNPSSSWPSPTEPSFKTGIARHLHAVIRYSVAIILFTILPFFLLHRWCSKKKVSLTKQRPENSGPCAEAGWEHADAAVMNQEPAGHRTVNREDSDEQDPQEVTYAQLDHCIFTQRKITGPSQRSKRPSTDTSVCIELPNAEPRALSPAHEHHSQALMGSSRETTALSQTQLASSNVPAAGI

SEQ ID NO: 50745 - protein, 342 aa, Homo sapiens
MSMSPTVIILACLGFFLDQSVWAHVGGQDKPFCSAWPSAVVPQGGHVTLRCHCRRGFNIFTLYKKDGVPVPELYNRIFWNSFLISPVTPAHAGTYRCRGFHPHSPTEWSAPSNPLVIMVTGLYEKPSLTARPGPTVRAGENVTLSCSSQSSFDIYHLSREGEAHELRLPAVPSINGTFQADFPLGPATHGETYRCFGSFHGSPYEWSDPSDPLPVSVTGNPSSSWPSPTEPSFKTDAAVMNQEPAGHRTVNREDSDEQDPQEVTYAQLDHCIFTQRKITGPSQRSKRPSTDTSVCIELPNAEPRALSPAHEHHSQALMGSSRETTALSQTQLASSNVPAAGI

SEQ ID NO: 50746 - protein, 360 aa, Homo sapiens
MSMSPTVIILACLGFFLDQSVWAHVGGQDKPFCSAWPSAVVPQGGHVTLRCHCRRGFNIFTLYKKDGVPVPELYNRIFWNSFLISPVTPAHAGTYRCRGFHPHSPTEWSAPSNPLVIMVTGLYEKPSLTARPGPTVRAGENVTLSCSSQSSFDIYHLSREGEAHELRLPAVPSINGTFQADFPLGPATHGETYRCFGSFHGSPYEWSDPSDPLPVSVTGIARHLHAVIRYSVAIILFTILPFFLLHRWCSKKKNAAVMNQEPAGHRTVNREDSDEQDPQEVTYAQLDHCIFTQRKITGPSQRSKRPSTDTSVCIELPNAEPRALSPAHEHHSQALMGSSRETTALSQTQLASSNVPAAGI

SEQ ID NO: 50747 - protein, 377 aa, Homo sapiens
MSMSPTVIILACLGFFLDQSVWAHVGGQDKPFCSAWPSAVVPQGGHVTLRCHCRRGFNIFTLYKKDGVPVPELYNRIFWNSFLISPVTPAHAGTYRCRGFHPHSPTEWSAPSNPLVIMVTGLYEKPSLTARPGPTVRAGENVTLSCSSQSSFDIYHLSREGEAHELRLPAVPSINGTFQADFPLGPATHGETYRCFGSFHGSPYEWSDPSDPLPVSVTGNPSSSWPSPTEPSFKTGIARHLHAVIRYSVAIILFTILPFFLLHRWCSKKKNAAVMNQEPAGHRTVNREDSDEQDPQEVTYAQLDHCIFTQRKITGPSQRSKRPSTDTSVCIELPNAEPRALSPAHEHHSQALMGSSRETTALSQTQLASSNVPAAGI

SEQ ID NO: 50748 - protein, 410 aa, Homo sapiens
MSLMVVSMACVGFFLLEGPWPHVGGQDKPFLSAWPGTVVSEGQHVTLQCRSRLGFNEFSLSKEDGMPVPELYNRIFRNSFLMGPVTPAHAGTYRCCSSHPHSPTGWSAPSNPVVIMVTGVHRKPSLLAHPGPLVKSGETVILQCWSDVRFERFLLHREGITEDPLRLIGQLHDAGSQVNYSMGPMTPALAGTYRCFGSVTHLPYELSAPSDPLDIVVVGLYGKPSLSAQPGPTVQAGENVTLSCSSRSLFDIYHLSREAEAGELRLTAVLRVNGTFQANFPLGPVTHGGNYRCFGSFRALPHAWSDPSDPLPVSVTGNSRYLHALIGTSVVIIPFAILLFFLLHRWCANKKNAVVMDQEPAGNRTVNREDSDEQDPQEVTYAQLNHCVFTQRKITRPSQRPKTPPTDTSV

SEQ ID NO: 50749 - protein, 348 aa, Homo sapiens
MSLLVVSMACVGFFLLQGAWPHEGVHRKPSLLAHPGRLVKSEETVILQCWSDVMFEHFLLHREGMFNDTLRLIGEHHDGVSKANFSISRMTQDLAGTYRCYGSVTHSPYQVSAPSDPLDIVIIGLYEKPSLSAQLGPTVLAGENVTLSCSSRSSYDMYHLSREGEAHERRLPAGPKVNGTFQADFPLGPATHGGTYRCFGSFHDSPYEWSKSSDPLLVSVTGNPSNSWPSPTEPSSKTGNPRHLHILIGTSVVIILFILLFFLLHRWCSNKKNAAVMDQESAGNRTANSEDSDEQDPQEVTYTQLNHCVFTQRKITRPSQRPKTPPTDIIVYTELPNAESRSKVVSCP

SEQ ID NO: 50750 - protein, 341 aa, Homo sapiens
MSLMVVSMVCVGFFLLQGAWPHEGVHRKPSLLAHPGPLVKSEETVILQCWSDVRFQHFLLHREGKFKDTLHLIGEHHDGVSKANFSIGPMMQDLAGTYRCYGSVTHSPYQLSAPSDPLDIVITGLYEKPSLSAQPGPTVLAGESVTLSCSSRSSYDMYHLSREGEAHERRFSAGPKVNGTFQADFPLGPATHGGTYRCFGSFRDSPYEWSNSSDPLLVSVTGNPSNSWPSPTEPSSETGNPRHLHVLIGTSVVIILFILLLFFLLHRWCCNKKNAVVMDQEPAGNRTVNREDSDEQDPQEVTYAQLNHCVFTQRKITRPSQRPKTPPTDIIVYTELPNAEP

SEQ ID NO: 50751 - protein, 348 aa, Homo sapiens
MSLMVVSMVCVGFFLLQGAWPHEGVHRKPSLLAHPGPLVKSEETVILQCWSDVRFQHFLLHREGKFKDTLHLIGEHHDGVSKANFSIGPMMQDLAGTYRCYGSVTHSPYQLSAPSDPLDIVITGLYEKPSLSAQPGPTVLAGESVTLSCSSRSSYDMYHLSREGEAHERRFSAGPKVNGTFQADFPLGPATHGGTYRCFGSFRDSPYEWSNSSDPLLVSVTGNPSNSWPSPTEPSSKTGNPRHLHILIGTSVVIILFILLFFLLHRWCSNKKNAAVMDQESAGNRTANSEDSDEQDPQEVTYTQLNHCVFTQRKITRPSQRPKTPPTDIIVYTELPNAESRSKVVSCP

SEQ ID NO: 50752 - protein, 342 aa, Homo sapiens
MSMSPTVIILACLGFFLDQSVWAHVGGQDKPFCSAWPSAVVPQGGHVTLRCHYRRGFNIFTLYKKDGVPVPELYNRIFWNSFLISPVTPAHAGTYRCRGFHPHSPTEWSAPSNPLVIMVTGLYEKPSLTARPGPTVRAGENVTLSCSSQSSFDIYHLSREGEAHELRLPAVPSINGTFQADFPLGPATHGETYRCFGSFHGSPYEWSDPSDPLPVSVTGNPSSSWPSPTEPSFKTDAAVMNQEPAGHRTVNREDSDEQDPQEVTYAQLDHCIFTQRKITGPSQRSKRPSTDTSVCIELPNAEPRALSPAHEHHSQALMGSSRETTALSQTQLASSNVPAAGI

SEQ ID NO: 50753 - protein, 325 aa, Homo sapiens
MSMSPTVIILACLGFFLDQSVWAHVGGQDKPFCSAWPSAVVPQGGHVTLRCHYRRGFNIFTLYKKDGVPVPELYNRIFWNSFLISPVTPAHAGTYRCRGFHPHSPTEWSAPSNPLVIMVTGLYEKPSLTARPGPTVRAGENVTLSCSSQSSFDIYHLSREGEAHELRLPAVPSINGTFQADFPLGPATHGETYRCFGSFHGSPYEWSDPSDPLPVSVTDAAVMNQEPAGHRTVNREDSDEQDPQEVTYAQLDHCIFTQRKITGPSQRSKRPSTDTSVCIELPNAEPRALSPAHEHHSQALMGSSRETTALSQTQLASSNVPAAGI

SEQ ID NO: 50754 - protein, 397 aa, Homo sapiens
MSLMVVSMACVGFFLDQSVWAHVGGQDKPFCSAWPSAVVPQGGHVTLRCHYRRGFNIFTLYKKDGVPVPELYNRIFWNSFLISPVTPAHAGTYRCRGFHPHSPTEWSAPSNPLVIMVTGLYEKPSLTARPGPTVRAGENVTLSCSSQSSFDIYHLSREGEAHELRLPAVPSINGTFQADFPLGPATHGETYRCFGSFHGSPYEWSDPSDPLPVSVTGNPSSSWPSPTEPSFKTGIARHLHAVIRYSVAIILFTILPFFLLHRWCSKKKVSLTKQRPENSGPCAEAGWEHADAAVMNQEPAGHRTVNREDSDEQDPQEVTYAQLDHCIFTQRKITGPSQRSKRPSTDTSVCIELPNAEPRALSPAHEHHSQALMGSSRETTALSQTQLASSNVPAAGI

SEQ ID NO: 50755 - protein, 230 aa, Homo sapiens
MSMSPTVIILACLGFFLDQSVWAHVGLYEKPSLTARPGPTVRAGENVTLSCSSQSSFDIYHLSREGEAHELRLPAVPSINGTFQADFPLGPATHGETYRCFGSFHGSPYEWSDPSDPLPVSVTDAAVMNQEPAGHRTVNREDSDEQDPQEVTYAQLDHCIFTQRKITGPSQRSKRPSTDTSVCIELPNAEPRALSPAHEHHSQALMGSSRETTALSQTQLASSNVPAAGI

SEQ ID NO: 50756 - protein, 225 aa, Homo sapiens
MDQQAIYAELNLPTDSGPESSSPSSLPRDVCQGSPWHQFALKLSCAGIILLVLVVTGLSVSVTSLIQKSSIEKCSVDIQQSRNKTTERPGLLNCPIYWQQLREKCLLFSHTVNPWNNSLADCSTKESSLLLIRDKDELIHTQNLIRDKAILFWIGLNFSLSEKNWKWINGSFLNSNDLEIRGDAKENSCISISQTSVYSEYCSTEIRWICQKELTPVRNKVYPDS

SEQ ID NO: 50757 - protein, 215 aa, Homo sapiens
MDNQGVIYSDLNLPPNPKRQQRKPKGNKNSILATEQEITYAELNLQKASQDFQGNDKTYHCKDLPSAPEKLIVGILGIICLILMASVVTIVVIPSRHCGHCPEEWITYSNSCYYIGKERRTWEESLLACTSKNSSLLSIDNEEEMKFLSIISPSSWIGVFRNSSHHPWVTMNGLAFKHEIKDSDNAELNCAVLQVNRLKSAQCGSSIIYHCKHKL

SEQ ID NO: 50758 - protein, 233 aa, Homo sapiens
MDNQGVIYSDLNLPPNPKRQQRKPKGNKNSILATEQEITYAELNLQKASQDFQGNDKTYHCKDLPSAPEKLIVGILGIICLILMASVVTIVVIPSTLIQRHNNSSLNTRTQKARHCGHCPEEWITYSNSCYYIGKERRTWEESLLACTSKNSSLLSIDNEEEMKFLSIISPSSWIGVFRNSSHHPWVTMNGLAFKHEIKDSDNAELNCAVLQVNRLKSAQCGSSIIYHCKHKL

SEQ ID NO: 50759 - protein, 215 aa, Homo sapiens; identical to SEQ ID NO: 50757

SEQ ID NO: 50760 - protein, 233 aa, Homo sapiens; identical to SEQ ID NO: 50758

SEQ ID NO: 50761 - protein, 231 aa, Homo sapiens
MNKQRGTFSEVSLAQDPKRQQRKPKGNKSSISGTEQEIFQVELNLQNPSLNHQGIDKIYDCQGLLPPPEKLTAEVLGIICIVLMATVLKTIVLIPFLEQNNSSPNTRTQKTRHCGHCPEEWITYSNSCYYIGKERRTWEESLLACTSKNSSLLSIDNEEEMKFLASILPSSWIGVFRNSSHHPWVTINGLAFKHKIKDSDNAELNCAVLQVNRLKSAQCGSSMIYHCKHKL

SEQ ID NO: 50762 - protein, 231 aa, Homo sapiens
MNKQRGTFSEVSLAQDPKRQQRKPKGNKSSISGTEQEIFQVELNLQNPSLNHQGIDKIYDCQGLLPPPEKLTAEVLGIICIVLMATVLKTIVLIPFLEQNNFSPNTRTQKARHCGHCPEEWITYSNSCYYIGKERRTWEESLLACTSKNSSLLSIDNEEEMKFLASILPSSWIGVFRNSSHHPWVTINGLAFKHKIKDSDNAELNCAVLQVNRLKSAQCGSSMIYHCKHKL

SEQ ID NO: 50763 - protein, 124 aa, Homo sapiens
MIPTRHCGHCPEEWITYSNSCYYIGKERRTWEESLLACTSKNSSLLSIDNEEEMKFLASILPSSWIGVFRNSSHHPWVTINGLAFKHKIKDSDNAELNCAVLQVNRLKSAQCGSSMIYHCKHKL

SEQ ID NO: 50764 - protein, 257 aa, Homo sapiens
MSKQRGTFSEVSLAQDPKWQQRKPKGNKSSISGTEQEIFQVELNLQNASLNHQGIDKIYDCQGLLPPPEKLTAEVLGIICIVLMATVLKTIVLIPFLEQNNSSPNARTQKARHCGHCPEEWITYSNSCYYIGKERRTWEESLQACASKNSSSLLCIDNEEEMKFLASILPSSWIGVFRNSSHHPWVTINGLAFKHEIKDSDHAERNCAMLHVRGLISDQCGSSRIIVSISFRIKALELAVHQIKFYICSNRNDIMIA

SEQ ID NO: 50765 - protein, 240 aa, Homo sapiens
MSKQRGTFSEVSLAQDPKWQQRKPKGNKSSISGTEQEIFQVELNLQNASLNHQGIDKIYDCQGLLPPPEKLTAEVLGIICIVLMATVLKTIVLIPFLEQNNSSPNTRTQKTRHCGHCPEEWITYSNSCYYIGKERRTWEESLQACASKNSSSLLCIDNEEEMKFLASILPSSWIGVFRNSSHHPWVTINGLAFKHEIKDSDHAERNCAMLHVRGLISDQCGSSRIIRRGFIMLTRLVLNS

SEQ ID NO: 50766 - protein, 240 aa, Homo sapiens
MSKQRGTFSEVSLAQDPKWQQRKPKGNKSSISGTEQEIFQVELNLQNASLNHQGIDKIYDCQGLLPPPEKLTAEVLGIICIVLMATVLKTIVLIPFLEQNNSSPNARTQKARHCGHCPEEWITYSNSCYYIGKERRTWEESLQACASKNSSSLLCIDNEEEMKFLASILPSSWIGVFRNSSHHPWVTINGLAFKHEIKDSDHAERNCAMLHVRGLISDQCGSSRIIRRGFIMLTRLVLNS

SEQ ID NO: 50767 - protein, 158 aa, Homo sapiens
MNKQRGTYSEVSLAQDPKRQQRKLKGNKISISGTKQEIFQVELNLQNASSDHQGNDKTYHCKGLLPPPEKLTAEVLGIICIVLMATVLKTIVLIPCIGVLEQNNFSLNRRMQKARHCGHCPEEWITYSNSCYYIGKERRTWEERVCWPVLRRTLICFL

SEQ ID NO: 50768 - protein, 179 aa, Homo sapiens
MAVFKTTLWRLISGTLGIICLSLMSTLGILLKNSFTKLSIEPAFTPGPNIELQKDSDCCSCQEKWVGYRCNCYFISSEQKTWNESRHLCASQKSSLLQLQNTDELDFMSSSQQFYWIGLSYSEEHTAWLWENGSALSQYLFPSFETFNTKNCIAYNPNGNALDESCEDKNRYICKQQLI

SEQ ID NO: 50769 - protein, 148 aa, Homo sapiens
MAAFTKLSIEPAFTPGPNIELQKDSDCCSCQEKWVGYRCNCYFISSEQKTWNESRHLCASQKSSLLQLQNTDELDFMSSSQQFYWIGLSYSEEHTAWLWENGSALSQYLFPSFETFNTKNCIAYNPNGNALDESCEDKNRYICKQQLI

SEQ ID NO: 50770 - protein, 179 aa, Homo sapiens; identical to SEQ ID NO: 50768

SEQ ID NO: 50771 - protein, 180 aa, Homo sapiens
MAVFKTTLWRLISGTLGIICLSLMSTLGILLKNSFTKLSIEPAFTPGPNIELQKDSDCCSCQEKWVGYRCNCYFISSEQKTWNESRHLCASQKSSLLQLQNTDELQDFMSSSQQFYWIGLSYSEEHTAWLWENGSALSQYLFPSFETFNTKNCIAYNPNGNALDESCEDKNRYICKQQLI

SEQ ID NO: 50772 - protein, 51 aa, Homo sapiens
SALSQYLFPSFETFNTKNCIAYNPNGNALDESCEDKNRYIYKVLLCCPGWS

SEQ ID NO: 50773 - protein, 139 aa, Homo sapiens
MAAFTKLSIEPAFTPGPNIELQKDSDCCSCQEKWVGYRCNCYFISSEQKTWNESRHLCASQKSSLLQLQNTDELDFMSSSQQFYWIGLSYSEEHTAWLWENGSALSQYLFPSFETFNTKNCIAYNPNGNALDESCEDKN

SEQ ID NO: 50774 - protein, 232 aa, Homo sapiens
MQDEERYMTLNVQSKKRSSAQTSQLTFKDYSVTLHWYKILLGISGTVNGILTLTLISLILLVSQGVLLKCQKGSCSNATQYEDTGDLKVNNGTRRNISNKDLCASRSADQTVLCQSEWLKYQGKCCYWFSNEMKSWSDSYVYCLERKSHLLIIHDQLEMAFIQKNLRQLNYVWIGLNFTSLKMTWTWVDGSPIDSKIFFIKGPAKENSCAAIKESKIFSETCSSVFKWICQY

SEQ ID NO: 50775 - protein, 182 aa, Homo sapiens
MQDEERYMTLNVQSKKRSSAQTSQLTFKDYSVTLHWYKILLGISGTVNGILTLTLISLILLVLCQSEWLKYQGKCCYWFSNEMKSWSDSYVYCLERKSHLLIIHDQLEMAFIQKNLRQLNYVWIGLNFTSLKMTWTWVDGSPIDSKIFFIKGPAKENSCAAIKESKIFSETCSSVFKWICQY

SEQ ID NO: 50776 - protein, 64 aa, Homo sapiens
MQDEERYMTLNVQSKKRSSAQTSQLTFKDYSVTLHWYKILLGISGTVNGILTLTLISLILLDSS

SEQ ID NO: 50777 - protein, 195 aa, Homo sapiens
MTDSVIYSMLELPTATQAQNDYGPQQKSSSSRPSCSCLVAIALGLLTAVLLSVLLYQWILCQGSNYSTCASCPSCPDRWMKYGNHCYYFSVEEKDWNSSLEFCLARDSHLLVITDNQEMSLLQVFLSEAFCWIGLRNNSGWRWEDGSPLNFSRISSNSFVQTCGAINKNGLQASSCEVPLHWVCKKCPFADQALF

SEQ ID NO: 50778 - protein, 189 aa, Homo sapiens
MTDSVIYSMLELPTATQAQNDYGPQQKSSSSRPSCSCLVAIALGLLTAVLLSVLLYQWILCQGSNYSTCASCPSCPDRWMKYGNHCYYFSVEEKDWNSSLEFCLARDSHLLVITDNQEMSLLQVFLSEAFCWIGLRNNSGWRWEDGSPLNFSRISSNSFVQTCGAINKNGLQASSCEVPLHWVCKKVRL

SEQ ID NO: 50779 - protein, 216 aa, Homo sapiens
MGWIRGRRSRHSWEMSEFHNYNLDLKKSDFSTRWQKQRCPVVKSKCRENASPFFFCCFIAVAMGIRFIIMVTIWSAVFLNSLFNQEVQIPLTESYCGPCPKNWICYKNNCYQFFDESKNWYESQASCMSQNASLLKVYSKEDQDLLKLVKSYHWMGLVHIPTNGSWQWEDGSILSPNLLTIIEMQKGDCALYASSFKGYIENCSTPNTYICMQRTV

SEQ ID NO: 50780 - protein, 80 aa, Homo sapiens
MGWIRGRRSRHSWEMSEFHNYNLDLKKSDFSTRWQKQRCPVVKSKCRENASPFFFCCFIAVAMGIRFIIMVTIWSAVFLN

SEQ ID NO: 50781 - protein, 216 aa, Homo sapiens; identical to SEQ ID NO: 50779

SEQ ID NO: 50782 - protein, 178 aa, Homo sapiens
MDRPGPGSARPGRTVHVWGYRVEWKVRNGRKLQPSEWAGRGDLGGFKRRWKDTRATVGTTFRRRSRVSLVGELSKFPLPSDSSGGKSSSSFARGALAWCRQRNPNPSCAAAETGARTSLPKERCRGWRLGNWLHKHPHPNTCPRLPACWLPPILTERGERVPKLVPLLACYPKSKPKD

SEQ ID NO: 50783 - protein, 633 aa, Homo sapiens
MLRMRVPALLVLLFCFRGRAGPSPHFLQQPEDLVVLLGEEARLPCALGAYWGLVQWTKSGLALGGQRDLPGWSRYWISGNAANGQHDLHIRPVELEDEASYECQATQAGLRSRPAQLHVLVPPEAPQVLGGPSVSLVAGVPANLTCRSRGDARPTPELLWFRDGVLLDGATFHQTLLKEGTPGSVESTLTLTPFSHDDGATFVCRARSQALPTGRDTAITLSLQYPPEVTLSASPHTVQEGEKVIFLCQATAQPPVTGYRWAKGGSPVLGARGPRLEVVADASFLTEPVSCEVSNAVGSANRSTALDVLFGPILQAKPEPVSVDVGEDASFSCAWRGNPLPRVTWTRRGGAQVLGSGATLRLPSVGPEDAGDYVCRAEAGLSGLRGGAAEARLTVNAPPVVTALHSAPAFLRGPARLQCLVFASPAPDAVVWSWDEGFLEAGSQGRFLVETFPAPESRGGLGPGLISVLHISGTQESDFSRSFNCSARNRLGEGGAQASLGRRDLLPTVRIVAGVAAATTTLLMVITGVALCCWRHSKASASFSEQKNLMRIPGSSDGSSSRGPEEEETGSREDRGPIVHTDHSDLVLEEKGTLETKDPTNGYYKVRGVSPPASPDSRVTSFQWKSPGISNLP

SEQ ID NO: 50784 - protein, 219 aa, Homo sapiens
MLRMRVPALLVLLFCFRGRAGPSPHFLQQPEDLVVLLGEGGAQASLGRRASASFSEQKNLMRIPGSSDGSSSRGPEEEETGSREDRGPIVHTDHSDLVLEEKGTLETKDPTNGYYKVRGVSVSLSLGEAPGGGLFLPPPSPLGPPGTPTFYDFNPHLGMVPPCRLYRARAGYLTTPHPRAFTSYIKPTSFGPPDLAPGTPPFPYAAFPTPSHPRLQTHV

SEQ ID NO: 50785 - protein, 688 aa, Homo sapiens
MLRMRVPALLVLLFCFRGRAGPSPHFLQQPEDLVVLLGEEARLPCALGAYWGLVQWTKSGLALGGQRDLPGWSRYWISGNAANGQHDLHIRPVELEDEASYECQATQAGLRSRPAQLHVLVPPEAPQVLGGPSVSLVAGVPANLTCRSRGDARPTPELLWFRDGVLLDGATFHQTLLKEGTPGSVESTLTLPTGRDTAITLSLQYPPEVTLSASPHTVQEGEKVIFLCQATAQPPVTGYRWAKGGSPVLGARGPRLEVVADASFLTEPVSCEVSNAVGSANRSTALDVLFGPILQAKPEPVSVDVGEDASFSCAWRGNPLPRVTWTRRGGAQVLGSGATLRLPSVGPEDAGDYVCRAEAGLSGLRGGAAEARLTVNAPPVVTALHSAPAFLRGPARLQCLVFASPAPDAVVWSWDEGFLEAGSQGRFLVETFPAPESRGGLGPGLISVLHISGTQESDFSRSFNCSARNRLGEGGAQASLGRRDLLPTVRIVAGVAAATTTLLMVITGVALCCWRHSKASASFSEQKNLMRIPGSSDGSSSRGPEEEETGSREDRGPIVHTDHSDLVLEEKGTLETKDPTNGYYKVRGVSVSLSLGEAPGGGLFLPPPSPLGPPGTPTFYDFNPHLGMVPPCRLYRARAGYLTTPHPRAFTSYIKPTSFGPPDLAPGTPPFPYAAFPTPSHPRLQTHV

SEQ ID NO: 50786 - protein, 583 aa, Homo sapiens
MLRMRVPALLVLLFCFRGRAGWSRYWISGNAANGQHDLHIRPVELEDEASYECQATQAGLRSRPAQLHVLVPPEAPQVLGGPSVSLVAGVPANLTCRSRGDARPTPELLWFRDGVLLDGATFHQTLLKEGTPGSVESTLTLTPFSHDDGATFVCRARSQALPTGRDTAITLSLQYPPEVTLSASPHTVQEGEKVIFLCQATAQPPVTGYRWAKGGSPVLGARGPRLEVVADASFLTEPVSCEVSNAVGSANRSTALDVLFGPILQAKPEPVSVDVGEDASFSCAWRGNPLPRVTWTRRGGAQVLGSGATLRLPSVGPEDAGDYVCRAEAGLSGLRGGAAEARLTVNAPPVVTALHSAPAFLRGPARLQCLVFASPAPDAVVWSWDEGFLEAGSQGRFLVETFPAPESRGGLGPGLISVLHISGTQESDFSRSFNCSARNRLGEGGAQASLGRRDLLPTVRIVAGVAAATTTLLMVITGVALCCWRHSKASASFSEQKNLMRIPGSSDGSSSRGPEEEETGSREDRGPIVHTDHSDLVLEEKGTLETKDPTNGYYKVRGVSPPASPDSRVTSFQWKSPGISNLP

SEQ ID NO: 50787 - protein, 708 aa, Homo sapiens
MLRMRVPALLVLLFCFRGRAGPSPHFLQQPEDLVVLLGEEARLPCALGAYWGLVQWTKSGLALGGQRDLPGWSRYWISGNAANGQHDLHIRPVELEDEASYECQATQAGLRSRPAQLHVLVPPEAPQVLGGPSVSLVAGVPANLTCRSRGDARPTPELLWFRDGVLLDGATFHQTLLKEGTPGSVESTLTLTPFSHDDGATFVCRARSQALPTGRDTAITLSLQYPPEVTLSASPHTVQEGEKVIFLCQATAQPPVTGYRWAKGGSPVLGARGPRLEVVADASFLTEPVSCEVSNAVGSANRSTALDVLFGPILQAKPEPVSVDVGEDASFSCAWRGNPLPRVTWTRRGGAQVLGSGATLRLPSVGPEDAGDYVCRAEAGLSGLRGGAAEARLTVNAPPVVTALHSAPAFLRGPARLQCLVFASPAPDAVVWSWDEGFLEAGSQGRFLVETFPAPESRGGLGPGLISVLHISGTQESDFSRSFNCSARNRLGEGGAQASLGRRDLLPTVRIVAGVAAATTTLLMVITGVALCCWRHSKASASFSEQKNLMRIPGSSDGSSSRGPEEEETGSREDRGPIVHTDHSDLVLEEKGTLETKDPTNGYYKVRGVSVSLSLGEAPGGGLFLPPPSPLGPPGTPTFYDFNPHLGMVPPCRLYRARAGYLTTPHPRAFTSYIKPTSFGPPDLAPGTPPFPYAAFPTPSHPRLQTHV

SEQ ID NO: 50788 - protein, 245 aa, Homo sapiens
MAVIIGVAVGAGVAFLVLMATIVAFCCARSQRNLKGVVSAKNDIRVEIVHKEPASGREGEEHSTIKQLMMDRGEFQQDSVLKQLEVLKEEEKEFQNLKDPTNGYYSVNTFKEHHSTPTISLSSCQPDLRPAGKQRVPTGMSFTNIYSTLSGQGRLYDYGQRFVLGMGSSSIELCEREFQRGSLSDSSSFLDTQCDSSVSSSGKQDGYVQFDKASKASASSSHHSQSSSQNSDPSRPLQRRMQTHV

SEQ ID NO: 50789 - protein, 778 aa, Homo sapiens
MKPFQLDLLFVCFFLFSQELGLQKRGCCLVLGYMAKDKFRRMNEGQVYSFSQQPQDQVVVSGQPVTLLCAIPEYDGFVLWIKDGLALGVGRDLSSYPQYLVVGNHLSGEHHLKILRAELQDDAVYECQAIQAAIRSRPARLTVLVPPDDPVILGGPVISLRAGDPLNLTCHADNAKPAASIIWLRKGEVINGATYSKTLLRDGKRESIVSTLFISPGDVENGQSIVCRATNKAIPGGKETSVTIDIQHPPLVNLSVEPQPVLEDNVVTFHCSAKANPAVTQYRWAKRGQIIKEASGEVYRTTVDYTYFSEPVSCEVTNALGSTNLSRTVDVYFGPRMTTEPQSLLVDLGSDAIFSCAWTGNPSLTIVWMKRGSGVVLSNEKTLTLKSVRQEDAGKYVCRAVVPRVGAGEREVTLTVNGPPIISSTQTQHALHGEKGQIKCFIRSTPPPDRIAWSWKENVLESGTSGRYTVETISTEEGVISTLTISNIVRADFQTIYNCTAWNSFGSDTEIIRLKEQGSEMKSGAGLEAESVPMAVIIGVAVGAGVAFLVLMATIVAFCCARSQRNLKGVVSAKNDIRVEIVHKEPASGREGEEHSTIKQLMMDRGEFQQDSVLKQLEVLKEEEKEFQNLKDPTNGYYSVNTFKEHHSTPTISLSSCQPDLRPAGKQRVPTGMSFTNIYSTLSGQGRLYDYGQRFVLGMGSSSIELCEREFQRGSLSDSSSFLDTQCDSSVSSSGKQDGYVQFDKASKASASSSHHSQSSSQNSDPSRPLQRRMQTHV

SEQ ID NO: 50790 - protein, 600 aa, Homo sapiens
MKPFQLDLLFVCFFLFSQELGLQKRGCCLVLGYMAKDKFRRMNEGQVYSFSQQPQDQVVVSGQPVTLLCAIPEYDGFVLWIKDGLALGVGRDLSSYPQYLVVGNHLSGEHHLKILRAELQDDAVYECQAIQAAIRSRPARLTVLVPPDDPVILGGPVISLRAGDPLNLTCHADNAKPAASIIWLRKGEVINGATYSKTLLRDGKRESIVSTLFISPGDVENGQSIVCRATNKAIPGGKETSVTIDIQHPPLVNLSVEPQPVLEDNVVTFHCSAKANPAVTQYRWAKRGQIIKEASGEVYRTTVDYTYFSEPVSCEVTNALGSTNLSRTVDVYFGPRMTTEPQSLLVDLGSDAIFSCAWTGNPSLTIVWMKRGSGVVLSNEKTLTLKSVRQEDAGKYVCRAVVPRVGAGEREVTLTVNGPPIISSTQTQHALHGEKGQIKCFIRSTPPPDRIAWSWKENVLESGTSGRYTVETISTEEGVISTLTISNIVRADFQTIYNCTAWNSFGSDTEIIRLKEQGSEMKSGAGLEAESVPMAVIIGVAVGAGVAFLVLMATIVAFCCARSQRSTGGRSGISGRGTEKKARLRLPRRASKQECNEQGS

SEQ ID NO: 50791 - protein, 766 aa, Homo sapiens
MKPFQLDLLFVCFFLFSQELGLQKRGCCLVLGYMAKDKFRRMNEGQVYSFSQQPQDQVVVSGQPVTLLCAIPEYDGFVLWIKDGLALGVGRDLSSYPQYLVVGNHLSGEHHLKILRAELQDDAVYECQAIQAAIRSRPARLTVLVPPDDPVILGGPVISLRAGDPLNLTCHADNAKPAASIIWLRKGEVINGATYSKTLLRDGKRESIVSTLFISPGDVENGQSIVCRATNKAIPGGKETSVTIDIQHPPLVNLSVEPQPVLEDNVVTFHCSAKANPAVTQYRWAKRGQIIKEASGEVYRTTVDYTYFSEPVSCEVTNALGSTNLSRTVDVYFGPRMTTEPQSLLVDLGSDAIFSCAWTGNPSLTIVWMKRGSGVVLSNEKTLTLKSVRQEDAGKYVCRAVVPRVGAGEREVTLTVNGPPIISSTQTQHALHGEKGQIKCFIRSTPPPDRIAWSWKENVLESGTSGRYTVETISTEEGVISTLTISNIVRADFQTIYNCTAWNSFGSDTEIIRLKEQESVPMAVIIGVAVGAGVAFLVLMATIVAFCCARSQRNLKGVVSAKNDIRVEIVHKEPASGREGEEHSTIKQLMMDRGEFQQDSVLKQLEVLKEEEKEFQNLKDPTNGYYSVNTFKEHHSTPTISLSSCQPDLRPAGKQRVPTGMSFTNIYSTLSGQGRLYDYGQRFVLGMGSSSIELCEREFQRGSLSDSSSFLDTQCDSSVSSSGKQDGYVQFDKASKASASSSHHSQSSSQNSDPSRPLQRRMQTHV

SEQ ID NO: 50792 - protein, 393 aa, Homo sapiens
MGKSDFLTPKAIANRIKSKGLQKLRWYCQMCQKQCRDENGFKCHCMSESHQRQLLLASENPQQFMDYFSEEFRNDFLELLRRRFGTKRVHNNIVYNEYISHREHIHMNATQWETLTDFTKWLGREGLCKVDETPKGWYIQYIDRDPETIRRQLELEKKKKQDLDDEEKTAKFIEEQVRRGLEGKEQEVPTFTELSRENDEEKVTFNLSKGACSSSGATSSKSSTLGPSALKTIGSSASVKRKESSQSSTQSKEKKKKKSALDEIMEIEEEKKRTARTDYWLQPEIIVKIITKKLGEKYHKKKAIVKEVIDKYTAVVKMIDSGDKLKLDQTHLETVIPAPGKRILVLNGGYRGNEGTLESINEKTFSATIVIETGPLKGRRVEGIQYEDISKLA

SEQ ID NO: 50793 - protein, 374 aa, Homo sapiens
MGKSDFLTPKAIANRIKSKGLQKLRWYCQMCQKQCRDENGFKCHCMSESHQRQLLLASENPQQFMDYFSEEFRNDFLELLRRRFGTKRVHNNIVYNEYISHREHIHMNATQWETLTDFTKWLGREGLCKVDETPKGWYIQYIDRDPETIRRQLELEKKKKQDLDDEEKTAKFIEEQVRRGLEGKEQEVPTFTELSRENDEEKVTFNLSKGACSSSGATSSKSSTLGPSALKTIGSSASVKRKESSQSSTQSKEKKKKKSALDEIMEIEEEKKRTARTDYWLQPEIIVKIITKKLGEKYHKKKAIVKEVIDKYTAVVKMIDSGDKLKLDQTHLETVIPAPGKRILVLNGGYRGNEGTLESINEKTFSATIVIETV

SEQ ID NO: 50794 - protein, 288 aa, Homo sapiens
MNATQWETLTDFTKWLGREGLCKVDETPKGWYIQYIDRDPETIRRQLELEKKKKQDLDDEEKTAKFIEEQVRRGLEGKEQEVPTFTELSRENDEEKVTFNLSKGACSSSGATSSKSSTLGPSALKTIGSSASVKRKESSQSSTQSKEKKKKKSALDEIMEIEEEKKRTARTDYWLQPEIIVKIITKKLGEKYHKKKAIVKEVIDKYTAVVKMIDSGDKLKLDQTHLETVIPAPGKRILVLNGGYRGNEGTLESINEKTFSATIVIETVSLFTQRQKFQNALKMCHSFF

SEQ ID NO: 50795 - protein, 786 aa, Homo sapiens
MNEAKVKETLRRCGASGDECGRLQYALTCLRKVTGLGGEHKEDSSWSSLDARRESGSGPSTDTLSAASLPWPPGSSQLGRAGNSAQGPRSISVSALPASDSPTPSFSEGLSDTCIPLHASGRLTPRALHSFITPPTTPQLRRHTKLKPPRTPPPPSRKVFQLLPSFPTLTRSKSHESQLGNRIDDVSSMRFDLSHGSPQMVRRDIGLSVTHRFSTKSWLSQVCHVCQKSMIFGVKCKHCRLKCHNKCTKEAPACRISFLPLTRLRRTESVPSDINNPVDRAAEPHFGTLPKALTKKEHPPAMNHLDSSSNPSSTTSSTPSSPAPFPTSSNPSSATTPPNPSPGQRDSRFNFPAAYFIHHRQQFIFPVPSAGHCWKCLLIAESLKENAFNISAFAHAAPLPEAADGTRLDDQPKADVLEAHEAEAEEPEAGKSEAEDDEDEVDDLPSSRRPWRGPISRKASQTSVYLQEWDIPFEQVELGEPIGQGRWGRVHRGRWHGEVAIRLLEMDGHNQDHLKLFKKEVMNYRQTRHENVVLFMGACMNPPHLAIITSFCKGRTLHSFVRDPKTSLDINKTRQIAQEIIKGMGYLHAKGIVHKDLKSKNVFYDNGKVVITDFGLFGISGVVREGRRENQLKLSHDWLCYLAPEIVREMTPGKDEDQLPFSKAADVYAFGTVWYELQARDWPLKNQAAEASIWQIGSGEGMKRVLTSVSLGKEVSEILSACWAFDLQERPSFSLLMDMLEKLPKLNRRLSHPGHFWKSADINSSKVVPRFERFGLGVLESSNPKM

SEQ ID NO: 50796 - protein, 923 aa, Homo sapiens [sequence omitted]

SEQ ID NO: 50797 - protein, 762 aa, Homo sapiens
MNEAKVKETLRRCGASGDECGRLQYALTCLRKVTGLGGEHKEDSSWSSLDARRESGSGPSTDTLSAASLPWPPGSSQLGRAGNSAQGPRSISVSALPASDSPTPSFSEGLSDTCIPLHASGRLTPRALHSFITPPTTPQLRRHTKLKPPRTPPPPSRKVFQLLPSFPTLTRSKSHESQLGNRIDDVSSMRFDLSHGSPQMVRRDIGLSVTHRFSTKSWLSQVCHVCQKSMIFGVKCKHCRLKCHNKCTKEAPACRISFLPLTRLRRTESVPSDINNPVDRAAEPHFGTLPKALTKKEHPPAMNHLDSSSNPSSTTSSTPSSPAPFPTSSNPSSATTPPNPSPGQRDSRFNFPAAYFIHHRQQFIFPVPSAGHCWKCLLIAESLKENAFNISAFAHAAPLPEAADGTRLDDQPKADVLEAHEAEAEEPEAGKSEAEDDEDEVDDLPSSRRPWRGPISRKASQTSVYLQEWDIPFEQVELGEPIGQGRWGRVHRGRWHGEVAIRLLEMDGHNQDHLKLFKKEVMNYRQTRHENVVLFMGACMNPPHLAIITSFCKGRTLHSFVRDPKTSLDINKTRQIAQEIIKGMGYLHAKGIVHKDLKSKNVFYDNGKVVITDFGLFGISGVVREGRRENQLKLSHDWLCYLAPEIVREMTPGKDEDQLPFSKAADVYAFGTVWYELQARDWPLKNQAAEASIWQIGSGEGMKRVLTSVSLGKEVSEILSACWAFDLQERPSFSLLMDMLEKLPKLNRRLSHPGHFWKSAEL

SEQ ID NO: 50798 - protein, 124 aa, Homo sapiens
MQADLEIPRDLTLDALLEMNEAKVKETLRRCGASGDECGRLQYALTCLRKVTGLGTWGLPPSPLPGLVPLGLWPSLWWVMERGKRGPGFLGQPGKARVGCSQPPEKLSQGPQGSGSWWVWPGRI

SEQ ID NO: 50799 - protein, 613 aa, Homo sapiens
  VARIANT 1: note = MOD_RES - Any amino acid
XHSFITPPTTPQLRRHTKLKPPRTPPPPSRKVFQLLPSFPTLTRSKSHESQLGNRIDDVSSMRFDLSHGSPQMVRRDIGLSVTHRFSTKSWLSQVCHVCQKSMIFGVKCKHCRLKCHNKCTKEAPACRISFLPLTRLRRTESVPSDINNPVDRAAEPHFGTLPKALTKKEHPPAMNHLDSSSNPSSTTSSTPSSPAPFPTSSNPSSATTPPNPSPGQRDSRFNFPAAYFIHHRQQFIFPDISAFAHAAPLPEAADGTRLDDQPKADVLEAHEAEAEEPEAGKSEAEDDEDEVDDLPSSRRPWRGPISRKASQTSVYLQEWDIPFEQVELGEPIGQGRWGRVHRGRWHGEVAIRLLEMDGHNQDHLKLFKKEVMNYRQTRHENVVLFMGACMNPPHLAIITSFCKGRTLHSFVRDPKTSLDINKTRQIAQEIIKGMGYLHAKGIVHKDLKSKNVFYDNGKVVITDFGLFGISGVVREGRRENQLKLSHDWLCYLAPEIVREMTPGKDEDQLPFSKAADVYAFGTVWYELQARDWPLKNQAAEASIWQIGSGEGMKRVLTSVSLGKEVSEILSACWAFDLQERPSFSLLMDMLEKLPKLNRRLSHPGHFWKSAEL

SEQ ID NO: 50800 - protein, 877 aa, Homo sapiens
MDRAALRAAAMGEKKEGGGGGDAAAAEGGAGAAASRALQQCGQLQKLIDISIGSLRGLRTKCAVSNDLTQQEIRTLEAKLVRYICKQRQCKLSVAPGERTPELNSYPRFSDWLYTFNVRPEVVQEIPRDLTLDALLEMNEAKVKETLRRCGASGDECGRLQYALTCLRKVTGLGGEHKEDSSWSSLDARRESGSGPSTDTLSAASLPWPPGSSQLGRAGNSAQGPRSISVSALPASDSPTPSFSEGLSDTCIPLHASGRLTPRALHSFITPPTTPQLRRHTKLKPPRTPPPPSRKVFQLLPSFPTLTRSKSHESQLGNRIDDVSSMRFDLSHGSPQMVRRDIGLSVTHRFSTKSWLSQVCHVCQKSMIFGVKCKHCRLKCHNKCTKEAPACRISFLPLTRLRRTESVPSDINNPVDRAAEPHFGTLPKALTKKEHPPAMNHLDSSSNPSSTTSSTPSSPAPFPTSSNPSSATTPPNPSPGQRDSRFNFPAAYFIHHRQQFIFPDISAFAHAAPLPEAADGTRLDDQPKADVLEAHEAEAEEPEAGKSEAEDDEDEVDDLPSSRRPWRGPISRKASQTSVYLQEWDIPFEQVELGEPIGQGRWGRVHRGRWHGEVAIRLLEMDGHNQDHLKLFKKEVMNYRQTRHENVVLFMGACMNPPHLAIITSFCKGRTLHSFVRDPKTSLDINKTRQIAQEIIKGMGYLHAKGIVHKDLKSKNVFYDNGKVVITDFGLFGISGVVREGRRENQLKLSHDWLCYLAPEIVREMTPGKDEDQLPFSKAADVYAFGTVWYELQARDWPLKNQAAEASIWQIGSGEGMKRVLTSVSLGKEVSEILSACWAFDLQERPSFSLLMDMLEKLPKLNRRLSHPGHFWKSAEL

SEQ ID NO: 50801 - protein, 436 aa, Homo sapiens
MYNKKAKMEPNASESAIPARRQRQPRAKKKSKPLNLKIHSSVGSCENIPSQQRSPLLSERSLRSFFVGHAPFLPSTPPVHTEANFSANTLSVPRWSPQIPRRDLGNSIKHRFSTKYWMSQTCTVCGKGMLFGLKCKNCKLKCHNKCTKEAPPCHLLIIHRGDPARLVRTESVPCDINNPLRKPPRYSDLHISQTLPKTNKINKDHIPVPYQPDSSSNPSSTTSSTPSSPAPPLPPSATPPSPLHPSPQCTRQQKNFNLPASHYYKYKQQFIFPDVVPVPETPTRAPQVILHPVTSNPILEGNPLLQIEVEPTSENEEVHDEAEESEDDFEEMNLSLLSARSFPRKASQTSIFLQEWDIPFEQLEIGELIGKGRFGQVYHGRWHGEVAIRLIDIERDNEDQLKAFKREVMAYRQTRHENVVLFMGACMSPPHLAIIT

SEQ ID NO: 50802 - protein, 950 aa, Homo sapiens [sequence omitted]

SEQ ID NO: 50803 - protein, 921 aa, Homo sapiens
MIDLSISNLEGLRTKCATSNDLTQKEIRTLESKLVKYFSRQLSCKKKVALQERNAELDGFPQLRHWFRIVDVRKEVLEEISPGQLSLEDLLEMTDEQVCETVEKYGANREECARLNASLSCLRNVHMSGGNLSKQDWTIQWPTTETGKENNPVCPPEPTPWIRTHLSQSPRVPSKCVQHYCHTSPTPGAPVYTHVDRLTVDAYPGLCPPPPLESGHRSLPPSPRQRHAVRTPPRTPNIVTTVTPPGTPPMRKKNKLKPPGTPPPSSRKLIHLIPGFTALHRSKSHEFQLGHRVDEAHTPKAKKKSKPLNLKIHSSVGSCENIPSQQRSPLLSERSLRSFFVGHAPFLPSTPPVHTEANFSANTLSVPRWSPQIPRRDLGNSIKHRFSTKYWMSQTCTVCGKGMLFGLKCKNCKLKCHNKCTKEAPPCHLLIIHRGDPARLVRTESVPCDINNPLRKPPRYSDLHISQTLPKTNKINKDHIPVPYQPDSSSNPSSTTSSTPSSPAPPLPPSATPPSPLHPSPQCTRQQKNFNLPASHYYKYKQQFIFPDVVPVPETPTRAPQVILHPVTSNPILEGNPLLQIEVEPTSENEEVHDEAEESEDDFEEMNLSLLSARSFPRKASQTSIFLQEWDIPFEQLEIGELIGKGRFGQVYHGRWHGEVAIRLIDIERDNEDQLKAFKREVMAYRQTRHENVVLFMGACMSPPHLAIITSLCKGRTLYSVVRDAKIVLDVNKTRQIAQEIVKGMGYLHAKGILHKDLKSKNVFYDNGKVVITDFGLFSISGVLQAGRREDKLRIQNGWLCHLAPEIIRQLSPDTEEDKLPFSKHSDVFALGTIWYELHAREWPFKTQPAEAIIWQMGTGMKPNLSQIGMGKEISDILLFCWAFEQEERPTFTKLMDMLEKLPKRNRRLSHPGHFWKSAEL

SEQ ID NO: 50804 - protein, 414 aa, Homo sapiens
RAKKKSKPLNLKIHSSVGSCENIPSQQRSPLLSERSLRSFFVGHAPFLPSTPPVHTEANFSANTLSVPRWSPQIPRRDLGNSIKHRFSTKYWMSQTCTVCGKGMLFGLKCKNCKLKCHNKCTKEAPPCHLLIIHRGDPARLVRTESVPCDINNPLRKPPRYSDLHISQTLPKTNKINKDHIPVPYQPDSSSNPSSTTSSTPSSPAPPLPPSATPPSPLHPSPQCTRQQKNFNLPASHYYKYKQQFIFPDVVPVPETPTRAPQVILHPVTSNPILEGNPLLQIEVEPTSENEEVHDEAEESEDDFEEMNLSLLSARSFPRKASQTSIFLQEWDIPFEQLEIGELIGKGRFGQVYHGRWHGEVAIRLIDIERDNEDQLKAFKREVMAYRQTRHENVVLFMGACMSPPHLAIITRPV

SEQ ID NO: 50805 - protein, 1306 aa, Homo sapiens
MEFYESAYFIVLIPSIVITVIFLFFWLFMKETLYDEVLAKQKREQKLIPTKTDKKKAEKKKNKKKEIQNGNLHESDSESVPRDFKLSDALAVEDDQVAPVPLNVVETSSSVRERKKKEKKQKPVLEEQVIKESDASKIPGKKVEPVPVTKQPTPPSEAAASKKKPGQKKSKNGSDDQDKKVETLMVPSKRQEALPLHQETKQESGSGKKKASSKKQKTENVFVDEPLIHATTYIPLMDNADSSPVVDKREVIDLLKPDQVEGIQKSGTKKLKTETDKENAEVKFKDFLLSLKTMMFSEDEALCVVDLLKEKSGVIQDALKKSSKGELTTLIHQLQEKDKLLAAVKEDAAATKDRCKQLTQEMMTEKERSNVVITRMKDRIGTLEKEHNVFQNKIHVSYQETQQMQMKFQQVREQMEAEIAHLKQENGILRDAVSNTTNQLESKQSAELNKLRQDYARLVNELTEKTGKLQQEEVQKKNAEQAATQLKVQLQEAERRWEEVQSYIRKRTAEHEAAQQDLQSKFVAKENEVQSLHSKLTDTLVSKQQLEQRLMQLMESEQKRVNKEESLQMQVQDILEQNEALKAQIQQFHSQIAAQTSASVLAEELHKVIAEKDKQIKQTEDSLASERDRLTSKEEELKDIQNMNFLLKAEVQKLQALANEQAAAAHELEKMQQSVYVKDDKIRLLEEQLQHEISNKMEEFKILNDQNKALKSEVQKLQTLVSEQPNKDVVEQMEKCIQEKDEKLKTVEELLETGLIQVATKEEELNAIRTENSSLTKEVQDLKAKQNDQVSFASLVEELKKVIHEKDGKIKSVEELLEAELLKVANKEKTVQLSITSKVQELQNLLKGKEEQMNTMKAVLEEKEKDLANTGKWLQDLQEENESLKAHVQEVAQHNLKEASSASQFEELEIVLKEKENELKRLEAMLKERESDLSSKTQLLQDVQDENKLFKSQIEQLKQQNYQQASSFPPHEELLKVISEREKEISGLWNELDSLKDAVEHQRKKNNDLREKNWEAMEALASTEKMLQDKVNKTSKERQQQVEAVELEAKEVLKKLFPKVSVPSNLSYGEWLHGFEKKAKECMAGTSGSEEVKVLEHKLKEADEMHTLLQLECEKYKSVLAETEGILQKLQRSVEQEENKWKVKVDESHKTIKQMQSSFTSSEQELERLRSENKDIENLRREREHLEMELEKAEMERSTYVTEVRELKAQLNETLTKLRTEQNERQKVAGDLHKAQQSLELIQSKIVKAAGDTTVIENSDVSPETESSEKETMSVSLNQTVTQLQQLLQAVNQQLTKEKEHYQVLE

SEQ ID NO: 50806 - protein, 1357 aa, Homo sapiens
MEFYESAYFIVLIPSIVITVIFLFFWLFMKETLYDEVLAKQKREQKLIPTKTDKKKAEKKKNKKKEIQNGNLHESDSESVPRDFKLSDALAVEDDQVAPVPLNVVETSSSVRERKKKEKKQKPVLEEQVIKESDASKIPGKKVEPVPVTKQPTPPSEAAASKKKPGQKKSKNGSDDQDKKVETLMVPSKRQEALPLHQETKQESGSGKKKASSKKQKTENVFVDEPLIHATTYIPLMDNADSSPVVDKREVIDLLKPDQVEGIQKSGTKKLKTETDKENAEVKFKDFLLSLKTMMFSEDEALCVVDLLKEKSGVIQDALKKSSKGELTTLIHQLQEKDKLLAAVKEDAAATKDRCKQLTQEMMTEKERSNVVITRMKDRIGTLEKEHNVFQNKIHVSYQETQQMQMKFQQVREQMEAEIAHLKQENGILRDAVSNTTNQLESKQSAELNKLRQDYARLVNELTEKTGKLQQEEVQKKNAEQAATQLKVQLQEAERRWEEVQSYIRKRTAEHEAAQQDLQSKFVAKENEVQSLHSKLTDTLVSKQQLEQRLMQLMESEQKRVNKEESLQMQVQDILEQNEALKAQIQQFHSQIAAQTSASVLAEELHKVIAEKDKQIKQTEDSLASERDRLTSKEEELKDIQNMNFLLKAEVQKLQALANEQAAAAHELEKMQQSVYVKDDKIRLLEEQLQHEISNKMEEFKILNDQNKALKSEVQKLQTLVSEQPNKDVVEQMEKCIQEKDEKLKTVEELLETGLIQVATKEEELNAIRTENSSLTKEVQDLKAKQNDQVSFASLVEELKKVIHEKDGKIKSVEELLEAELLKVANKEKTVQDLKQEIKALKEEIGNVQLEKAQQLSITSKVQELQNLLKGKEEQMNTMKAVLEEKEKDLANTGKWLQDLQEENESLKAHVQEVAQHNLKEASSASQFEELEIVLKEKENELKRLEAMLKERESDLSSKTQLLQDVQDENKLFKSQIEQLKQQNYQQASSFPPHEELLKVISEREKEISGLWNELDSLKDAVEHQRKKNNDLREKNWEAMEALASTEKMLQDKVNKTSKERQQQVEAVELEAKEVLKKLFPKVSVPSNLSYGEWLHGFEKKAKECMAGTSGSEEVKVLEHKLKEADEMHTLLQLECEKYKSVLAETEGILQKLQRSVEQEENKWKVKVDESHKTIKQMQSSFTSSEQELERLRSENKDIENLRREREHLEMELEKAEMERSTYVTEVRELKDLLTELQKKLDDSYSEAVRQNEELNLLKAQLNETLTKLRTEQNERQKVAGDLHKAQQSLELIQSKIVKAAGDTTVIENSDVSPETESSEKETMSVSLNQTVTQLQQLLQAVNQQLTKEKEHYQVLE

SEQ ID NO: 50807 - protein, 1306 aa, Homo sapiens; identical to SEQ ID NO: 50805

SEQ ID NO: 50808 - protein, 1357 aa, Homo sapiens; identical to SEQ ID NO: 50806

SEQ ID NO: 50809 - protein, 1306 aa, Homo sapiens; identical to SEQ ID NO: 50805

SEQ ID NO: 50810 - protein, 1357 aa, Homo sapiens; identical to SEQ ID NO: 50806

SEQ ID NO: 50811 - protein, 1300 aa, Homo sapiens
MEFYESAYFIVLIPSIVITVIFLFFWLFMKETLYDEVLAKQKREQKLIPTKTDKKKAEKKKNKKKEIQNGNLHESDSESVPRDFKLSDALAVEDDQVAPVPLNVVETSSSVRERKKKEKKQKPVLEEQVIKESDASKIPGKKVEPVPVTKQPTPPSEAAASKKKPGQKKSKNGSDDQDKKVETLMVPSKRQEALPLHQETKQESGSGKKKASSKKQKTENVFVDEPLIHATTYIPLMDNADSSPVVDKREVIDLLKPDQVEGIQKSGTKKLKTETDKENAEVKFKDFLLSLKTMMFSEDEALCVVDLLKEKSGVIQDALKKSSKGELTTLIHQLQEKDKLLAAVKEDAAATKDRCKQLTQEMMTEKERSNVVITRMKDRIGTLEKEHNVFQNKIHVSYQETQQMQMKFQQVREQMEAEIAHLKQENGILRDAVSNTTNQLESKQSAELNKLRQDYARLVNELTEKTGKLQQEEVQKKNAEQAATQLKVQLQEAERRWEEVQSYIRKRTAEHEAAQQDLQSKFVAKENEVQSLHSKLTDTLVSKQQLEQRLMQLMESEQKRVNKEESLQMQVQDILEQNEALKAQIQQFHSQIAAQTSASVLAEELHKVIAEKDKQIKQTEDSLASERDRLTSKEEELKDIQNMNFLLKAEVQKLQALANEQAAAAHELEKMQQSVYVKDDKIRLLEEQLQHEISNKMEEFKILNDQNKALKSEVQKLQTLVSEQPNKDVVEQMEKCIQEKDEKLKTVEELLETGLIQVATKEEELNAIRTENSSLTKEVQDLKAKQNDQVSFASLVEELKKVIHEKDGKIKSVEELLEAELLKVANKEKTVQDLKQEIKALKEEIGNVQLEKAQQLSITSKVQELQNLLKGKEEQMNTMKAVLEEKEKDLANTGKWLQDLQEENESLKAHVQEVAQHNLKEASSASQFEELEIVLKEKENELKRLEAMLKERESDLSSKTQLLQDVQDENKLFKSQIEQLKQQNYQQASSFPPHEELLKVISEREKEISGLWNELDSLKDAVEHQRKKNNERQQQVEAVELEAKEVLKKLFPKVSVPSNLSYGEWLHGFEKKAKECMAGTSGSEEVKVLEHKLKEADEMHTLLQLECEKYKSVLAETEGILQKLQRSVEQEENKWKVKVDESHKTIKQMQSSFTSSEQELERLRSENKDIENLRREREHLEMELEKAEMERSTYVTEVRELKAQLNETLTKLRTEQNERQKVAGDLHKAQQSLELIQSKIVKAAGDTTVIENSDVSPETESSEKETMSVSLNQTVTQLQQLLQAVNQQLTKEKEHYQVLE

SEQ ID NO: 50812 - protein, 1357 aa, Homo sapiens; identical to SEQ ID NO: 50806

SEQ ID NO: 50813 - protein, 75 aa, Homo sapiens
MEFYESAYFIVLIPSIVITVIFLFFWLFMKETLYDEVLAKQKREQKLIPTKTDKKKAEKKKNKKKEIQNGNLHES

SEQ ID NO: 50814 - protein, 60 aa, Homo sapiens
MEFYESAYFIVLIPSIVITVIFLFFWLFMKETLYDEVLAKQKREQKLIPTKTDKKKAEKK

SEQ ID NO: 50815 - protein, 1056 aa, Homo sapiens
MASQPNSSAKKKEEKGKNIQVVVRCRPFNLAERKASAHSIVECDPVRKEVSVRTGGLADKSSRKTYTFDMVFGASTKQIDVYRSVVCPILDEVIMGYNCTIFAYGQTGTGKTFTMEGERSPNEEYTWEEDPLAGIIPRTLHQIFEKLTDNGTEFSVKVSLLEIYNEELFDLLNPSSDVSERLQMFDDPRNKRGVIIKGLEEITVHNKDEVYQILEKGAAKRTTAATLMNAYSSRSHSVFSVTIHMKETTIDGEELVKIGKLNLVDLAGSENIGRSGAVDKRAREAGNINQSLLTLGRVITALVERTPHVPYRESKLTRILQDSLGGRTRTSIIATISPASLNLEETLSTLEYAHRAKNILNKPEVNQKLTKKALIKEYTEEIERLKRDLAAAREKNGVYISEENFRVMSGKLTVQEEQIVELIEKIGAVEEELNRVTELFMDNKNELDQCKSDLQNKTQELETTQKHLQETKLQLVKEEYITSALESTEEKLHDAASKLLNTVEETTKDVSGLHSKLDRKKAVDQHNAEAQDIFGKNLNSLFNNMEELIKDGSSKQKAMLEVHKTLFGNLLSSSVSALDTITTVALGSLTSIPENVSTHVSQIFNMILKEQSLAAESKTVLQELINVLKTDLLSSLEMILSPTVVSILKINSQLKHIFKTSLTVADKIEDQKKELDGFLSILCNNLHELQENTICSLVESQKQCGNLTEDLKTIKQTHSQELCKLMNLWTERFCALEEKCENIQKPLSSVQENIQQKSKDIVNKMTFHSQKFCADSDGFSQELRNFNQEGTKLVEESVKHSDKLNGNLEKISQETEQRCESLNTRTVYFSEQWVSSLNEREQELHNLLEVVSQCCEASSSDITEKSDGRKAAHEKQHNIFLDQMTIDEDKLIAQNLELNETIKIGLTKLNCFLEQDLKLDIPTGTTPQRKSYLYPSTLVRTEPREHLLDQLKRKQPELLMMLNCSENNKEETIPDVDVEEAVLGQYTEEPLSQEPSVDAGVDCSSIGGVPFFQHKKSHGKDKENRGINTLERSKVEETTEHLVTKSRLPLRAQINL

SEQ ID NO: 50816 - protein, 1805 aa, Homo sapiens
MSDTKVKVAVRVRPMNRRELELNTKCVVEMEGNQTVLHPPPSNTKQGERKPPKVFAFDYCFWSMDESNTTKYAGQEVVFKCLGEGILEKAFQGYNACIFAYGQTGSGKSFSMMGHAEQLGLIPRLCCALFKRISLEQNESQTFKVEVSYMEIYNEKVRDLLDPKGSRQSLKVREHKVLGPYVDGLSQLAVTSFEDIESLMSEGNKSRTVAATNMNEESSRSHAVFNIIITQTLYDLQSGNSGEKVSKVSLVDLAGSERVSKTGAAGERLKEGSNINKSLTTLGLVISSLADQAAGKGKSKFVPYRDSVLTWLLKDNLGGNSQTSMIATISPAADNYEETLSTLRYADRAKRIVNHAVVNEDPNAKVIRELREEVEKLREQLSQAEAMKAPELKEKLEESEKLIKELTVTWEEKLRKTEEIAQERQRQLESMGISLEMSGIKVGDDKCYLVNLNADPALNELLVYYLKDHTRVGADTSQDIQLFGIGIQPQHCEIDIASDGDVTLTPKENARSCVNGTLVCSTTQLWHGDRILWGNNHFFRINLPKRKRRDWLKDFEKETGPPEHDLDAASEASSEPDYNYEFAQMEVIMKTLNSNDPVQNVVQVLEKQYLEEKRSALEEQRLMYERELEQLRQQLSPDRQPQSSGPDRLAYSSQTAQQKVTQWAEERDELFRQSLAKLREQLVKANTLVREANFLAEEMSKLTDYQVTLQIPAANLSANRKRGAIVSEPAIQVRRKGKSTQVWTIEKLENKLIDMRDLYQEWKEKVPEAKRLYGKRGDPFYEAQENHNLIGVANVFLECLFCDVKLQYAVPIISQQGEVAGRLHVEVMRVTGAVPERVVEDDSSENSSESGSLEVVDSSGEIIHRVKKLTCRVKIKEATGLPLNLSNFVFCQYTFWDQCESTVAAPVVDPEVPSPQSKDAQYTVTFSHCKDYVVNVTEEFLEFISDGALAIEVWGHRCAGNGSSIWEVDSLHAKTRTLHDRWNEVTRRIEMWISILELNELGEYAAVELHQAKDVNTGGIFQLRQGHSRRVQVTVKPVQHSGTLPLMVEAILSVSIGCVTARSTKLQRGLDSYQRDDEDGDDMDSYQEEDLNCVRERWSDALIKRREYLDEQIKKVSNKTEKTEDDVEREAQLVEQWVGLTEERNAVLVPAPGSGIPGAPADWIPPPGMETHIPVLFLDLNADDLSANEQLVGPHASGVNSILPKEHGSQFFYLPIIKHSDDEVSATASWDSSVHDSVHLNRVTPQNERIYLIVKTTVQLSHPAAMELVLRKRIAANIYNKQSFTQSLKRRISLKNIFYSCGVTYEIVSNIPKATEEIEDRETLALLAARSENEGTSDGETYIEKYTRGVLQVENILSLERLRQAVTVKEALSTKARHIRRSLSTPNVHNVSSSRPDLSGFDEDDKGWPENQLDMSDYSSSYQDVACYGTLPRDSPRRNKEGCTSETPHALTVSPFKAFSPQPPKFFKPLMPVKEEHKKRIALEARPLLSQESMPPPQAHNPGCIVPSGSNGSSMPVEHNSKREKKIDSEEEENELEAINRKLISSQPYVPVEFADFSVYNASLENREWFSSKVDLSNSRVLEKEVSRSPTTSSITSGYFSHSASNATLSDMVVPSSDSSDQLAIQTKDADSTEHSTPSLVHDFRPSSNKELTEVEKGLVKDKIIVVPLKENSALAKGSPSSQSIPEKNSKSLCRTGSCSELDACPSKISQPARGFCPREVTVEHTTNILEDHSFTEFMGVSEGKDFDGLTDSSAGELSSRRSLPNKTGGKTVSDGLHHPSQLHSKLENDQVIIPEAAFWVLCCQ

SEQ ID NO: 50817 - protein, 1749 aa, Homo sapiens
MSDTKVKVAVRVRPMNRRELELNTKCVVEMEGNQTVLHPPPSNTKQGERKPPKVFAFDYCFWSMDESNTTKYAGQEVVFKCLGEGILEKAFQGYNACIFAYGQTGSGKSFSMMGHAEQLGLIPRLCCALFKRISLEQNESQTFKVEVSYMEIYNEKVRDLLDPKGSRQSLKVREHKVLGPYVDGLSQLAVTSFEDIESLMSEGNKSRTVAATNMNEESSRSHAVFNIIITQTLYDLQSGNSGEKVSKVSLVDLAGSERVSKTGAAGERLKEGSNINKSLTTLGLVISSLADQAAGKGKSKFVPYRDSVLTWLLKDNLGGNSQTSMIATISPAADNYEETLSTLRYADRAKRIVNHAVVNEDPNAKVIRELREEVEKLREQLSQAEAMKAPELKEKLEESEKLIKELTVTWEEKLRKTEEIAQERQRQLESMGISLEMSGIKVGDDKCYLVNLNADPALNELLVYYLKDHTRVGADTSQDIQLFGIGIQPQHCEIDIASDGDVTLTPKENARSCVNGTLVCSTTQLWHGDRILWGNNHFFRINLPKRKRRDWLKDFEKETGPPEHDLDAASEASSEPDYNYEFAQMEVIMKTLNSNDPVQNVVQVLEKQYLEEKRSALEEQRLMYERELEQLRQQLSPDRQPQSSGPDRLAYSSQTAQQKVTQWAEERDELFRQSLAKLREQLVKANTLVREANFLAEEMSKLTDYQVTLQIPAANLSANRKRGAIVSEPAIQVRRKGKSTQVWTIEKLENKLIDMRDLYQEWKEKVPEAKRLYGKRGDPFYEAQENHNLIGVANVFLECLFCDVKLQYAVPIISQQGEVAGRLHVEVMRVTGAVPERVVEDDSSENSSESGSLEVVDSSGEIIHRVKKLTCRVKIKEATGLPLNLSNFVFCQYTFWDQCESTVAAPVVDPEVPSPQSKDAQYTVTFSHCKDYVVNVTEEFLEFISDGALAIEVWGHRCAGNGSSIWEVDSLHAKTRTLHDRWNEVTRRIEMWISILELNELGEYAAVELHQAKDVNTGGIFQLRQGHSRRVQVTVKPVQHSGTLPLMVEAILSVSIGCVTARSTKLQRGLDSYQEEDLNCVRERWSDALIKRREYLDEQIKKVSNKTEKTEDDVEREAQLVEQWVGLTEERNAVLVPAPGSGIPGAPADWIPPPGMETHIPVLFLDLNADDLSANEQLVGPHASGVNSILPKEHGSQFFYLPIIKHSDDEVSATASWDSSVHDSVHLNRVTPQNERIYLIVKTTVQLSHPAAMELVLRKRIAANIYNKQSFTQSLKRRISLKNIFYSCGVTYEIVSNIPKATEEIEDRETLALLAARSENEGTSDGETYIEKYTRGVLQVENILSLERLRQAVTVKEALSTKARHIRRSLSTPNVHNVSSSRPDLSGFDEDDKGWPENQLDMSDYSSSYQDVACYGTLPRDSPRRNKEGCTSETPHALTVSPFKAFSPQPPKFFKPLMPVKEEHKKRIALEARPLLSQEDSEEEENELEAINRKLISSQPYVPVEFADFSVYNASLENREWFSSKVDLSNSRVLEKEVSRSPTTSSITSGYFSHSASNATLSDMVVPSSDSSDQLAIQTKDADSTEHSTPSLVHDFRPSSNKELTEVEKGLVKDKIIVVPLKENSALAKGSPSSQSIPEKNSKSLCRTGSCSELDACPSKISQPARGFCPREVTVEHTTNILEDHSFTEFMGVSEGKDFDGLTDSSAGELSSRRSLPNKTGGKTVSDGLHHPSQLHSKLENDQGGTTSR

SEQ ID NO: 50818 - protein, 1770 aa, Homo sapiens
MSDTKVKVAVRVRPMNRRELELNTKCVVEMEGNQTVLHPPPSNTKQGERRPSQVFAFDYCFWSMDESNTTKYAGQEVVFKCLGEGILEKAFQGYNACIFAYGQTGSGKSFSMMGHAEQLGLIPRLCCALFKRISLEQNESQTFKVEVSYMEIYNEKVRDLLDPKGSRQSLKVREHKVLGPYVDGLSQLAVTSFEDIESLMSEGNKSRTVAATNMNEESSRSHAVFNIIITQTLYDLQSGNSGEKVSKVSLVDLAGSERVSKTGAAGERLKEGSNINKSLTTLGLVISSLADQAAGKGKSKFVPYRDSVLTWLLKDNLGGNSQTSMIATISPAADNYEETLSTLRYADRAKRIVNHAVVNEDPNAKVIRELREEVEKLREQLSQAEAMKAPELKEKLEESEKLIKELTVTWEEKLRKTEEIAQERQRQLESMGISLEMSGIKVGDDKCYLVNLNADPALNELLVYYLKDHTRVGADTSQDIQLFGIGIQPQHCEIDIASDGDVTLTPKENARSCVNGTLVCSTTQLWHGDRILWGNNHFFRINLPKRKRRDWLKDFEKETGPPEHDLDAASEASSEPDYNYEFAQMEVIMKTLNSNDPVQNVVQVLEKQYLEEKRSALEEQRLMYERELEQLRQQLSPDRQPQSSGPDRLAYSSQTAQQKVTQWAEERDELFRQSLAKLREQLVKANTLVREANFLAEEMSKLTDYQVTLQIPAANLSANRKRGAIVSEPAIQVRRKGKSTQVWTIEKLENKLIDMRDLYQEWKEKVPEAKRLYGKRGDPFYEAQENHNLIGVANVFLECLFCDVKLQYAVPIISQQGEVAGRLHVEVMRVTGAVPERVVEDDSSENSSESGSLEVVDSSGEIIHRVKKLTCRVKIKEATGLPLNLSNFVFCQYTFWDQCESTVAAPVVDPEVPSPQSKDAQYTVTFSHCKDYVVNVTEEFLEFISDGALAIEVWGHRCAGNGSSIWEVDSLHAKTRTLHDRWNEVTRRIEMWISILELNELGEYAAVELHQAKDVNTGGIFQLRQGHSRRVQVTVKPVQHSGTLPLMVEAILSVSIGCVTARSTKLQRGLDSYQRDDEDGDDMDSYQEEDLNCVRERWSDALIKRREYLDEQIKKVSNKTEKTEDDVEREAQLVEQWVGLTEERNAVLVPAPGSGIPGAPADWIPPPGMETHIPVLFLDLNADDLSANEQLVGPHASGVNSILPKEHGSQFFYLPIIKHSDDEVSATASWDSSVHDSVHLNRVTPQNERIYLIVKTTVQLSHPAAMELVLRKRIAANIYNKQSFTQSLKRRISLKNIFYSCGVTYEIVSNIPKATEEIEDRETLALLAARSENEGTSDGETYIEKYTRGVLQVENILSLERLRQAVTVKEALSTKARHIRRSLSTPNVHNVSSSRPDLSGFDEDDKGWPENQLDMSDYSSSYQDVACYGTLPRDSPRRNKEGCTSETPHALTVSPFKAFSPQPPKFFKPLMPVKEEHKKRIALEARPLLSQEDSEEEENELEAINRKLISSQPYVPVEFADFSVYNASLENREWFSSKVDLSNSRVLEKEVSRSPTTSSITSGYFSHSASNATLSDMVVPSSDSSDQLAIQTKDADSTEHSTPSLVHDFRPSSNKELTEVEKGLVKDKIIVVPLKENSALAKGSPSSQSIPEKNSKSLCRTGSCSELDACPSKISQPARGFCPREVTVEHTTNILEDHSFTEFMGVSEGKDFDGLTDSSAGELSSRRSLPNKTGGKTVSDGLHHPSQLHSKLENDQVIIPEAAFWVLCCQ

SEQ ID NO: 50819 - protein, 1770 aa, Homo sapiens
MSDTKVKVAVRVRPMNRRELELNTKCVVEMEGNQTVLHPPPSNTKQGERKPPKVFAFDYCFWSMDESNTTKYAGQEVVFKCLGEGILEKAFQGYNACIFAYGQTGSGKSFSMMGHAEQLGLIPRLCCALFKRISLEQNESQTFKVEVSYMEIYNEKVRDLLDPKGSRQSLKVREHKVLGPYVDGLSQLAVTSFEDIESLMSEGNKSRTVAATNMNEESSRSHAVFNIIITQTLYDLQSGNSGEKVSKVSLVDLAGSERVSKTGAAGERLKEGSNINKSLTTLGLVISSLADQAAGKGKSKFVPYRDSVLTWLLKDNLGGNSQTSMIATISPAADNYEETLSTLRYADRAKRIVNHAVVNEDPNAKVIRELREEVEKLREQLSQAEAMKAPELKEKLEESEKLIKELTVTWEEKLRKTEEIAQERQRQLESMGISLEMSGIKVGDDKCYLVNLNADPALNELLVYYLKDHTRVGADTSQDIQLFGIGIQPQHCEIDIASDGDVTLTPKENARSCVNGTLVCSTTQLWHGDRILWGNNHFFRINLPKRKRRDWLKDFEKETGPPEHDLDAASEASSEPDYNYEFAQMEVIMKTLNSNDPVQNVVQVLEKQYLEEKRSALEEQRLMYERELEQLRQQLSPDRQPQSSGPDRLAYSSQTAQQKVTQWAEERDELFRQSLAKLREQLVKANTLVREANFLAEEMSKLTDYQVTLQIPAANLSANRKRGAIVSEPAIQVRRKGKSTQVWTIEKLENKLIDMRDLYQEWKEKVPEAKRLYGKRGDPFYEAQENHNLIGVANVFLECLFCDVKLQYAVPIISQQGEVAGRLHVEVMRVTGAVPERVVEDDSSENSSESGSLEVVDSSGEIIHRVKKLTCRVKIKEATGLPLNLSNFVFCQYTFWDQCESTVAAPVVDPEVPSPQSKDAQYTVTFSHCKDYVVNVTEEFLEFISDGALAIEVWGHRCAGNGSSIWEVDSLHAKTRTLHDRWNEVTRRIEMWISILELNELGEYAAVELHQAKDVNTGGIFQLRQGHSRRVQVTVKPVQHSGTLPLMVEAILSVSIGCVTARSTKLQRGLDSYQRDDEDGDDMDSYQEEDLNCVRERWSDALIKRREYLDEQIKKVSNKTEKTEDDVEREAQLVEQWVGLTEERNAVLVPAPGSGIPGAPADWIPPPGMETHIPVLFLDLNADDLSANEQLVGPHASGVNSILPKEHGSQFFYLPIIKHSDDEVSATASWDSSVHDSVHLNRVTPQNERIYLIVKTTVQLSHPAAMELVLRKRIAANIYNKQSFTQSLKRRISLKNIFYSCGVTYEIVSNIPKATEEIEDRETLALLAARSENEGTSDGETYIEKYTRGVLQVENILSLERLRQAVTVKEALSTKARHIRRSLSTPNVHNVSSSRPDLSGFDEDDKGWPENQLDMSDYSSSYQDVACYGTLPRDSPRRNKEGCTSETPHALTVSPFKAFSPQPPKFFKPLMPVKEEHKKRIALEARPLLSQEDSEEEENELEAINRKLISSQPYVPVEFADFSVYNASLENREWFSSKVDLSNSRVLEKEVSRSPTTSSITSGYFSHSASNATLSDMVVPSSDSSDQLAIQTKDADSTEHSTPSLVHDFRPSSNKELTEVEKGLVKDKIIVVPLKENSALAKGSPSSQSIPEKNSKSLCRTGSCSELDACPSKISQPARGFCPREVTVEHTTNILEDHSFTEFMGVSEGKDFDGLTDSSAGELSSRRSLPNKTGGKTVSDGLHHPSQLHSKLENDQVIIPEAAFWVLCCQ

SEQ ID NO: 50820 - protein, 1757 aa, Homo sapiens
MSDTKVKVAVRVRPMNRRELELNTKCVVEMEGNQTVLHPPPSNTKQGERKPPKVFAFDYCFWSMDESNTTKYAGQEVVFKCLGEGILEKAFQGYNACIFAYGQTGSGKSFSMMGHAEQLGLIPRLCCALFKRISLEQNESQTFKVEVSYMEIYNEKVRDLLDPKGSRQSLKVREHKVLGPYVDGLSQLAVTSFEDIESLMSEGNKSRTVAATNMNEESSRSHAVFNIIITQTLYDLQSGNSGEKVSKVSLVDLAGSERVSKTGAAGERLKEGSNINKSLTTLGLVISSLADQAAGKGKSKFVPYRDSVLTWLLKDNLGGNSQTSMIATISPAADNYEETLSTLRYADRAKRIVNHAVVNEDPNAKVIRELREEVEKLREQLSQAEAMKAPELKEKLEESEKLIKELTVTWEEKLRKTEEIAQERQRQLESMGISLEMSGIKVGDDKCYLVNLNADPALNELLVYYLKDHTRVGADTSQDIQLFGIGIQPQHCEIDIASDGDVTLTPKENARSCVNGTLVCSTTQLWHGDRILWGNNHFFRINLPKRKRRDWLKDFEKETGPPEHDLDAASEASSEPDYNYEFAQMEVIMKTLNSNDPVQNVVQVLEKQYLEEKRSALEEQRLMYERELEQLRQQLSPDRQPQSSGPDRLAYSSQTAQQKVTQWAEERDELFRQSLAKLREQLVKANTLVREANFLAEEMSKLTDYQVTLQIPAANLSANRKRGAIVSEPAIQVRRKGKSTQVWTIEKLENKLIDMRDLYQEWKEKVPEAKRLYGKRGDPFYEAQENHNLIGVANVFLECLFCDVKLQYAVPIISQQGEVAGRLHVEVMRVTGAVPERVVEDDSSENSSESGSLEVVDSSGEIIHRVKKLTCRVKIKEATGLPLNLSNFVFCQYTFWDQCESTVAAPVVDPEVPSPQSKDAQYTVTFSHCKDYVVNVTEEFLEFISDGALAIEVWGHRCAGNGSSIWEVDSLHAKTRTLHDRWNEVTRRIEMWISILELNELGEYAAVELHQAKDVNTGGIFQLRQGHSRRVQVTVKPVQHSGTLPLMVEAILSVSIGCVTARSTKLQRGLDSYQEEDLNCVRERWSDALIKRREYLDEQIKKVSNKTEKTEDDVEREAQLVEQWVGLTEERNAVLVPAPGSGIPGAPADWIPPPGMETHIPVLFLDLNADDLSANEQLVGPHASGVNSILPKEHGSQFFYLPIIKHSDDEVSATASWDSSVHDSVHLNRVTPQNERIYLIVKTTVQLSHPAAMELVLRKRIAANIYNKQSFTQSLKRRISLKNIFYSCGVTYEIVSNIPKATEEIEDRETLALLAARSENEGTSDGETYIEKYTRGVLQVENILSLERLRQAVTVKEALSTKARHIRRSLSTPNVHNVSSSRPDLSGFDEDDKGWPENQLDMSDYSSSYQDVACYGTLPRDSPRRNKEGCTSETPHALTVSPFKAFSPQPPKFFKPLMPVKEEHKKRIALEARPLLSQEDSEEEENELEAINRKLISSQPYVPVEFADFSVYNASLENREWFSSKVDLSNSRVLEKEVSRSPTTSSITSGYFSHSASNATLSDMVVPSSDSSDQLAIQTKDADSTEHSTPSLVHDFRPSSNKELTEVEKGLVKDKIIVVPLKENSALAKGSPSSQSIPEKNSKSLCRTGSCSELDACPSKISQPARGFCPREVTVEHTTNILEDHSFTEFMGVSEGKDFDGLTDSSAGELSSRRSLPNKTGGKTVSDGLHHPSQLHSKLENDQVIIPEAAFWVLCCQ

SEQ ID NO: 50821 - protein, 70 aa, Homo sapiens
MSDTKVKVAVRVRPMNRRELELNTKCVVEMEGNQTVLHPPPSNTKQGERLVTVAHISNSSTLGGQGKRIT

SEQ ID NO: 50822 - protein, 345 aa, Homo sapiens
MPKLLKSLFPVRDEKRGKRPSPLAHQAQPEMGPDVLVQTMGAPALKICDKPAKVPSPPPVIAVTAVTPAPEAQDGPPSPLSEASSGYFSHSVSTATLSDALGPGLDAAAPPGSMPTAPEAEPEAPISHPPPPTAVPAEEPPGPQQLVSPGRERPDLEAPAPGSPFRVRRVRASELRSFSRMLAGDPGCSPGAEGNAPAPGAGGQALASDSEEADEVPEWLREGEFVTVGAHKTGVVRYVGPADFQEGTWVGVELDLPSGKNDGSIGGKQYFRCNPGYGLLVRPSRVRRATGPVRRRSTGLRLGAPEARRSATLSGSATNLASLTAALAKADRSHKNPENRKSWAS

SEQ ID NO: 50823 - protein, 1826 aa, Homo sapiens
MGDSKVKVAVRIRPMNRRETDLHTKCVVDVDANKVILNPVNTNLSKGDARGQPKVFAYDHCFWSMDESVKEKYAGQDIVFKCLGENILQNAFDGYNACIFAYGQTGSGKSYTMMGTADQPGLIPRLCSGLFERTQKEENEEQSFKVEVSYMEIYNEKVRDLLDPKGSRQTLKVREHSVLGPYVDGLSKLAVTSYKDIESLMSEGNKSRTVAATNMNEESSRSHAVFKITLTHTLYDVKSGTSGEKVGKLSLVDLAGSERATKTGAAGDRLKEGSNINKSLTTLGLVISALADQSAGKNKNKFVPYRDSVLTWLLKDSLGGNSKTAMVATVSPAADNYDETLSTLRYADRAKHIVNHAVVNEDPNARIIRDLREEVEKLREQLTKAEAMKSPELKDRLEESEKLIQEMTVTWEEKLRKTEEIAQERQKQLESLGISLQSSGIKVGDDKCFLVNLNADPALNELLVYYLKEHTLIGSANSQDIQLCGMGILPEHCIIDITSEGQVMLTPQKNTRTFVNGSSVSSPIQLHHGDRILWGNNHFFRLNLPKKKKKAEREDEDQDPSMKNENSSEQLDVDGDSSSEVSSEVNFNYEYAQMEVTMKALGSNDPMQSILNSLEQQHEEEKRSALERQRLMYEHELEQLRRRLSPEKQNCRSMDRFSFHSPSAQQRLRQWAEEREATLNNSLMRLREQIVKANLLVREANYIAEELDKRTEYKVTLQIPASSLDANRKRGSLLSEPAIQVRRKGKGKQIWSLEKLDNRLLDMRDLYQEWKECEEDNPVIRSYFKRADPFYDEQENHSLIGVANVFLESLFYDVKLQYAVPIINQKGEVAGRLHVEVMRLSGDVGERIAGGDEVAEVSFEKETQENKLVCMVKILQATGLPQHLSHFVFCKYSFWDQQEPVIVAPEVDTSSSSVSKEPHCMVVFDHCNEFSVNITEDFIEHLSEGALAIEVYGHKINDPRKNPALWDLGIIQAKTRSLRDRWSEVTRKLEFWVQILEQNENGEYCPVEVISAKDVPTGGIFQLRQGQSRRVQVEVKSVQESGTLPLMEECILSVGIGCVKVRPLRAPRTHETFHEEEEDMDSYQDRDLERLRRKWLNALTKRQEYLDQQLQKLVSKRDKTEDDADREAQLLEMRLTLTEERNAVMVPSAGSGIPGAPAEWTPVPGMETHIPVIFLDLNADDFSSQDNLDDPEAGGWDATLTGEEEEEFFELQIVKQHDGEVKAEASWDSAVHGCPQLSRGTPVDERLFLIVRVTVQLSHPADMQLVLRKRICVNVHGRQGFAQSLLKKMSHRSSIPGCGVTFEIVSNIPEDAQGVEEREALARMAANVENPASADSEAYIEKYLRSVLAVENLLTLDRLRQEVAVKEQLTGKGKLSRRSISSPNVNRLSGSRQDLIPSYSLGSNKGRWESQQDVSQTTVSRGIAPAPALSVSPQNNHSPDPGLSNLAASYLNPVKSFVPQMPKLLKSLFPVRDEKRGKRPSPLAHQPVPRIMVQSASPDIRVTRMEEAQPEMGPDVLVQTMGAPALKICDKPAKVPSPPPVIAVTAVTPAPEAQDGPPSPLSEASSGYFSHSVSTATLSDALGPGLDAAAPPGSMPTAPEAEPEAPISHPPPPTAVPAEEPPGPQQLVSPGRERPDLEAPAPGSPFRVRRVRASELRSFSRMLAGDPGCSPGAEGNAPAPGAGGQALASDSEEADEVPEWLREGEFVTVGAHKTGVVRYVGPADFQEGTWVGVELDLPSGKNDGSIGGKQYFRCNPGYGLLVRPSRVRRATGPVRRRSTGLRLGAPEARRSATLSGSATNLASLTAALAKADRSHKNPENRKSWAS

SEQ ID NO: 50824 - protein, 1648 aa, Homo sapiens
MSLHSTHNRNNSGDILDIPSSQNSSSLNALTHSSRLKLHLKSDMSECENDDPLLRSAGKVRDINRTYVISASRKTADMPLTPNPVGRLALQRRTTRNKESSLLVSELEDTTEKTAETRLTLQRRAKTDSAEKWKTAEIDSVKMTLNVGGETENNGVSKESRTNVRIVNNAKNSFVASSVPLDEDPQVIEMMADKKYKETFSAPSRANENVALKYSSNRPPIASLSQTEVVRSGHLTTKPTQSKLDIKVLGTGNLYHRSIGKEIAKTSNKFGSLEKRTPTKCTTEHKLTTKCSLPQLKSPAPSILKNRMSNLQVKQRPKSSFLANKQERSAENTILPEEETVVQNTSAGKDPLKVENSQVTVAVRVRPFTKREKIEKASQVVFMSGKEITVEHPDTKQVYNFIYDVSFWSFDECHPHYASQTTVYEKLAAPLLERAFEGFNTCLFAYGQTGSGKSYTMMGFSEEPGIIPRFCEDLFSQVARKQTQEVSYHIEMSFFEVYNEKIHDLLVCKDENGQRKQPLRVREHPVYGPYVEALSMNIVSSYADIQSWLELGNKQRATAATGMNDKSSRSHSVFTLVMTQTKTEFVEGEEHDHRITSRINLIDLAGSERCSTAHTNGDRLKEGVSINKSLLTLGKVISALSEQANQRSVFIPYRESVLTWLLKESLGGNSKTAMIATISPAASNIEETLSTLRYANQARLIVNIAKVNEDMNAKLIRELKAEIAKLKAAQRNSRNIDPERYRLCRQEITSLRMKLHQQERDMAEMQRVWKEKFEQAEKRKLQETKELQKAGIMFQMDNHLPNLVNLNEDPQLSEMLLYMIKEGTTTVGKYKPNSSHDIQLSGVLIADDHCTIKNFGGTVSIIPVGEAKTYVNGKHILEITVLRHGDRVILGGDHYFRFNHPVEVQKGKRPSGRDTPISEGPKDFEFAKNELLMAQRSQLEAEIKEAQLKAKEEMMQGIQIAKEMAQQELSSQKAAYESKIKALEAELREESQRKKMQEINNQKANHKIEELEKAKQHLEQEIYVNKKRLEMETLATKQALEDHSIRHARILEALETEKQKIAKEVQILQQNRNNRDKTFTVQTTWSSMKLSMMIQEANAISSKLKTYYVFGRHDISDKSSSDTSIRVRNLKLGISTFWSLEKFESKLAAMKELYESNGSNRGEDAFCDPEDEWEPDITDAPVSSLSRRRSRSLMKNRRISGCLHDIQVHPIKNLHSSHSSGLMDKSSTIYSNSAESFLPGICKELIGSSLDFFGQSYDEERTIADSLINSFLKIYNGLFAISKAHEEQDEESQDNLFSSDRAIQSLTIQTACAFEQLVVLMKHWLSDLLPCTNIARLEDELRQEVKKLGGYLQLFLQGCCLDISSMIKEAQKNAIQIVQQAVKYVGQLAVLKGSKLHFLENGNNKAASVQEEFMDAVCDGVGLGMKILLDSGLEKAKELQHELFRQCTKNEVTKEMKTNAMGLIRSLENIFAESKIKSFRRQVQEENFEYQDFKRMVNRAPEFLKLKHCLEKAIEIIISALKGCHSDINLLQTCVESIRNLASDFYSDFSVPSTSVGSYESRVTHIVHQELESLAKSLLFCFESEESPDLLKPWETYNQNTKEEHQQSKSSGIDGSKNKGVPKRVYELHGSSPAVSSEECTPSRIQWV

SEQ ID NO: 50825 - protein, 1690 aa, Homo sapiens
MAGASVKVAVRVRPFNSREMSRDSKCIIQMSGSTTTIVNPKQPKETPKSFSFDYSYWSHTSPEDINYASQKQVYRDIGEEMLQHAFEGYNVCIFAYGQTGAGKSYTMMGKQEKDQQGIIPQLCEDLFSRINDTTNDNMSYSVEVSYMEIYCERVRDLLNPKNKGNLRVREHPLLGPYVEDLSKLAVTSYNDIQDLMDSGNKARTVAATNMNETSSRSHAVFNIIFTQKRHDAETNITTEKVSKISLVDLAGSERADSTGAKGTRLKEGANINKSLTTLGKVISALAEMDSGPNKNKKKKKTDFIPYRDSVLTWLLRENLGGNSRTAMVAALSPADINYDETLSTLRYADRAKQIRCNAVINEDPNNKLIRELKDEVTRLRDLLYAQGLGDITDMTNALVGMSPSSSLSALSSRAASVSSLHERILFAPGSEEAIERLKETEKIIAELNETWEEKLRRTEAIRMEREALLAEMGVAMREDGGTLGVFSPKKTPHLVNLNEDPLMSECLLYYIKDGITRVGREDGERRQDIVLSGHFIKEEHCVFRSDSRGGSEAVVTLEPCEGADTYVNGKKVTEPSILRSGNRIIMGKSHVFRFNHPEQARQERERTPCAETPAEPVDWAFAQRELLEKQGIDMKQEMEQRLQELEDQYRREREEATYLLEQQRLDYESKLEALQKQMDSRYYPEVNEEEEEPEDEVQWTERECELALWAFRKWKWYQFTSLRDLLWGNAIFLKEANAISVELKKKVQFQFVLLTDTLYSPLPPDLLPPEAAKDRETRPFPRTIVAVEVQDQKNGATHYWTLEKLRQRLDLMREMYDRAAEVPSSVIEDCDNVVTGGDPFYDRFPWFRLVGRAFVYLSNLLYPVPLVHRVAIVSEKGEVKGFLRVAVQAISADEEAPDYGSGVRQSGTAKISFDDQHFEKFQSESCPVVGMSRSGTSQEELRIVEGQGQGADVGPSADEVNNNTCSAVPPEGLLLDSSEKAALDGPLDAALDHLRLGNTFTFRVTVLQASSISAEYADIFCQFNFIHRHDEAFSTEPLKNTGRGPPLGFYHVQNIAVEVTKSFIEYIKSQPIVFEVFGHYQQHPFPPLCKDVLSPLRPSRRHFPRVMPLSKPVPATKLSTLTRPCPGPCHCKYDLLVYFEICELEANGDYIPAVVDHRGGMPCMGTFLLHQGIQRRITVTLLHETGSHIRWKEVRELVVGRIRNTPETDESLIDPNILSLNILSSGYIHPAQDDRTFYQFEAAWDSSMHNSLLLNRVTPYREKIYMTLSAYIEMENCTQPAVVTKDFCMVFYSRDAKLPASRSIRNLFGSGSLRASESNRVTGVYELSLCHVADAGSPGMQRRRRRVLDTSVAYVRGEENLAGWRPRSDSLILDHQWELEKLSLLQEVEKTRHYLLLREKLETAQRPVPEALSPAFSEDSESHGSSSASSPLSAEGRPSPLEAPNERQRELAVKCLRLLTHTFNREYTHSHVCVSASESKLSEMSVTLLRDPSMSPLGVATLTPSSTCPSLVEGRYGATDLRTPQPCSRPASPEPELLPEADSKKLPSPARATETDKEPQRLLVPDIQEIRVSPIVSKKGYLHFLEPHTSGWARRFVVVRRPYAYMYNSDKDTVERFVLNLATAQVEYSEDQQAMLKTPNTFAVCTEHRGILLQAASDKDMHDWLYAFNPLLAGTIRSKLSRRRSAQMRV

SEQ ID NO: 50826 - protein, 1799 aa, Homo sapiens
MAGASVKVAVRVRPFNSREMSRDSKCIIQMSGSTTTIVNPKQPKETPKSFSFDYSYWSHTSPEDINYASQKQVYRDIGEEMLQHAFEGYNVCIFAYGQTGAGKSYTMMGKQEKDQQGIIPQLCEDLFSRINDTTNDNMSYSVEVSYMEIYCERVRDLLNPKNKGNLRVREHPLLGPYVEDLSKLAVTSYNDIQDLMDSGNKARTVAATNMNETSSRSHAVFNIIFTQKRHDAETNITTEKVSKISLVDLAGSERADSTGAKGTRLKEGANINKSLTTLGKVISALAEMVSGPARNKKKKKTDFIPYRDSVLTWLLRENLGGNSRTAMVAALSPADINYDETLSTLRYADRAKQIRCNAVINEDPNNKLIRELKDEVTRLRDLLYAQGLGDITDTNTVPGGPKLTNALVGMSPSSSLSALSSRAASVSSLHERILFAPGSEEAIERLKETEKIIAELNETWEEKLRRTEAIRMEREALLAEMGVAMREDGGTLGVFSPKKTPHLVNLNEDPLMSECLLYYIKDGITRVGREDGERRQDIVLSGHFIKEEHCVFRSDSRGGSEAVVTLEPCEGADTYVNGKKVTEPSILRSGNRIIMGKSHVFRFNHPEQARQERERTPCAETPAEPVDWAFAQRELLEKQGIDMKQEMEQRLQELEDQYRREREEATYLLEQQRLDYESKLEALQKQMDSRYYPEVNEEEEEPEDEVQWTERECELALWAFRKWKWYQFTSLRDLLWGNAIFLKEANAISVELKKKVQFQFVLLTDTLYSPLPPDLLPPEAAKDRETRPFPRTIVAVEVQDQKNGATHYWTLEKLRQRLDLMREMYDRAAEVPSSVIEDCDNVVTGGDPFYDRFPWFRLVGSSAISGCNSYPLLNTCMSERMAALTPSPTFSSPDSDATEPAEEQSVGEEEEEEEEEEDEEEEDLEDDVFPEHALCDGRDPFYDRPPLFSLVGRAFVYLSNLLYPVPLVHRVAIVSEKGEVKGFLRVAVQAISADEEAPDYGSGVRQSGTAKISFDDQHFEKFQSESCPVVGMSRSGTSQEELRIVEGQGQGADVGPSADEVNNNTCSAVPPEGLLLDSSEKAALDGPLDAALDHLRLGNTFTFRVTVLQASSISAEYADIFCQFNFIHRHDEAFSTEPLKNTGRGPPLGFYHVQNIAVEVTKSFIEYIKSQPIVFEVFGHYQQHPFPPLCKDVLSPLRPSRRHFPRVMPLSKPVPATKLSTLTRPCPGPCHCKYDLLVYFEICELEANGDYIPAVVDHRGGMPCMGTFLLHQGIQRRITVTLLHETGSHIRWKEVRELVVGRIRNTPETDESLIDPNILSLNILSSGYIHPAQDDRVSLGNDTRTFYQFEAAWDSSMHNSLLLNRVTPYREKIYMTLSAYIEMENCTQPAVVTKDFCMVFYSRDAKLPASRSIRNLFGSGSLRASESNRVTGVYELSLCHVADAGSPGMQRRRRRVLDTSVAYVRGEENLAGWRPRSDSLILDHQWELEKLSLLQEVEKTRHYLLLREKLETAQRPVPEALSPAFSEDSESHGSSSASSPLSAEGRPSPLEAPNERQRELAVKCLRLLTHTFNREYTHSHVCVSASESKLSEMSVTLLRDPSMSPLGVATLTPSSTCPSLVEGRYGATDLRTPQPCSRPASPEPELLPEADSKKLPSPARATETDKEPQRLLVPDIQEIRVSPIVSKKGYLHFLEPHTSGWARRFVVVRRPYAYMYNSDKDTVERFVLNLATAQVEYSEDQQAMLKTPNTFAVCTEHRGILLQAASDKDMHDWLYAFNPLLAGTIRSKLSRRRSAQMRV

SEQ ID NO: 50827 - protein, 38 aa, Homo sapiens
MAGASVKVAVRVRPFNSREMSRDSKCIIQMSGSTTTIV

SEQ ID NO: 50828 - protein, 1791 aa, Homo sapiens
MAGASVKVAVRVRPFNSREMSRDSKCIIQMSGSTTTIVNPKQPKETPKSFSFDYSYWSHTSPEDINYASQKQVYRDIGEEMLQHAFEGYNVCIFAYGQTGAGKSYTMMGKQEKDQQGIIPQLCEDLFSRINDTTNDNMSYSVEVSYMEIYCERVRDLLNPKNKGNLRVREHPLLGPYVEDLSKLAVTSYNDIQDLMDSGNKARTVAATNMNETSSRSHAVFNIIFTQKRHDAETNITTEKVSKISLVDLAGSERADSTGAKGTRLKEGANINKSLTTLGKVISALAEMDSGPNKNKKKKKTDFIPYRDSVLTWLLRENLGGNSRTAMVAALSPADINYDETLSTLRYADRAKQIRCNAVINEDPNNKLIRELKDEVTRLRDLLYAQGLGDITDTNTVPGGPKLTNALVGMSPSSSLSALSSRAASVSSLHERILFAPGSEEAIERLKETEKIIAELNETWEEKLRRTEAIRMEREALLAEMGVAMREDGGTLGVFSPKKTPHLVNLNEDPLMSECLLYYIKDGITRVGREDGERRQDIVLSGHFIKEEHCVFRSDSRGGSEAVVTLEPCEGADTYVNGKKVTEPSILRSGNRIIMGKSHVFRFNHPEQARQERERTPCAETPAEPVDWAFAQRELLEKQGIDMKQEMEQRLQELEDQYRREREEATYLLEQQRLDYESKLEALQKQMDSRYYPEVNEEEEEPEDEVQWTERECELALWAFRKWKWYQFTSLRDLLWGNAIFLKEANAISVELKKKVQFQFVLLTDTLYSPLPPDLLPPEAAKDRETRPFPRTIVAVEVQDQKNGATHYWTLEKLRQRLDLMREMYDRAAEVPSSVIEDCDNVVTGGDPFYDRFPWFRLVGSSAISGCNSYPLLNTCMSERMAALTPSPTFSSPDSDATEPAEEQSVGEEEEEEEEEEDEEEEDLEDDVFPEHALCDGRDPFYDRPPLFSLVGRAFVYLSNLLYPVPLVHRVAIVSEKGEVKGFLRVAVQAISADEEAPDYGSGVRQSGTAKISFDDQHFEKFQSESCPVVGMSRSGTSQEELRIVEGQGQGADVGPSADEVNNNTCSAVPPEGLLLDSSEKAALDGPLDAALDHLRLGNTFTFRVTVLQASSISAEYADIFCQFNFIHRHDEAFSTEPLKNTGRGPPLGFYHVQNIAVEVTKSFIEYIKSQPIVFEVFGHYQQHPFPPLCKDVLSPLRPSRRHFPRVMPLSKPVPATKLSTLTRPCPGPCHCKYDLLVYFEICELEANGDYIPAVVDHRGGMPCMGTFLLHQGIQRRITVTLLHETGSHIRWKEVRELVVGRIRNTPETDESLIDPNILSLNILSSGYIHPAQDDRTFYQFEAAWDSSMHNSLLLNRVTPYREKIYMTLSAYIEMENCTQPAVVTKDFCMVFYSRDAKLPASRSIRNLFGSGSLRASESNRVTGVYELSLCHVADAGSPGMQRRRRRVLDTSVAYVRGEENLAGWRPRSDSLILDHQWELEKLSLLQEVEKTRHYLLLREKLETAQRPVPEALSPAFSEDSESHGSSSASSPLSAEGRPSPLEAPNERQRELAVKCLRLLTHTFNREYTHSHVCVSASESKLSEMSVTLLRDPSMSPLGVATLTPSSTCPSLVEGRYGATDLRTPQPCSRPASPEPELLPEADSKKLPSPARATETDKEPQRLLVPDIQEIRVSPIVSKKGYLHFLEPHTSGWARRFVVVRRPYAYMYNSDKDTVERFVLNLATAQVEYSEDQQAMLKTPNTFAVCTEHRGILLQAASDKDMHDWLYAFNPLLAGTIRSKLSRRRSAQMRV

SEQ ID NO: 50829 - protein, 1770 aa, Homo sapiens
MSGASVKVAVRVRPFNSRETSKESKCIIQMQGNSTSIINPKNPKEAPKSFSFDYSYWSHTSPEDPCFASQNRVYNDIGKEMLLHAFEGYNVCIFAYGQTGAGKSYTMMGKQEESQAGIIPQLCEELFEKINDNCNEEMSYSVEVSYMEIYCERVRDLLNPKNKGNLRVREHPLLGPYVEDLSKLAVTSYTDIADLMDAGNKARTVAATNMNETSSRSHAVFTIVFTQKKHDNETNLSTEKVSKISLVDLAGSERADSTGAKGTRLKEGANINKSLTTLGKVISALAEVSKKKKKTDFIPYRDSVLTWLLRENLGGNSRTAMVAALSPADINYDETLSTLRYADRAKQIKCNAVINEDPNAKLVRELKEEVTRLKDLLRAQGLGDIIDTSMGSLTSSPSSCSLSSQVGLTSVTSIQERIMSTPGGEEAIERLKESEKIIAELNETWEEKLRKTEAIRMEREALLAEMGVAIREDGGTLGVFSPKKTPHLVNLNEDPLMSECLLYYIKDGITRVGQADAERRQDIVLSGAHIKEEHCIFRSERSNSGEVIVTLEPCERSETYVNGKRVSQPVQLRSGNRIIMGKNHVFRFNHPEQARAEREKTPSAETPSEPVDWTFAQRELLEKQGIDMKQEMEKRLQEMEILYKKEKEEADLLLEQQRLDYESKLQALQKQVETRSLAAETTEEEEEEEEVPWTQHEFELAQWAFRKWKSHQFTSLRDLLWGNAVYLKEANAISVELKKKVQFQFVLLTDTLYSPLPPELLPTEMEKTHEDRPFPRTVVAVEVQDLKNGATHYWSLEKLKQRLDLMREMYDRAGEMASSAQDESETTVTGSDPFYDRFHWFKLVGSSPIFHGCVNERLADRTPSPTFSTADSDITELADEQQDEMEDFDDEAFVDDAGSDAGTEEGSDLFSDGHDPFYDRSPWFILVGRAFVYLSNLLYPVPLIHRVAIVSEKGEVRGFLRVAVQAIAADEEAPDYGSGIRQSGTAKISFDNEYFNQSDFSSVAMTRSGLSLEELRIVEGQGQSSEVITPPEEISRINDLDLKSSTLLDGKMVMEGFSEEIGNHLKLGSAFTFRVTVLQASGILPEYADIFCQFNFLHRHDEAFSTEPLKNNGRGSPLAFYHVQNIAVEITESFVDYIKTKPIVFEVFGHYQQHPLHLQGQELNSPPQPCRRFFPPPMPLSKPVPATKLNTMSKTSLGQSMSKYDLLVWFEISELEPTGEYIPAVVDHTAGLPCQGTFLLHQGIQRRITVTIIHEKGSELHWKDVRELVVGRIRNKPEVDEAAVDAILSLNIISAKYLKSSHNSSRTFYRFEAVWDSSLHNSLLLNRVTPYGEKIYMTLSAYLELDHCIQPAVITKDVCMVFYSRDAKISPPRSLRSLFGSGYSKSPDSNRVTGIYELSLCKMSDTGSPGMQRRRRKILDTSVAYVRGEENLAGWRPRGDSLILEHQWELEKLELLHEVEKTRHFLLLRERLGDSIPKSLSDSLSPSLSSGTLSTSTSISSQISTTTFESAITPSESSGYDSGDIESLVDREKELATKCLQLLTHTFNREFSQVHGSVSDCKLSDISPIGRDPSESSFSSATLTPSSTCPSLVDSRSNSLDQKTPEANSRASSPCPEFEQFQIVPAVETPYLARAGKNEFLNLVPDIEEIRPSSVVSKKGYLHFKEPLYSNWAKHFVVVRRPYVFIYNSDKDPVERGIINLSTAQVEYSEDQQAMVKTPNTFAVCTKHRGVLLQALNDKDMNDWLYAFNPLLAGTIRSKLSRRCPSQSKY

SEQ ID NO: 50830 - protein, 1823 aa, Homo sapiens
MSGASVKVAVRVRPFNSRETSKESKCIIQMQGNSTSIINPKNPKEAPKSFSFDYSYWSHTSPEDPCFASQNRVYNDIGKEMLLHAFEGYNVCIFAYGQTGAGKSYTMMGKQEESQAGIIPQLCEELFEKINDNCNEEMSYSVEVSYMEIYCERVRDLLNPKNKGNLRVREHPLLGPYVEDLSKLAVTSYTDIADLMDAGNKARTVAATNMNETSSRSHAVFTIVFTQKKHDNETNLSTEKVSKISLVDLAGSERADSTGAKGTRLKEGANINKSLTTLGKVISALAEVDTSKKKSKKKKKTDFIPYRDSVLTWLLRENLGGNSRTAMVAALSPADINYDETLSTLRYADRAKQIKCNAVINEDPNAKLVRELKEEVTRLKDLLRAQGLGDIIDIDPLIDDYSGSGSKYLKDFQNNKHRYLLASENQRPGHFSTASMGSLTSSPSSCSLSSQVGLTSVTSIQERIMSTPGGEEAIERLKESEKIIAELNETWEEKLRKTEAIRMEREALLAEMGVAIREDGGTLGVFSPKKTPHLVNLNEDPLMSECLLYYIKDGITRVGQADAERRQDIVLSGAHIKEEHCIFRSERSNSGEVIVTLEPCERSETYVNGKRVSQPVQLRSGNRIIMGKNHVFRFNHPEQARAEREKTPSAETPSEPVDWTFAQRELLEKQGIDMKQEMEKRLQEMEILYKKEKEEADLLLEQQRLDYESKLQALQKQVETRSLAAETTEEEEEEEEVPWTQHEFELAQWAFRKWKSHQFTSLRDLLWGNAVYLKEANAISVELKKKVQFQFVLLTDTLYSPLPPELLPTEMEKTHEDRPFPRTVVAVEVQDLKNGATHYWSLEKLKQRLDLMREMYDRAGEMASSAQDESETTVTGSDPFYDRFHWFKLVGSSPIFHGCVNERLADRTPSPTFSTADSDITELADEQQDEMEDFDDEAFVDDAGSDAGTEEGSDLFSDGHDPFYDRSPWFILVGRAFVYLSNLLYPVPLIHRVAIVSEKGEVRGFLRVAVQAIAADEEAPDYGSGIRQSGTAKISFDNEYFNQSDFSSVAMTRSGLSLEELRIVEGQGQSSEVITPPEEISRINDLDLKSSTLLDGKMVMEGFSEEIGNHLKLGSAFTFRVTVLQASGILPEYADIFCQFNFLHRHDEAFSTEPLKNNGRGSPLAFYHVQNIAVEITESFVDYIKTKPIVFEVFGHYQQHPLHLQGQELNSPPQPCRRFFPPPMPLSKPVPATKLNTMSKTSLGQSMSKYDLLVWFEISELEPTGEYIPAVVDHTAGLPCQGTFLLHQGIQRRITVTIIHEKGSELHWKDVRELVVGRIRNKPEVDEAAVDAILSLNIISAKYLKSSHNSSRTFYRFEAVWDSSLHNSLLLNRVTPYGEKIYMTLSAYLELDHCIQPAVITKDVCMVFYSRDAKISPPRSLRSLFGSGYSKSPDSNRVTGIYELSLCKMSDTGSPGMQRRRRKILDTSVAYVRGEENLAGWRPRGDSLILEHQWELEKLELLHEVEKTRHFLLLRERLGDSIPKSLSDSLSPSLSSGTLSTSTSISSQISTTTFESAITPSESSGYDSGDIESLVDREKELATKCLQLLTHTFNREFSQVHGSVSDCKLSDISPIGRDPSESSFSSATLTPSSTCPSLVDSRSNSLDQKTPEANSRASSPCPEFEQFQIVPAVETPYLARAGKNEFLNLVPDIEEIRPSSVVSKKGYLHFKEPLYSNWAKHFVVVRRPYVFIYNSDKDPVERGIINLSTAQVEYSEDQQAMVKTPNTFAVCTKHRGVLLQALNDKDMNDWLYAFNPLLAGTIRPGHLASEIIREDKSVSFSCQ

SEQ ID NO: 50831 - protein, 1823 aa, Homo sapiens
MSGASVKVAVRVRPFNSRETSKESKCIIQMQGNSTSIINPKNPKEAPKSFSFDYSYWSHTSPEDPCFASQNRVYNDIGKEMLLHAFEGYNVCIFAYGQTGAGKSYTMMGKQEESQAGIIPQLCEELFEKINDNCNEEMSYSVEVSYMEIYCERVRDLLNPKNKGNLRVREHPLLGPYVEDLSKLAVTSYTDIADLMDAGNKARTVAATNMNETSSRSHAVFTIVFTQKKHDNETNLSTEKVSKISLVDLAGSERADSTGAKGTRLKEGANINKSLTTLGKVISALAEVDNCTSKSKKKKKTDFIPYRDSVLTWLLRENLGGNSRTAMVAALSPADINYDETLSTLRYADRAKQIKCNAVINEDPNAKLVRELKEEVTRLKDLLRAQGLGDIIDIDPLIDDYSGSGSKYLKDFQNNKHRYLLASENQRPGHFSTASMGSLTSSPSSCSLSSQVGLTSVTSIQERIMSTPGGEEAIERLKESEKIIAELNETWEEKLRKTEAIRMEREALLAEMGVAIREDGGTLGVFSPKKTPHLVNLNEDPLMSECLLYYIKDGITRVGQADAERRQDIVLSGAHIKEEHCIFRSERSNSGEVIVTLEPCERSETYVNGKRVSQPVQLRSGNRIIMGKNHVFRFNHPEQARAEREKTPSAETPSEPVDWTFAQRELLEKQGIDMKQEMEKRLQEMEILYKKEKEEADLLLEQQRLDYESKLQALQKQVETRSLAAETTEEEEEEEEVPWTQHEFELAQWAFRKWKSHQFTSLRDLLWGNAVYLKEANAISVELKKKVQFQFVLLTDTLYSPLPPELLPTEMEKTHEDRPFPRTVVAVEVQDLKNGATHYWSLEKLKQRLDLMREMYDRAGEMASSAQDESETTVTGSDPFYDRFHWFKLVGSSPIFHGCVNERLADRTPSPTFSTADSDITELADEQQDEMEDFDDEAFVDDAGSDAGTEEGSDLFSDGHDPFYDRSPWFILVGRAFVYLSNLLYPVPLIHRVAIVSEKGEVRGFLRVAVQAIAADEEAPDYGSGIRQSGTAKISFDNEYFNQSDFSSVAMTRSGLSLEELRIVEGQGQSSEVITPPEEISRINDLDLKSSTLLDGKMVMEGFSEEIGNHLKLGSAFTFRVTVLQASGILPEYADIFCQFNFLHRHDEAFSTEPLKNNGRGSPLAFYHVQNIAVEITESFVDYIKTKPIVFEVFGHYQQHPLHLQGQELNSPPQPCRRFFPPPMPLSKPVPATKLNTMSKTSLGQSMSKYDLLVWFEISELEPTGEYIPAVVDHTAGLPCQGTFLLHQGIQRRITVTIIHEKGSELHWKDVRELVVGRIRNKPEVDEAAVDAILSLNIISAKYLKSSHNSSRTFYRFEAVWDSSLHNSLLLNRVTPYGEKIYMTLSAYLELDHCIQPAVITKDVCMVFYSRDAKISPPRSLRSLFGSGYSKSPDSNRVTGIYELSLCKMSDTGSPGMQRRRRKILDTSVAYVRGEENLAGWRPRGDSLILEHQWELEKLELLHEVEKTRHFLLLRERLGDSIPKSLSDSLSPSLSSGTLSTSTSISSQISTTTFESAITPSESSGYDSGDIESLVDREKELATKCLQLLTHTFNREFSQVHGSVSDCKLSDISPIGRDPSESSFSSATLTPSSTCPSLVDSRSNSLDQKTPEANSRASSPCPEFEQFQIVPAVETPYLARAGKNEFLNLVPDIEEIRPSSVVSKKGYLHFKEPLYSNWAKHFVVVRRPYVFIYNSDKDPVERGIINLSTAQVEYSEDQQAMVKTPNTFAVCTKHRGVLLQALNDKDMNDWLYAFNPLLAGTIRPGHLASEIIREDKSVSFSCQ

SEQ ID NO: 50832 - protein, 1153 aa, Homo sapiens
MSGASVKVAVRVRPFNSRETSKESKCIIQMQGNSTSIINPKNPKEAPKSFSFDYSYWSHTSPEDPCFASQNRVYNDIGKEMLLHAFEGYNVCIFAYGQTGAGKSYTMMGKQEESQAGIIPQLCEELFEKINDNCNEEMSYSVEVSYMEIYCERVRDLLNPKNKGNLRVREHPLLGPYVEDLSKLAVTSYTDIADLMDAGNKARTVAATNMNETSSRSHAVFTIVFTQKKHDNETNLSTEKVSKISLVDLAGSERADSTGAKGTRLKEGANINKSLTTLGKVISALAEVSKKKKKTDFIPYRDSVLTWLLRENLGGNSRTAMVAALSPADINYDETLSTLRYADRAKQIKCNAVINEDPNAKLVRELKEEVTRLKDLLRAQGLGDIIDTSMGSLTSSPSSCSLSSQVGLTSVTSIQERIMSTPGGEEAIERLKESEKIIAELNETWEEKLRKTEAIRMEREALLAEMGVAIREDGGTLGVFSPKKTPHLVNLNEDPLMSECLLYYIKDGITRVGQADAERRQDIVLSGAHIKEEHCIFRSERSNSGEVIVTLEPCERSETYVNGKRVSQPVQLRSGNRIIMGKNHVFRFNHPEQARAEREKTPSAETPSEPVDWTFAQRELLEKQGIDMKQEMEKRLQEMEILYKKEKEEADLLLEQQRLDADSDSGDDSDKRSCEESWKLITSLREKLPPSKLQTIVKKCGLPSSGKKREPIKMYQIPQRRRLSKDSKWVTISDLKIQAVKEICYEVALNDFRHSRQEIEALAIVKMKELCAMYGKKDPNERDSWRAVARDVWDTVGVGDEKIEDVMATGKGSTDVDDLKVHIDKLEDILQEVKKQNNMKDEEIKVLRNKMLKMEKVLPLIGSQEQKSPGSHKAKEPVGAGVSSTSENNVSKGDNGELAKEERVSQLMNGDPAFRRGRLRWMRQEQIRFKNLQQQEITKQLRRQNVPHRFIPPENRKPRFPFKSNPKHRNSWSPGTHIIITEDEVIELRIPKDDEARKGNKEESQEKGGKGAFKDPQFPWGSQGMRSQDHIQVSKQHINNQQQPPQLRWRSNSLNNGQPKSTRCQASASAESLNSHSGHPTADVQTFQAKRHIHQHRQSYCNYNTGGQLEGNAATSYQKQTDKPSHCSQFVTPPRMRRQFSAPNLKAGRETTV

SEQ ID NO: 50833 - protein, 1816 aa, Homo sapiens
MSGASVKVAVRVRPFNSRETSKESKCIIQMQGNSTSIINPKNPKEAPKSFSFDYSYWSHTSPEDPCFASQNRVYNDIGKEMLLHAFEGYNVCIFAYGQTGAGKSYTMMGKQEESQAGIIPQLCEELFEKINDNCNEEMSYSVEVSYMEIYCERVRDLLNPKNKGNLRVREHPLLGPYVEDLSKLAVTSYTDIADLMDAGNKARTVAATNMNETSSRSHAVFTIVFTQKKHDNETNLSTEKVSKISLVDLAGSERADSTGAKGTRLKEGANINKSLTTLGKVISALAEVDNCTSKSKKKKKTDFIPYRDSVLTWLLRENLGGNSRTAMVAALSPADINYDETLSTLRYADRAKQIKCNAVINEDPNAKLVRELKEEVTRLKDLLRAQGLGDIIDIDPLIDDYSGSGSKYLKDFQNNKHRYLLASENQRPGHFSTASMGSLTSSPSSCSLSSQVGLTSVTSIQERIMSTPGGEEAIERLKESEKIIAELNETWEEKLRKTEAIRMEREALLAEMGVAIREDGGTLGVFSPKKTPHLVNLNEDPLMSECLLYYIKDGITRVGQADAERRQDIVLSGAHIKEEHCIFRSERSNSGEVIVTLEPCERSETYVNGKRVSQPVQLRSGNRIIMGKNHVFRFNHPEQARAEREKTPSAETPSEPVDWTFAQRELLEKQGIDMKQEMEKRLQEMEILYKKEKEEADLLLEQQRLDYESKLQALQKQVETRSLAAETTEEEEEEEEVPWTQHEFELAQWAFRKWKSHQFTSLRDLLWGNAVYLKEANAISVELKKKVQFQFVLLTDTLYSPLPPELLPTEMEKTHEDRPFPRTVVAVEVQDLKNGATHYWSLEKLKQRLDLMREMYDRAGEMASSAQDESETTVTGSDPFYDRFHWFKLVGSSPIFHGCVNERLADRTPSPTFSTADSDITELADEQQDEMEDFDDEAFVDDAGSDAGTEEGSDLFSDGHDPFYDRSPWFILVGRAFVYLSNLLYPVPLIHRVAIVSEKGEVRGFLRVAVQAIAADEEAPDYGSGIRQSGTAKISFDNEYFNQSDFSSVAMTRSGLSLEELRIVEGQGQSSEVITPPEEISRINDLDLKSSTLLDGKMVMEGFSEEIGNHLKLGSAFTFRVTVLQASGILPEYADIFCQFNFLHRHDEAFSTEPLKNNGRGSPLAFYHVQNIAVEITESFVDYIKTKPIVFEVFGHYQQHPLHLQGQELNSPPQPCRRFFPPPMPLSKPVPATKLNTMSKTSLGQSMSKYDLLVWFEISELEPTGEYIPAVVDHTAGLPCQGTFLLHQGIQRRITVTIIHEKGSELHWKDVRELVVGRIRNKPEVDEAAVDAILSLNIISAKYLKSSHNSSRTFYRFEAVWDSSLHNSLLLNRVTPYGEKIYMTLSAYLELDHCIQPAVITKDVCMVFYSRDAKISPPRSLRSLFGSGYSKSPDSNRVTGIYELSLCKMSDTGSPGMQRRRRKILDTSVAYVRGEENLAGWRPRGDSLILEHQWELEKLELLHEVEKTRHFLLLRERLGDSIPKSLSDSLSPSLSSGTLSTSTSISSQISTTTFESAITPSESSGYDSGDIESLVDREKELATKCLQLLTHTFNREFSQVHGSVSDCKLSDISPIGRDPSESSFSSATLTPSSTCPSLVDSRSNSLDQKTPEANSRASSPCPEFEQFQIVPAVETPYLARAGKNEFLNLVPDIEEIRPSSVVSKKGYLHFKEPLYSNWAKHFVVVRRPYVFIYNSDKDPVERGIINLSTAQVEYSEDQQAMVKTPNTFAVCTKHRGVLLQALNDKDMNDWLYAFNPLLAGTIRSKLSRRCPSQSKY

SEQ ID NO: 50834 - protein, 1153 aa, Homo sapiens; identical to SEQ ID NO: 50832

SEQ ID NO: 50835 - protein, 890 aa, Homo sapiens
MSQGILSPPAGLLSDDDVVVSPMFESTAADLGSVVRKNLLSDCSVVSTSLEDKQQVPSEDSMEKVKVYLRVRPLLPSELERQEDQGCVRIENVETLVLQAPKDSFALKSNERGIGQATHRFTFSQIFGPEVGQASFFNLTVKEMVKDVLKGQNWLIYTYGVTNSGKTHTIQGTIKDGGILPRSLALIFNSLQGQLHPTPDLKPLLSNEVIWLDSKQIRQEEMKKLSLLNGGLQEEELSTSLKRSVYIESRIGTSTSFDSGIAGLSSISQCTSSSQLDETSHRWAQPDTAPLPVPANIRFSIWISFFEIYNELLYDLLEPPSQQRKRQTLRLCEDQNGNPYVKDLNWIHVQDAEEAWKLLKVGRKNQSFASTHLNQNSSRSHSIFSIRILHLQGEGDIVPKISELSLCDLAGSERCKDQKSGERLKEAGNINTSLHTLGRCIAALRQNQQNRSKQNLVPFRDSKLTRVFQGFFTGRGRSCMIVNVNPCASTYDETLHVAKFSAIASQLVHAPPMQLGFPSLHSFIKEHSLQVSPSLEKGAKADTGLDDDIENEADISMYGKEELLQVVEAMKTLLLKERQEKLQLEMHLRDEICNEMVEQMQQREQWCSEHLDTQKELLEEMYEEKLNILKESLTSFYQEEIQERDEKIEELEALLQEARQQSVAHQQSGSELALRRSQRLAASASTQQLQEVKAKLQQCKAELNSTTEELHKYQKMLEPPPSAKPFTIDVDKKLEEGQKNIRLLRTELQKLGESLQSAERACCHSTGAGKLRQALTTCDDILIKQDQTLAELQNNMVLVKLDLRKKAACIAEQYHTVLKLQGQVSAKKRLGTNQENQQPNQQPPGKKPFLRNLLPRTPTCQSSTDCSPYARILRSRRSPLLKSGPFGKKY

SEQ ID NO: 50836 - protein, 225 aa, Homo sapiens
MSQGILSPPAGLLSDDDVVVSPMFESTAADLGSVVRKNLLSDCSVVSTSLEDKQQVPSEDSMEKVKVYLRVRPLLPSELERQEDQGCVRIENVETLVLQAPKDSFALKSNERGIGQATHRFTFSQIFGPEVGQASFFNLTVKEMVKDVLKGQNWLIYTYGVTNSGKTHTIQGTIKDGGILPRSLALIFNSLQGQLHPTPDLKPLLSNEVIWLDSKQIRQEEMKKL

SEQ ID NO: 50837 - protein, 872 aa, Homo sapiens
MSQGILSPPAGLLSDDDVVVSPMFESTAADLGSVVRKNLLSDCSVVSTSLEDKQQVPSEDSMEKEDQGCVRIENVETLVLQAPKDSFALKSNERGIGQATHRFTFSQIFGPEVGQASFFNLTVKEMVKDVLKGQNWLIYTYGVTNSGKTHTIQGTIKDGGILPRSLALIFNSLQGQLHPTPDLKPLLSNEVIWLDSKQIRQEEMKKLSLLNGGLQEEELSTSLKRSVYIESRIGTSTSFDSGIAGLSSISQCTSSSQLDETSHRWAQPDTAPLPVPANIRFSIWISFFEIYNELLYDLLEPPSQQRKRQTLRLCEDQNGNPYVKDLNWIHVQDAEEAWKLLKVGRKNQSFASTHLNQNSSRSHSIFSIRILHLQGEGDIVPKISELSLCDLAGSERCKDQKSGERLKEAGNINTSLHTLGRCIAALRQNQQNRSKQNLVPFRDSKLTRVFQGFFTGRGRSCMIVNVNPCASTYDETLHVAKFSAIASQLVHAPPMQLGFPSLHSFIKEHSLQVSPSLEKGAKADTGLDDDIENEADISMYGKEELLQVVEAMKTLLLKERQEKLQLEMHLRDEICNEMVEQMQQREQWCSEHLDTQKELLEEMYEEKLNILKESLTSFYQEEIQERDEKIEELEALLQEARQQSVAHQQSGSELALRRSQRLAASASTQQLQEVKAKLQQCKAELNSTTEELHKYQKMLEPPPSAKPFTIDVDKKLEEGQKNIRLLRTELQKLGESLQSAERACCHSTGAGKLRQALTTCDDILIKQDQTLAELQNNMVLVKLDLRKKAACIAEQYHTVLKLQGQVSAKKRLGTNQENQQPNQQPPGKKPFLRNLLPRTPTCQSSTDCSPYARILRSRRSPLLKSGPFGKKY

SEQ ID NO: 50838 - protein, 159 aa, Homo sapiens
MSQGILSPPAGLLSDDDVVVSPMFESTAADLGSVVRKNLLSDCSVVSTSLEDKQQVPSEDSMEKVKVYLRVRPLLPSELERQEDQGCVRIENVETLVLQAPKDSFALKSNERGIGQATHRFTFSQIFGPEVGQASFFNLTVKEMVKDVLKGQNWLIYTY

SEQ ID NO: 50839 - protein, 1627 aa, Homo sapiens
MLGAPDESSVRVAVRIRPQLAKEKIEGCHICTSVTPGEPQVFLGKDKAFTFDYVFDIDSQQEQIYIQCIEKLIEGCFEGYNATVFAYGQTGAGKTYTMGTGFDVNIVEEELGIISRAVKHLFKSIEEKKHIAIKNGLPAPDFKVNAQFLELYNEEVLDLFDTTRDIDAKSKKSNIRIHEDSTGGIYTVGVTTRTVNTESEMMQCLKLGALSRTTASTQMNVQSSRSHAIFTIHVCQTRVCPQIDADNATDNKIISESAQMNEFETLTAKFHFVDLAGSERLKRTGATGERAKEGISINCGLLALGNVISALGDKSKRATHVPYRDSKLTRLLQDSLGGNSQTIMIACVSPSDRDFMETLNTLKYANRARNIKNKVMVNQDRASQQINALRSEITRLQMELMEYKTGKRIIDEEGVESINDMFHENAMLQTENNNLRVRIKAMQETVDALRSRITQLVSDQANHVLARAGEGNEEISNMIHSYIKEIEDLRAKLLESEAVNENLRKNLTRATARAPYFSGSSTFSPTILSSDKETIEIIDLAKKDLEKLKRKEKRKKKRLQKLEESNREERSVAGKEDNTDTDQEKKEEKGVSERENNELEVEESQEVSDHEDEEEEEEEEEDDIDGGESSDESDSESDEKANYQADLANITCEIAIKQKLIDELENSQKRLQTLKKQYEEKLMMLQHKIRDTQLERDQVLQNLGSVESYSEEKAKKVRSEYEKKLQAMNKELQRLQAAQKEHARLLKNQSQYEKQLKKLQQDVMEMKKTKVRLMKQMKEEQEKARLTESRRNREIAQLKKDQRKRDHQLRLLEAQKRNQEVVLRRKTEEVTALRRQVRPMSDKVAGKVTRKLSSSDAPAQDTGSSAAAVETDASRTGAQQKMRIPVARVQALPTPATNGNRKKYQRKGLTGRVFISKTARMKWQLLERRVTDIIMQKMTISNMEADMNRLLKQREELTKRREKLSKRREKIVKENGEGDKNVANINEEMESLTANIDYINDSISDCQANIMQMEEAKEEGETLDVTAVINACTLTEARYLLDHFLSMGINKGLQAAQKEAQIKVLEGRLKQTEITSATQNQLLFHMLKEKAELNPELDALLGHALQDFKHFFVENVEDSTDEDAPLNSPGSEGSTLSSDLMKLCGEVKPKNKARRRTTTQMELLYADSSELASDTSTGDASLPGPLTPVAEGQEIGMNTETSGTSAREKELSPPPGLPSKIGSISRQSSLSEKKIPEPSPVTRRKAYEKAEKSKAKEQKQSDESDSSLSEVHRGIINPFPASKGIRAFPLQCIHIAEGHTKAVLCVDSTDDLLFTGSKDRTCKVWNLVTGQEIMSLGGHPNNVVSVKYCNYTSLVFTVSTSYIKVWDIRDSAKCIRTLTSSGQVTLGDACSASTSRTVAIPSGENQINQIALNPTGTFLYAASGNAVRMWDLKRFQSTGKLTGHLGPVMCLTVDQISSGQDLIITGSKDHYIKMFDVTEGALGTVSPTHNFEPPHYDGIEALTIQGDNLFSGSRDNGIKKWDLTQKDLLQQVPNAHKDWVCALGVVPDHPVLLSGCRGGILKVWNMDTFMPVGEMKGHDSPINAICVNSTHIFTAADDRTVRIWKARNLQDGQISDTGDLGEDIASN

SEQ ID NO: 50840 - protein, 1674 aa, Homo sapiens
MLGAPDESSVRVAVRIRPQLAKEKIEGCHICTSVTPGEPQVFLGKDKAFTFDYVFDIDSQQEQIYIQCIEKLIEGCFEGYNATVFAYGQTGAGKTYTMGTGFDVNIVEEELGIISRAVKHLFKSIEEKKHIAIKNGLPAPDFKVNAQFLELYNEEVLDLFDTTRDIDAKSKKSNIRIHEDSTGGIYTVGVTTRTVNTESEMMQCLKLGALSRTTASTQMNVQSSRSHAIFTIHVCQTRVCPQIDADNATDNKIISESAQMNEFETLTAKFHFVDLAGSERLKRTGATGERAKEGISINCGLLALGNVISALGDKSKRATHVPYRDSKLTRLLQDSLGGNSQTIMIACVSPSDRDFMETLNTLKYANRARNIKNKVMVNQDRASQQINALRSEITRLQMELMEYKTGKRIIDEEGVESINDMFHENAMLQTENNNLRVRIKAMQETVDALRSRITQLVSDQANHVLARAGEGNEEISNMIHSYIKEIEDLRAKLLESEAVNENLRKNLTRATARAPYFSGSSTFSPTILSSDKETIEIIDLAKKDLEKLKRKEKRKKKRLQKLEESNREERSVAGKEDNTDTDQEKKEEKGVSERENNELEVEESQEVSDHEDEEEEEEEEEDDIDGGESSDESDSESDEKANYQADLANITCEIAIKQKLIDELENSQKRLQTLKKQYEEKLMMLQHKIRDTQLERDQVLQNLGSVESYSEEKAKKVRSEYEKKLQAMNKELQRLQAAQKEHARLLKNQSQYEKQLKKLQQDVMEMKKTKVRLMKQMKEEQEKARLTESRRNREIAQLKKDQRKRDHQLRLLEAQKRNQEVVLRRKTEEVTALRRQVRPMSDKVAGKVTRKLSSSDAPAQDTGSSAAAVETDASRTGAQQKMRIPVARVQALPTPATNGNRKKYQRKGLTGRVFISKTARMKWQLLERRVTDIIMQKMTISNMEADMNRLLKQREELTKRREKLSKRREKIVKENGEGDKNVANINEEMESLTANIDYINDSISDCQANIMQMEEAKEEGETLDVTAVINACTLTEARYLLDHFLSMGINKGLQAAQKEAQIKVLEGRLKQTEITSATQNQLLFHMLKEKAELNPELDALLGHALQDLDSVPLENVEDSTDEDAPLNSPGSEGSTLSSDLMKLCGEVKPKNKARRRTTTQMELLYADSSELASDTSTGDASLPGPLTPVAEGQEIGMNTETSGTSAREKELSPPPGLPSKIGSISRQSSLSEKKIPEPSPVTRRKAYEKAEKSKAKEQKHSDSGTSEASLSPPSSPPSRPRNELNVFNRLTVSQGNTSVQQDKSDESDSSLSEVHRSSRRGIINPFPASKGIRAFPLQCIHIAEGHTKAVLCVDSTDDLLFTGSKDRTCKVWNLVTGQEIMSLGGHPNNVVSVKYCNYTSLVFTVSTSYIKVWDIRDSAKCIRTLTSSGQVTLGDACSASTSRTVAIPSGENQINQIALNPTGTFLYAASGNAVRMWDLKRFQSTGKLTGHLGPVMCLTVDQISSGQDLIITGSKDHYIKMFDVTEGALGTVSPTHNFEPPHYDGIEALTIQGDNLFSGSRDNGIKKWDLTQKDLLQQVPNAHKDWVCALGVVPDHPVLLSGCRGGILKVWNMDTFMPVGEMKGHDSPINAICVNSTHIFTAADDRTVRIWKARNLQDGQISDTGDLGEDIASN

SEQ ID NO: 50841 - protein, 1661 aa, Homo sapiens
MLGAPDESSVRVAVRIRPQLAKEKIEGCHICTSVTPGEPQVFLGKDKAFTFDYVFDIDSQQEQIYIQCIEKLIEGCFEGYNATVFAYGQTGAGKTYTMGTGFDVNIVEEELGIISRAVKHLFKSIEEKKHIAIKNGLPAPDFKVNAQFLELYNEEVLDLFDTTRDIDAKSKKSNIRIHEDSTGGIYTVGVTTRTVNTESEMMQCLKLGALSRTTASTQMNVQSSRSHAIFTIHVCQTRVCPQIDADNATDNKIISESAQMNEFETLTAKFHFVDLAGSERLKRTGATGERAKEGISINCGLLALGNVISALGDKSKRATHVPYRDSKLTRLLQDSLGGNSQTIMIACVSPSDRDFMETLNTLKYANRARNIKNKVMVNQDRASQQINALRSEITRLQMELMEYKTGKRIIDEEGVESINDMFHENAMLQTENNNLRVRIKAMQETVDALRSRITQLVSDQANHVLARAGEGNEEISNMIHSYIKEIEDLRAKLLESEAVNENLRKNLTRATARAPYFSGSSTFSPTILSSDKETIEIIDLAKKDLEKLKRKEKRKKKSVAGKEDNTDTDQEKKEEKGVSERENNELEVEESQEVSDHEDEEEEEEEEEDDIDGGESSDESDSESDEKANYQADLANITCEIAIKQKLIDELENSQKRLQTLKKQYEEKLMMLQHKIRDTQLERDQVLQNLGSVESYSEEKAKKVRSEYEKKLQAMNKELQRLQAAQKEHARLLKNQSQYEKQLKKLQQDVMEMKKTKVRLMKQMKEEQEKARLTESRRNREIAQLKKDQRKRDHQLRLLEAQKRNQEVVLRRKTEEVTALRRQVRPMSDKVAGKVTRKLSSSDAPAQDTGSSAAAVETDASRTGAQQKMRIPVARVQALPTPATNGNRKKYQRKGLTGRVFISKTARMKWQLLERRVTDIIMQKMTISNMEADMNRLLKQREELTKRREKLSKRREKIVKENGEGDKNVANINEEMESLTANIDYINDSISDCQANIMQMEEAKEEGETLDVTAVINACTLTEARYLLDHFLSMGINKGLQAAQKEAQIKVLEGRLKQTEITSATQNQLLFHMLKEKAELNPELDALLGHALQDLDSVPLENVEDSTDEDAPLNSPGSEGSTLSSDLMKLCGEVKPKNKARRRTTTQMELLYADSSELASDTSTGDASLPGPLTPVAEGQEIGMNTETSGTSAREKELSPPPGLPSKIGSISRQSSLSEKKIPEPSPVTRRKAYEKAEKSKAKEQKHSDSGTSEASLSPPSSPPSRPRNELNVFNRLTVSQGNTSVQQDKSDESDSSLSEVHRSSRRGIINPFPASKGIRAFPLQCIHIAEGHTKAVLCVDSTDDLLFTGSKDRTCKVWNLVTGQEIMSLGGHPNNVVSVKYCNYTSLVFTVSTSYIKVWDIRDSAKCIRTLTSSGQVTLGDACSASTSRTVAIPSGENQINQIALNPTGTFLYAASGNAVRMWDLKRFQSTGKLTGHLGPVMCLTVDQISSGQDLIITGSKDHYIKMFDVTEGALGTVSPTHNFEPPHYDGIEALTIQGDNLFSGSRDNGIKKWDLTQKDLLQQVPNAHKDWVCALGVVPDHPVLLSGCRGGILKVWNMDTFMPVGEMKGHDSPINAICVNSTHIFTAADDRTVRIWKARNLQDGQISDTGDLGEDIASN

SEQ ID NO: 50842 - protein, 1675 aa, Homo sapiens
MLGAPDESSVRVAVRIRPQLAKEKIEGCHICTSVTPGEPQVFLGKDKAFTFDYVFDIDSQQEQIYIQCIEKLIEGCFEGYNATVFAYGQTGAGKTYTMGTGFDVNIVEEELGIISRAVKHLFKSIEEKKHIAIKNGLPAPDFKVNAQFLELYNEEVLDLFDTTRDIDAKSKKSNIRIHEDSTGGIYTVGVTTRTVNTESEMMQCLKLGALSRTTASTQMNVQSSRSHAIFTIHVCQTRVCPQIDADNATDNKIISESAQMNEFETLTAKFHFVDLAGSERLKRTGATGERAKEGISINCGLLALGNVISALGDKSKRATHVPYRDSKLTRLLQDSLGGNSQTIMIACVSPSDRDFMETLNTLKYANRARNIKNKVMVNQDRASQQINALRSEITRLQMELMEYKTGKRIIDEEGVESINDMFHENAMLQTENNNLRVRIKAMQETVDALRSRITQLVSDQANHVLARAGEGNEEISNMIHSYIKEIEDLRAKLLESEAVNENLRKNLTRATARAPYFSGSSTFSPTILSSDKETIEIIDLAKKDLEKLKRKEKRKKKRLQKLEESNREERSVAGKEDNTDTDQEKKEEKGVSERENNELEVEESQEVSDHEDEEEEEEEEEDDIDGGESSDESDSESDEKANYQADLANITCEIAIKQKLIDELENSQKRLQTLKKQYEEKLMMLQHKIRDTQLERDQVLQNLGSVESYSEEKAKKVRSEYEKKLQAMNKELQRLQAAQKEHARLLKNQSQYEKQLKKLQQDVMEMKKTKVRLMKQMKEEQEKARLTESRRNREIAQLKKDQRKRDHQLRLLEAQKRNQEVVLRRKTEEVTALRRQVRPMSDKVAGKVTRKLSSSDAPAQDTGSSAAAVETDASRTGAQQKMRIPVARVQALPTPATNGNRKKYQRKGLTGRVFISKTARMKWQLLERRVTDIIMQKMTISNMEADMNRLLKQREELTKRREKLSKRREKIVKENGEGDKNVANINEEMESLTANIDYINDSISDCQANIMQMEEAKEEGETLDVTAVINACTLTEARYLLDHFLSMGINKGLQAAQKEAQIKVLEGRLKQTEITSATQNQLLFHMLKEKAELNPELDALLGHALQDFKHFFVENVEDSTDEDAPLNSPGSEGSTLSSDLMKLCGEVKPKNKARRRTTTQMELLYADSSELASDTSTGDASLPGPLTPVAEGQEIGMNTETSGTSAREKELSPPPGLPSKIGSISRQSSLSEKKIPEPSPVTRRKAYEKAEKSKAKEQKHSDSGTSEASLSPPSSPPSRPRNELNVFNRLTVSQGNTSVQQDKSDESDSSLSEVHRNSNLRGIINPFPASKGIRAFPLQCIHIAEGHTKAVLCVDSTDDLLFTGSKDRTCKVWNLVTGQEIMSLGGHPNNVVSVKYCNYTSLVFTVSTSYIKVWDIRDSAKCIRTLTSSGQVTLGDACSASTSRTVAIPSGENQINQIALNPTGTFLYAASGNAVRMWDLKRFQSTGKLTGHLGPVMCLTVDQISSGQDLIITGSKDHYIKMFDVTEGALGTVSPTHNFEPPHYDGIEALTIQGDNLFSGSRDNGIKKWDLTQKDLLQQVPNAHKDWVCALGVVPDHPVLLSGCRGGILKVWNMDTFMPVGEMKGHDSPINAICVNSTHIFTAADDRTVRIWKARNLQDGQISDTGDLGEDIASN

SEQ ID NO: 50843 - protein, 1621 aa, Homo sapiens
MLGAPDESSVRVAVRIRPQLAKEKIEGCHICTSVTPGEPQVFLGKDKAFTFDYVFDIDSQQEQIYIQCIEKLIEGCFEGYNATVFAYGQTGAGKTYTMGTGFDVNIVEEELGIISRAVKHLFKSIEEKKHIAIKNGLPAPDFKVNAQFLELYNEEVLDLFDTTRDIDAKSKKSNIRIHEDSTGGIYTVGVTTRTVNTESEMMQCLKLGALSRTTASTQMNVQSSRSHAIFTIHVCQTRVCPQIDADNATDNKIISESAQMNEFETLTAKFHFVDLAGSERLKRTGATGERAKEGISINCGLLALGNVISALGDKSKRATHVPYRDSKLTRLLQDSLGGNSQTIMIACVSPSDRDFMETLNTLKYANRARNIKNKVMVNQDRASQQINALRSEITRLQMELMEYKTGKRIIDEEGVESINDMFHENAMLQTENNNLRVRIKAMQETVDALRSRITQLVSDQANHVLARAGEGNEEISNMIHSYIKEIEDLRAKLLESEAVNENLRKNLTRATARAPYFSGSSTFSPTILSSDKETIEIIDLAKKDLEKLKRKEKRKKKSVAGKEDNTDTDQEKKEEKGVSERENNELEVEESQEVSDHEDEEEEEEEEEDDIDGGESSDESDSESDEKANYQADLANITCEIAIKQKLIDELENSQKRLQTLKKQYEEKLMMLQHKIRDTQLERDQVLQNLGSVESYSEEKAKKVRSEYEKKLQAMNKELQRLQAAQKEHARLLKNQSQYEKQLKKLQQDVMEMKKTKVRLMKQMKEEQEKARLTESRRNREIAQLKKDQRKRDVTALRRQVRPMSDKVAGKVTRKLSSSDAPAQDTGSSAAAVETDASRTGAQQKMRIPVARVQALPTPATNGNRKKYQRKGLTGRVFISKTARMKWQLLERRVTDIIMQKMTISNMEADMNRLLKQREELTKRREKLSKRREKIVKENGEGDKNVANINEEMESLTANIDYINDSISDCQANIMQMEEAKEEGETLDVTAVINACTLTEARYLLDHFLSMGINKGLQAAQKEAQIKVLEGRLKQTEITSATQNQLLFHMLKEKAELNPELDALLGHALQDLDSVPLENVEDSTDEDAPLNSPGSEGSTLSSDLMKLCGEVKPKNKARRRTTTQMELLYADSSELASDTSTGDASLPGPLTPVAEGQEIGMNTETSGTSAREKELSPPPGLPSKIGSISRQSSLSEKKIPEPSPVTRRKAYEKAEKSKAKEQKHSDSGTSEASLSPPSSPPSRPRNELNVFNRLTVSQGNTSVQQDKGIINPFPASKGIRAFPLQCIHIAEGHTKAVLCVDSTDDLLFTGSKDRTCKVWNLVTGQEIMSLGGHPNNVVSVKYCNYTSLVFTVSTSYIKVWDIRDSAKCIRTLTSSGQVTLGDACSASTSRTVAIPSGENQINQIALNPTGTFLYAASGNAVRMWDLKRFQSTGKLTGHLGPVMCLTVDQISSGQDLIITGSKDHYIKMFDVTEGALGTVSPTHNFEPPHYDGIEALTIQGDNLFSGSRDNGIKKWDLTQKDLLQQVPNAHKDWVCALGVVPDHPVLLSGCRGGILKVWNMDTFMPVGEMKGHDSPINAICVNSTHIFTAADDRTVRIWKARNLQDGQISDTGDLGEDIASN

SEQ ID NO: 50844 - protein, 1637 aa, Homo sapiens
MLGAPDESSVRVAVRIRPQLAKEKIEGCHICTSVTPGEPQVFLGKDKAFTFDYVFDIDSQQEQIYIQCIEKLIEGCFEGYNATVFAYGQTGAGKTYTMGTGFDVNIVEEELGIISRAVKHLFKSIEEKKHIAIKNGLPAPDFKVNAQFLELYNEEVLDLFDTTRDIDAKSKKSNIRIHEDSTGGIYTVGVTTRTVNTESEMMQCLKLGALSRTTASTQMNVQSSRSHAIFTIHVCQTRVCPQIDADNATDNKIISESAQMNEFETLTAKFHFVDLAGSERLKRTGATGERAKEGISINCGLLALGNVISALGDKSKRATHVPYRDSKLTRLLQDSLGGNSQTIMIACVSPSDRDFMETLNTLKYANRARNIKNKVMVNQDRASQQINALRSEITRLQMELMEYKTGKRIIDEEGVESINDMFHENAMLQTENNNLRVRIKAMQETVDALRSRITQLVSDQANHVLARAGEGNEEISNMIHSYIKEIEDLRAKLLESEAVNENLRKNLTRATARAPYFSGSSTFSPTILSSDKETIEIIDLAKKDLEKLKRKEKRKKKSVAGKEDNTDTDQEKKEEKGVSERENNELEVEESQEVSDHEDEEEEEEEEEDDIDGGESSDESDSESDEKANYQADLANITCEIAIKQKLIDELENSQKRLQTLKKQYEEKLMMLQHKIRDTQLERDQVLQNLGSVESYSEEKAKKVRSEYEKKLQAMNKELQRLQAAQKEHARLLKNQSQYEKQLKKLQQDVMEMKKTKVRLMKQMKEEQEKARLTESRRNREIAQLKKDQRKRDHQLRLLEAQKRNQEVVLRRKTEEVTALRRQVRPMSDKVAGKVTRKLSSSDAPAQDTGSSAAAVETDASRTGAQQKMRIPVARVQALPTPATNGNRKKYQRKGLTGRVFISKTARMKWQLLERRVTDIIMQKMTISNMEADMNRLLKQREELTKRREKLSKRREKIVKENGEGDKNVANINEEMESLTANIDYINDSISDCQANIMQMEEAKEEGETLDVTAVINACTLTEARYLLDHFLSMGINKGLQAAQKEAQIKVLEGRLKQTEITSATQNQLLFHMLKEKAELNPELDALLGHALQENVEDSTDEDAPLNSPGSEGSTLSSDLMKLCGEVKPKNKARRRTTTQMELLYADSSELASDTSTGDASLPGPLTPVAEGQEIGMNTETSGTSAREKELSPPPGLPSKIGSISRQSSLSEKKIPEPSPVTRRKAYEKAEKSKAKEQKHSDSGTSEASLSPPSSPPSRPRNELNVFNRLTVSQGNTSVQQDKGIINPFPASKGIRAFPLQCIHIAEGHTKAVLCVDSTDDLLFTGSKDRTCKVWNLVTGQEIMSLGGHPNNVVSVKYCNYTSLVFTVSTSYIKVWDIRDSAKCIRTLTSSGQVTLGDACSASTSRTVAIPSGENQINQIALNPTGTFLYAASGNAVRMWDLKRFQSTGKLTGHLGPVMCLTVDQISSGQDLIITGSKDHYIKMFDVTEGALGTVSPTHNFEPPHYDGIEALTIQGDNLFSGSRDNGIKKWDLTQKDLLQQVPNAHKDWVCALGVVPDHPVLLSGCRGGILKVWNMDTFMPVGEMKGHDSPINAICVNSTHIFTAADDRTVRIWKARNLQDGQISDTGDLGEDIASN

SEQ ID NO: 50845 - protein, 661 aa, Homo sapiens
MNRLLKQREELTKRREKLSKRREKIVKENGEGDKNVANINEEMESLTANIDYINDSISDCQANIMQMEEAKEEGETLDVTAVINACTLTEARYLLDHFLSMGINKGLQAAQKEAQIKVLEGRLKQTEITSATQNQLLFHMLKEKAELNPELDALLGHALQENVEDSTDEDAPLNSPGSEGSTLSSDLMKLCGEVKPKNKARRRTTTQMELLYADSSELASDTSTGDASLPGPLTPVAEGQEIGMNTETSGTSAREKELSPPPGLPSKIGSISRQSSLSEKKIPEPSPVTRRKAYEKAEKSKAKEQKQGIINPFPASKGIRAFPLQCIHIAEGHTKAVLCVDSTDDLLFTGSKDRTCKVWNLVTGQEIMSLGGHPNNVVSVKYCNYTSLVFTVSTSYIKVWDIRDSAKCIRTLTSSGQVTLGDACSASTSRTVAIPSGENQINQIALNPTGTFLYAASGNAVRMWDLKRFQSTGKLTGHLGPVMCLTVDQISSGQDLIITGSKDHYIKMFDVTEGALGTVSPTHNFEPPHYDGIEALTIQGDNLFSGSRDNGIKKWDLTQKDLLQQVPNAHKDWVCALGVVPDHPVLLSGCRGGILKVWNMDTFMPVGEMKGHDSPINAICVNSTHIFTAADDRTVRIWKARNLQDGQISDTGDLGEDIASN

SEQ ID NO: 50846 - protein, 1624 aa, Homo sapiens
MAGQGDCCVKVAVRIRPQLSKEKIEGCHICTSVTPGEPQVLLGKDKAFTYDFVFDLDTWQEQIYSTCVSKLIEGCFEGYNATVLAYGQTGAGKTYTMGTGFDMATSEEEQGIIPRAIAHLFGGIAERKRRAQEQGVAGPEFKVSAQFLELYNEEILDLFDSTRDPDTRHRRSNIKIHEDANGGIYTTGVTSRLIHSQEELIQCLKQGALSRTTASTQMNVQSSRSHAIFTIHLCQMRMCTQPDLVNEAVTGLPDGTPPSSEYETLTAKFHFVDLAGSERLKRTGATGERAKEGISINCGLLALGNVISALGDQSKKVVHVPYRDSKLTRLLQDSLGGNSQTIMIACVSPSDRDFMETLNTLKYANRARNIKNKVVVNQDKTSQQISALRAEIARLQMELMEYKAGKRVIGEDGAEGYSDLFRENAMLQKENGALRLRVKAMQEAIDAINNRVTQLMSQEANLLLAKAGDGNEAIGALIQNYIREIEELRTKLLESEAMNESLRRSLSRASARSPYSLGASPAAPAFGGSPASSMEDASEVIRRAKQDLERLKKKEVRQRRKSPEKEAFKKRAKLQQENSEETDENEAEEEEEERDESGCEEEEGREDEDEDSGSEESLVDSDSDPEEKEVNFQADLADLTCEIEIKQKLIDELENSQRRLQTLKHQYEEKLILLQNKIRDTQLERDRVLQNLSTMECYTEEKANKIKADYEKRLREMNRDLQKLQAAQKEHARLLKNQSRYERELKKLQAEVAEMKKAKVALMKQMREEQQRRRLVETKRNREIAQLKKEQRRQEFQIRALESQKRQQEMVLRRKTQEVSALRRLAKPMSERVAGRAGLKPPMLDSGAEVSASTTSSEAESGARSVSSIVRQWNRKINHFLGDHPAPTVNGTRPARKKFQKKGASQSFSKAARLKWQSLERRIIDIVMQRMTIVNLEADMERLIKKREELFLLQEALRRKRERLQAESPEEEKGLQELAEEIEVLAANIDYINDGITDCQATIVQLEETKEELDSTDTSVVISSCSLAEARLLLDNFLKASIDKGLQVAQKEAQIRLLEGRLRQTDMAGSSQNHLLLDALREKAEAHPELQALIYNVQQENGYASTDEEISEFSEGSFSQSFTMKGSTSHDDFKFKSEPKLSAQMKAVSAECLGPPLDISTKNITKSLASLVEIKEDGVGFSVRDPYYRDRVSRTVSLPTRGSTFPRQSRATETSPLTRRKSYDRGQPIRSTDVGFTPPSSPPTRPRNDRNVFSRLTSNQSQGSALDKGIISPVGGAKGARTAPLQCVSMAEGHTKPILCLDATDELLFTGSKDRSCKMWNLVTGQEIAALKGHPNNVVSIKYCSHSGLVFSVSTSYIKVWDIRDSAKCIRTLTSSGQVISGDACAATSTRAITSAQGEHQINQIALSPSGTMLYAASGNAVRIWELSRFQPVGKLTGHIGPVMCLTVTQTASQHDLVVTGSKDHYVKMFELGECVTGTIGPTHNFEPPHYDGIECLAIQGDILFSGSRDNGIKKWDLDQQELIQQIPNAHKDWVCALAFIPGRPMLLSACRAGVIKVWNVDNFTPIGEIKGHDSPINAICTNAKHIFTASSDCRVKLWNYVPGLTPCLPRRVLAIKGRATTLP

SEQ ID NO: 50847 - protein, 1610 aa, Homo sapiens
MAGQGDCCVKVAVRIRPQLSKEKIEGCHICTSVTPGEPQVLLGKDKAFTYDFVFDLDTWQEQIYSTCVSKLIEGCFEGYNATVLAYGQTGAGKTYTMGTGFDMATSEEEQGIIPRAIAHLFGGIAERKRRAQEQGVAGPEFKVSAQFLELYNEEILDLFDSTRDPDTRHRRSNIKIHEDANGGIYTTGVTSRLIHSQEELIQCLKQGALSRTTASTQMNVQSSRSHAIFTIHLCQMRMCTQPDLVNEAVTGLPDGTPPSSEYETLTAKFHFVDLAGSERLKRTGATGERAKEGISINCGLLALGNVISALGDQSKKVVHVPYRDSKLTRLLQDSLGGNSQTIMIACVSPSDRDFMETLNTLKYANRARNIKNKVVVNQDKTSQQISALRAEIARLQMELMEYKAGKRVIGEDGAEGYSDLFRENAMLQKENGALRLRVKAMQEAIDAINNRVTQLMSQEANLLLAKAGDGNEAIGALIQNYIREIEELRTKLLESEAMNESLRRSLSRASARSPYSLGASPAAPAFGGSPASSMEDASEVIRRAKQDLERLKKKEVRQRRKSPEKEAFKKRAKLQQENSEETDENEAEEEEEERDESGCEEEEGREDEDEDSGSEESLVDSDSDPEEKEVNFQADLADLTCEIEIKQKLIDELENSQRRLQTLKHQYEEKLILLQNKIRDTQLERDRVLQNLSTMECYTEEKANKIKADYEKRLREMNRDLQKLQAAQKEHARLLKNQSRYERELKKLQAEVAEMKKAKVALMKQMREEQQRRRLVETKRNREIAQLKKEQRRQEFQIRALESQKRQQEMVLRRKTQEVSALRRLAKPMSERVAGRAGLKPPMLDSGAEVSASTTSSEAESGARSVSSIVRQWNRKINHFLGDHPAPTVNGTRPARKKFQKKGASQSFSKAARLKWQSLERRIIDIVMQRMTIVNLEADMERLIKKREELFLLQEALRRKRERLQAESPEEEKGLQELAEEIEVLAANIDYINDGITDCQATIVQLEETKEELDSTDTSVVISSCSLAEARLLLDNFLKASIDKGLQVAQKEAQIRLLEGRLRQTDMAGSSQNHLLLDALREKAEAHPELQALIYNVQQENGYASTDEEISEFSEGSFSQSFTMKGSTSHDDFKFKSEPKLSAQMKAVSAECLGPPLDISTKNITKSLASLVEIKEDGVGFSVRDPYYRDRVSRTVSLPTRGSTFPRQSRATETSPLTRRKSYDRGQPIRSTDVGFTPPSSPPTRPRNDRNVFSRLTSNQSQGSALDKGIISPVGGAKGARTAPLQCVSMAEGHTKPILCLDATDELLFTGSKDRSCKMWNLVTGQEIAALKGHPNNVVSIKYCSHSGLVFSVSTSYIKVWDIRDSAKCIRTLTSSGQVISGDACAATSTRAITSAQGEHQINQIALSPSGTMLYAASGNAVRIWELSRFQPVGKLTGHIGPVMCLTVTQTASQHDLVVTGSKDHYVKMFELGECVTGTIGPTHNFEPPHYDGIECLAIQGDILFSGSRDNGIKKWDLDQQELIQQIPNAHKDWVCALAFIPGRPMLLSACRAGVIKVWNVDNFTPIGEIKGHDSPINAICTNAKHIFTASSDLTVKFWSVRRLPHSGPP

SEQ ID NO: 50848 - protein, 1637 aa, Homo sapiens
MAGQGDCCVKVAVRIRPQLSKEKIEGCHICTSVTPGEPQVLLGKDKAFTYDFVFDLDTWQEQIYSTCVSKLIEGCFEGYNATVLAYGQTGAGKTYTMGTGFDMATSEEEQGIIPRAIAHLFGGIAERKRRAQEQGVAGPEFKVSAQFLELYNEEILDLFDSTRDPDTRHRRSNIKIHEDANGGIYTTGVTSRLIHSQEELIQCLKQGALSRTTASTQMNVQSSRSHAIFTIHLCQMRMCTQPDLVNEAVTGLPDGTPPSSEYETLTAKFHFVDLAGSERLKRTGATGERAKEGISINCGLLALGNVISALGDQSKKVVHVPYRDSKLTRLLQDSLGGNSQTIMIACVSPSDRDFMETLNTLKYANRARNIKNKVVVNQDKTSQQISALRAEIARLQMELMEYKAGKRVIGEDGAEGYSDLFRENAMLQKENGALRLRVKAMQEAIDAINNRVTQLMSQEANLLLAKAGDGNEAIGALIQNYIREIEELRTKLLESEAMNESLRRSLSRASARSPYSLGASPAAPAFGGSPASSMEDASEVIRRAKQDLERLKKKEVRQRRKSPEKEAFKKRAKLQQENSEETDENEAEEEEEERDESGCEEEEGREDEDEDSGSEESLVDSDSDPEEKEVNFQADLADLTCEIEIKQKLIDELENSQRRLQTLKHQYEEKLILLQNKIRDTQLERDRVLQNLSTMECYTEEKANKIKADYEKRLREMNRDLQKLQAAQKEHARLLKNQSRYERELKKLQAEVAEMKKAKVALMKQMREEQQRRRLVETKRNREIAQLKKEQRRQEFQIRALESQKRQQEMVLRRKTQEVSALRRLAKPMSERVAGRAGLKPPMLDSGAEVSASTTSSEAESGARSVSSIVRQWNRKINHFLGDHPAPTVNGTRPARKKFQKKGASQSFSKAARLKWQSLERRIIDIVMQRMTIVNLEADMERLIKKREELFLLQEALRRKRERLQAESPEEEKGLQELAEEIEVLAANIDYINDGITDCQATIVQLEETKEELDSTDTSVVISSCSLAEARLLLDNFLKASIDKGLQVAQKEAQIRLLEGRLRQTDMAGSSQNHLLLDALREKAEAHPELQALIYNVQQENGYASTDEEISEFSEGSFSQSFTMKGSTSHDDFKFKSEPKLSAQMKAVSAECLGPPLDISTKNITKSLASLVEIKEDGVGFSVRDPYYRDRVSRTVSLPTRGSTFPRQSRATETSPLTRRKSYDRGQPIRSTDVGFTPPSSPPTRPRNDRNVFSRLTSNQSQGSALDKSDDSDSSLSEVLRGIISPVGGAKGARTAPLQCVSMAEGHTKPILCLDATDELLFTGSKDRSCKMWNLVTGQEIAALKGHPNNVVSIKYCSHSGLVFSVSTSYIKVWDIRDSAKCIRTLTSSGQVISGDACAATSTRAITSAQGEHQINQIALSPSGTMLYAASGNAVRIWELSRFQPVGKLTGHIGPVMCLTVTQTASQHDLVVTGSKDHYVKMFELGECVTGTIGPTHNFEPPHYDGIECLAIQGDILFSGSRDNGIKKWDLDQQELIQQIPNAHKDWVCALAFIPGRPMLLSACRAGVIKVWNVDNFTPIGEIKGHDSPINAICTNAKHIFTASSDCRVKLWNYVPGLTPCLPRRVLAIKGRATTLP

SEQ ID NO: 50849 - protein, 1623 aa, Homo sapiens
MAGQGDCCVKVAVRIRPQLSKEKIEGCHICTSVTPGEPQVLLGKDKAFTYDFVFDLDTWQEQIYSTCVSKLIEGCFEGYNATVLAYGQTGAGKTYTMGTGFDMATSEEEQGIIPRAIAHLFGGIAERKRRAQEQGVAGPEFKVSAQFLELYNEEILDLFDSTRDPDTRHRRSNIKIHEDANGGIYTTGVTSRLIHSQEELIQCLKQGALSRTTASTQMNVQSSRSHAIFTIHLCQMRMCTQPDLVNEAVTGLPDGTPPSSEYETLTAKFHFVDLAGSERLKRTGATGERAKEGISINCGLLALGNVISALGDQSKKVVHVPYRDSKLTRLLQDSLGGNSQTIMIACVSPSDRDFMETLNTLKYANRARNIKNKVVVNQDKTSQQISALRAEIARLQMELMEYKAGKRVIGEDGAEGYSDLFRENAMLQKENGALRLRVKAMQEAIDAINNRVTQLMSQEANLLLAKAGDGNEAIGALIQNYIREIEELRTKLLESEAMNESLRRSLSRASARSPYSLGASPAAPAFGGSPASSMEDASEVIRRAKQDLERLKKKEVRQRRKSPEKEAFKKRAKLQQENSEETDENEAEEEEEERDESGCEEEEGREDEDEDSGSEESLVDSDSDPEEKEVNFQADLADLTCEIEIKQKLIDELENSQRRLQTLKHQYEEKLILLQNKIRDTQLERDRVLQNLSTMECYTEEKANKIKADYEKRLREMNRDLQKLQAAQKEHARLLKNQSRYERELKKLQAEVAEMKKAKVALMKQMREEQQRRRLVETKRNREIAQLKKEQRRQEFQIRALESQKRQQEMVLRRKTQEVSALRRLAKPMSERVAGRAGLKPPMLDSGAEVSASTTSSEAESGARSVSSIVRQWNRKINHFLGDHPAPTVNGTRPARKKFQKKGASQSFSKAARLKWQSLERRIIDIVMQRMTIVNLEADMERLIKKREELFLLQEALRRKRERLQAESPEEEKGLQELAEEIEVLAANIDYINDGITDCQATIVQLEETKEELDSTDTSVVISSCSLAEARLLLDNFLKASIDKGLQVAQKEAQIRLLEGRLRQTDMAGSSQNHLLLDALREKAEAHPELQALIYNVQQENGYASTDEEISEFSEGSFSQSFTMKGSTSHDDFKFKSEPKLSAQMKAVSAECLGPPLDISTKNITKSLASLVEIKEDGVGFSVRDPYYRDRVSRTVSLPTRGSTFPRQSRATETSPLTRRKSYDRGQPIRSTDVGFTPPSSPPTRPRNDRNVFSRLTSNQSQGSALDKSDDSDSSLSEVLRGIISPVGGAKGARTAPLQCVSMAEGHTKPILCLDATDELLFTGSKDRSCKMWNLVTGQEIAALKGHPNNVVSIKYCSHSGLVFSVSTSYIKVWDIRDSAKCIRTLTSSGQVISGDACAATSTRAITSAQGEHQINQIALSPSGTMLYAASGNAVRIWELSRFQPVGKLTGHIGPVMCLTVTQTASQHDLVVTGSKDHYVKMFELGECVTGTIGPTHNFEPPHYDGIECLAIQGDILFSGSRDNGIKKWDLDQQELIQQIPNAHKDWVCALAFIPGRPMLLSACRAGVIKVWNVDNFTPIGEIKGHDSPINAICTNAKHIFTASSDLTVKFWSVRRLPHSGPP

SEQ ID NO: 50850 - protein, 1668 aa, Homo sapiens
MAGQGDCCVKVAVRIRPQLSKEKIEGCHICTSVTPGEPQVLLGKDKAFTYDFVFDLDTWQEQIYSTCVSKLIEGCFEGYNATVLAYGQTGAGKTYTMGTGFDMATSEEEQGIIPRAIAHLFGGIAERKRRAQEQGVAGPEFKVSAQFLELYNEEILDLFDSTRDPDTRHRRSNIKIHEDANGGIYTTGVTSRLIHSQEELIQCLKQGALSRTTASTQMNVQSSRSHAIFTIHLCQMRMCTQPDLVNEAVTGLPDGTPPSSEYETLTAKFHFVDLAGSERLKRTGATGERAKEGISINCGLLALGNVISALGDQSKKVVHVPYRDSKLTRLLQDSLGGNSQTIMIACVSPSDRDFMETLNTLKYANRARNIKNKVVVNQDKTSQQISALRAEIARLQMELMEYKAGKRVIGEDGAEGYSDLFRENAMLQKENGALRLRVKAMQEAIDAINNRVTQLMSQEANLLLAKAGDGNEAIGALIQNYIREIEELRTKLLESEAMNESLRRSLSRASARSPYSLGASPAAPAFGGSPASSMEDASEVIRRAKQDLERLKKKEVRQRRKSPEKEAFKKRAKLQQENSEETDENEAEEEEEERDESGCEEEEGREDEDEDSGSEESLVDSDSDPEEKEVNFQADLADLTCEIEIKQKLIDELENSQRRLQTLKHQYEEKLILLQNKIRDTQLERDRVLQNLSTMECYTEEKANKIKADYEKRLREMNRDLQKLQAAQKEHARLLKNQSRYERELKKLQAEVAEMKKAKVALMKQMREEQQRRRLVETKRNREIAQLKKEQRRQEFQIRALESQKRQQEMVLRRKTQEVSALRRLAKPMSERVAGRAGLKPPMLDSGAEVSASTTSSEAESGARSVSSIVRQWNRKINHFLGDHPAPTVNGTRPARKKFQKKGASQSFSKAARLKWQSLERRIIDIVMQRMTIVNLEADMERLIKKREELFLLQEALRRKRERLQAESPEEEKGLQELAEEIEVLAANIDYINDGITDCQATIVQLEETKEELDSTDTSVVISSCSLAEARLLLDNFLKASIDKGLQVAQKEAQIRLLEGRLRQTDMAGSSQNHLLLDALREKAEAHPELQALIYNVQQENGYASTDEEISEFSEGSFSQSFTMKGSTSHDDFKFKSEPKLSAQMKAVSAECLGPPLDISTKNITKSLASLVEIKEDGVGFSVRDPYYRDRVSRTVSLPTRGSTFPRQSRATETSPLTRRKSYDRGQPIRSTDVGFTPPSSPPTRPRNDRNVFSRLTSNQSQGSALDKSDDSDSSLSEVLRGIISPVGGAKGARTAPLQCVSMAEGHTKPILCLDATDELLFTGSKDRSCKMWNLVTGQEIAALKGHPNNVVSIKYCSHSGLVFSVSTSYIKVWDIRDSAKCIRTLTSSGQVISGDACAATSTRAITSAQGEHQINQIALSPSGTMLYAASGNAVRIWELSRFQPVGKLTGHIGPVMCLTVTQTASQHDLVVTGSKDHYVKMFELGECVTGTIGPTHNFEPPHYDGIECLAIQGDILFSGSRDNGIKKWDLDQQELIQQIPNAHKDWVCALAFIPGRPMLLSACRAGVIKVWNVDNFTPIGEIKGHDSPINAICTNAKHIFTASSDCRVKLWNYVPGLTPCLPRRVLAIKGRATTCPDPPQLSLSPLSFFPSFLFPLFPHFDLSCFLT

SEQ ID NO: 50851 - protein, 665 aa, Homo sapiens
MAAGGSTQQRRREMAAASAAAISGAGRCRLSKIGATRRPPPARVRVAVRLRPFVDGTAGASDPPCVRGMDSCSLEIANWRNHQETLKYQFDAFYGERSTQQDIYAGSVQPILRHLLEGQNASVLAYGPTGAGKTHTMLGSPEQPGVIPRALMDLLQLTREEGAEGRPWALSVTMSYLEIYQEKVLDLLDPASGDLVIREDCRGNILIPGLSQKPISSFADFERHFLPASRNRTVGATRLNQRSSRSHAVLLVKVDQRERLAPFRQREGKLYLIDLAGSEDNRRTGNKGLRLKESGAINTSLFVLGKVVDALNQGLPRVPYRDSKLTRLLQDSLGGSAHSILIANIAPERRFYLDTVSALNFAARSKEVINRPFTNESLQPHALGPVKLSQKELLGPPEAKRARGPEEEEIGSPEPMAAPASASQKLSPLQKLSSMDPAMLERLLSLDRLLASQGSQGAPLLSTPKRERMVLMKTVEEKDLEIERLKTKQKELEAKMLAQKAEEKENHCPTMLRPLSHRTVTGAKPLKKAVVMPLQLIQEQAASPNAEIHILKNKGRKRKLESLDALEPEEKAEDCWELQISPELLAHGRQKILDLLNEGSARDLRSLQRIGPKKAQLIVGWRELHGPFSQVEDLERVEGITGKQMESFLKANILGLAAGQRCGAS

SEQ ID NO: 50852 - protein, 72 aa, Homo sapiens
MLAQKAEEKENHCPTMLRPLSHRTVTGAKPLKKAVVMPLQLIQEQAASPNAEIHILKNKGRKRKGANITTGY

SEQ ID NO: 50853 - protein, 597 aa, Homo sapiens
MDSCSLEIANWRNHQETLKYQFDAFYGERSTQQDIYAGSVQPILRHLLEGQNASVLAYGPTGAGKTHTMLGSPEQPGVIPRALMDLLQLTREEGAEGRPWALSVTMSYLEIYQEKVLDLLDPASGDLVIREDCRGNILIPGLSQKPISSFADFERHFLPASRNRTVGATRLNQRSSRSHAVLLVKVDQRERLAPFRQREGKLYLIDLAGSEDNRRTGNKGLRLKESGAINTSLFVLGKVVDALNQGLPRVPYRDSKLTRLLQDSLGGSAHSILIANIAPERRFYLDTVSALNFAARSKEVINRPFTNESLQPHALGPVKLSQKELLGPPEAKRARGPEEEEIGSPEPMAAPASASQKLSPLQKLSSMDPAMLERLLSLDRLLASQGSQGAPLLSTPKRERMVLMKTVEEKDLEIERLKTKQKELEAKMLAQKAEEKENHCPTMLRPLSHRTVTGAKPLKKAVVMPLQLIQEQAASPNAEIHILKNKGRKRKLESLDALEPEEKAEDCWELQISPELLAHGRQKILDLLNEGSARDLRSLQRIGPKKAQLIVGWRELHGPFSQVEDLERVEGITGKQMESFLKANILGLAAGQRCGAS

SEQ ID NO: 50854 - protein, 597 aa, Homo sapiens; identical to SEQ ID NO: 50853

SEQ ID NO: 50855 - protein, 960 aa, Homo sapiens
MKSARAKTPRKPTVKKGSQTNLKDPVGVYCRVRPLGFPDQECCIEVINNTTVQLHTPEGYRLNRNGDYKETQYSFKQVFGTHTTQKELFDVVANPLVNDLIHGKNGLLFTYGVTGSGKTHTMTGSPGEGGLLPRCLDMIFNSIGSFQAKRYVFKSNDRNSMDIQCEVDALLERQKREAMPNPKTSSSKRQVDPEFADMITVQEFCKAEEVDEDSVYGVFVSYIEIYNNYIYDLLEEVPFDPIKPKPPQSKLLREDKNHNMYVAGCTEVEVKSTEEAFEVFWRGQKKRRIANTHLNRESSRSHSVFNIKLVQAPLDADGDNVLQEKEQITISQLSLVDLAGSERTNRTRAEGNRLREAGNINQSLMTLRTCMDVLRENQMYGTNKMVPYRDSKLTHLFKNYFDGEGKVRMIVCVNPKAEDYEENLQVMRFAEVTQEVEVARPVDKAICGLTPGRRYRNQPRGPVGNEPLVTDVVLQSFPPLPSCEILDINDEQTLPRLIEALEKRHNLRQMMIDEFNKQSNAFKALLQEFDNAVLSKENHMQGKLNEKEKMISGQKLEIERLEKKNKTLEYKIEILEKTTTIYEEDKRNLQQELETQNQKLQRQFSDKRRLEARLQGMVTETTMKWEKECERRVAAKQLEMQNKLWVKDEKLKQLKAIVTEPKTEKPERPSRERDREKVTQRSVSPSPVPLSSNYIAQISNGQQLMSQPQLHRRSNSCSSISVASCISEWEQKIPTYNTPLKVTSIARRRQQEPGQSKTCIVSDRRRGMYWTEGREVVPTFRNEIEIEEDHCGRLLFQPDQNAPPIRLRHRRSRSAGDRWVDHKPASNMQTETVMQPHVPHAITVSVANEKALAKCEKYMLTHQELASDGEIETKLIKGDIYKTRGGGQSVQFTDIETLKQESPNGSRKRRSSTVAPAQPDGAESEWTDVETRCSVAVEMRAGSQLGPGYQHHAQPKRKKP

SEQ ID NO: 50856 - protein, 673 aa, Homo sapiens
MITVQEFCKAEEVDEDSVYGVFVSYIEIYNNYIYDLLEEVPFDPIKPKWNSCSTPMRNTDFVPPQSKLLREDKNHNMYVAGCTEVEVKSTEEAFEVFWRGQKKRRIANTHLNRESSRSHSVFNIKLVQAPLDADGDNVLQEKEQITISQLSLVDLAGSERTNRTRAEGNRLREAGNINQSLMTLRTCMDVLRENQMYGTNKMVPYRDSKLTHLFKNYFDGEGKVRMIVCVNPKAEDYEENLQVMRFAEVTQEVEVARPVDKAICGLTPGRRYRNQPRGPVGNEPLVTDVVLQSFPPLPSCEILDINDEQTLPRLIEALEKRHNLRQMMIDEFNKQSNAFKALLQEFDNAVLSKENHMQGKLNEKEKMISGQKLEIERLEKKNKTLEYKIEILEKTTTIYEEDKRNLQQELETQNQKLQRQFSDKRRLEARLQGMVTETTMKWEKECERRVAAKQLEMQNKLWVKDEKLKQLKAIVTEPKTEKPERPSRERDREKVTQRSVSPSPVPLLFQPDQNAPPIRLRHRRSRSAGDRWVDHKPASNMQTETVMQPHVPHAITVSVANEKALAKCEKYMLTHQELASDGEIETKLIKGDIYKTRGGGQSVQFTDIETLKQESPNGSRKRRSSTVAPAQPDGAESEWTDVETRCSVAVEMRAGSQLGPGYQHHAQPKRKKP

SEQ ID NO: 50857 - protein, 673 aa, Homo sapiens; identical to SEQ ID NO: 50856

SEQ ID NO: 50858 - protein, 856 aa, Homo sapiens
MKSARAKTPRKPTVKKGSQTNLKDPVGVYCRVRPLGFPDQECCIEVINNTTVQLHTPEGYRLNRNGDYKETQYSFKQVFGTHTTQKELFDVVANPLVNDLIHGKNGLLFTYGVTGSGKTHTMTGSPGEGGLLPRCLDMIFNSIGSFQAKRYVFKSNDRNSMDIQCEVDALLERQKREAMPNPKTSSSKRQVDPEFADMITVQEFCKAEEVDEDSVYGVFVSYIEIYNNYIYDLLEEVPFDPIKPKPPQSKLLREDKNHNMYVAGCTEVEVKSTEEAFEVFWRGQKKRRIANTHLNRESSRSHSVFNIKLVQAPLDADGDNVLQEKEQITISQLSLVDLAGSERTNRTRAEGNRLREAGNINQSLMTLRTCMDVLRENQMYGTNKMVPYRDSKLTHLFKNYFDGEGKVRMIVCVNPKAEDYEENLQVMRFAEVTQEVEVARPVDKAICGLTPGRRYRNQPRGPVGNEPLVTDVVLQSFPPLPSCEILDINDEQTLPRLIEALEKRHNLRQMMIDEFNKQSNAFKALLQEFDNAVLSKENHMQGKLNEKEKMISGQKLEIERLEKKNKTLEYKIEILEKTTTIYEEDKRNLQQELETQNQKLQRQFSDKRRLEARLQGMVTETTMKWEKECERRVAAKQLEMQNKLWVKDEKLKQLKAIVTEPKTEKPERPSRERDREKVTQRSVSPSPVPLLFQPDQNAPPIRLRHRRSRSAGDRWVDHKPASNMQTETVMQPHVPHAITVSVANEKALAKCEKYMLTHQELASDGEIETKLIKGDIYKTRGGGQSVQFTDIETLKQESPNGSRKRRSSTVAPAQPDGAESEWTDVETRCSVAVEMRAGSQLGPGYQHHAQPKRKKP

SEQ ID NO: 50859 - protein, 839 aa, Homo sapiens
MTGSPGEGGLLPRCLDMIFNSIGSFQAKRYVFKSNDRNSMDIQCEVDALLERQKREAMPNPKTSSSKRQVDPEFADMITVQEFCKAEEVDEDSVYGVFVSYIEIYNNYIYDLLEEVPFDPIKPKPPQSKLLREDKNHNMYVAGCTEVEVKSTEEAFEVFWRGQKKRRIANTHLNRESSRSHSVFNIKLVQAPLDADGDNVLQEKEQITISQLSLVDLAGSERTNRTRAEGNRLREAGNINQSLMTLRTCMDVLRENQMYGTNKMVPYRDSKLTHLFKNYFDGEGKVRMIVCVNPKAEDYEENLQVMRFAEVTQEVEVARPVDKAICGLTPGRRYRNQPRGPVGNEPLVTDVVLQSFPPLPSCEILDINDEQTLPRLIEALEKRHNLRQMMIDEFNKQSNAFKALLQEFDNAVLSKENHMQGKLNEKEKMISGQKLEIERLEKKNKTLEYKIEILEKTTTIYEEDKRNLQQELETQNQKLQRQFSDKRRLEARLQGMVTETTMKWEKECERRVAAKQLEMQNKLWVKDEKLKQLKAIVTEPKTEKPERPSRERDREKVTQRSVSPSPVPLSSNYIAQISNGQQLMSQPQLHRRSNSCSSISVASCISEWEQKIPTYNTPLKVTSIARRRQQEPGQSKTCIVSDRRRGMYWTEGREVVPTFRNEIEIEEDHCGRLLFQPDQNAPPIRLRHRRSRSAGDRWVDHKPASNMQTETVMQPHVPHAITVSVANEKALAKCEKYMLTHQELASDGEIETKLIKGDIYKTRGGGQSVQFTDIETLKQESPNGSRKRRSSTVAPAQPDGAESEWTDVETRCSVAVEMRAGSQLGPGYQHHAQPKRKKP

SEQ ID NO: 50860 - protein, 1234 aa, Homo sapiens
MASWLYECLCEAELAQYYSHFTALGLQKIDELAKITMKDYSKLGVHDMNDRKRLFQLIKIIKIMQEEDKAVSIPERHLQTSSLRIKSQELRSGPRRQLNFDSPADNKDRNASNDGFEMCSLSDFSANEQKSTYLKVLEHMLPDDSQYHTKTGILNATAGDSYVQTEISTSLFSPNYLSAILGDCDIPIIQRISHVSGYNYGIPHSCIRQNTSEKQNPWTEMEKIRVCVRKRPLGMREVRRGEINIITVEDKETLLVHEKKEAVDLTQYILQVILKGSKERSTGATGVNADSSRSHAVIQIQIKDSAKRTFGRISFIDLAGSERAADARDSDRQTKMEGAEINQSLLALKECIRALDQEHTHTPFRQSKLTQVLKDSFIGNAKTCMIANISPSHVATEHTLNTLRYADRVKELKKGIKCCTSVTSRNRTSGNSSPKRIQSSPGALSEDKCSPKKVKLGFQQSLTVAAPGSTRGKVHPLTSHPPNIPFTSAPKVSGKRGGSRGSPSQEWVIHASPVKGTVRSGHVAKKKPEESAPLCSEKNRMGNKTVLGWESRASGPGEGLVRGKLSTKCKKVQTVQPVQKQLVSRVELSFGNAHHRAEYSQDSQRGTPARPASEAWTNIPPHQKEREEHLRFYHQQFQQPPLLQQKLKYQPLKRSLRQYRPPEGQLTNETPPLFHSYSENHDGAQVEELDDSDFSEDSFSHISSQRATKQRNTLENSEDSFFLHQTWGQGPEKQVAERQQSLFSSPRTGDKKDLTKSWVDSRDPINHRRAALDHSCSPSKGPVDWSRENSTSSGPSPRDSLAEKPYCSQVDFIYRQERGGGSSFDLRKDASQSEVSGENEGNLPSPEEDGFTISLSHVAVPGSPDQRDTVTTPLREVSADGPIQVTSTVKNGHAVPGEDPRGQLGTHAEYASGLMSPLTMSLLENPDNEGSPPSEQLVQDGATHSLVAESTGGPVVSHTVPSGDQEAALPVSSATRHLWLSSSPPDNKPGGDLPALSPSPIRQHPADKLPSREADLGEACQSRETVLFSHEHMGSEQYDADAEETGLDGSWGFPGKPFTTIHMGVPHSGPTLTPRTGSSDVADQLWAQERKHPTRLGWQEFGLSTDPIKLPCNSENVTWLKPRPISRCLARPSSPLVPSCSPKTAGTLRQPTLEQAQQVVIRAHQEQLDEMAELGFKEETLMSQLASNDFEDFVTQLDEIMVLKSKCIQSLRSQLQLYLTCHGPTAAPEGTVPS

SEQ ID NO: 50861 - protein, 1368 aa, Homo sapiens
MASWLYECLCEAELAQYYSHFTALGLQKIDELAKITMKDYSKLGVHDMNDRKRLFQLIKIIKIMQEEDKAVSIPERHLQTSSLRIKSQELRSGPRRQLNFDSPADNKDRNASNDGFEMCSLSDFSANEQKSTYLKVLEHMLPDDSQYHTKTGILNATAGDSYVQTEISTSLFSPNYLSAILGDCDIPIIQRISHVSGYNYGIPHSCIRQNTSEKQNPWTEMEKIRVCVRKRPLGMREVRRGEINIITVEDKETLLVHEKKEAVDLTQYILQHVFYFDEVFGEACTNQDVYMKTTHPLIQHIFNGGNATCFAYGQTGAGKTYTMIGTHENPGLYALAAKDIFRQLEVSQPRKHLFVWISFYEIYCGQLYDLLNRRKRLFAREDSKHMVQIVGLQELQVDSVELLLEVILKGSKERSTGATGVNADSSRSHAVIQIQIKDSAKRTFGRISFIDLAGSERAADARDSDRQTKMEGAEINQSLLALKECIRALDQEHTHTPFRQSKLTQVLKDSFIGNAKTCMIANISPSHVATEHTLNTLRYADRVKELKKGIKCCTSVTSRNRTSGNSSPKRIQSSPGALSEDKCSPKKVKLGFQQSLTVAAPGSTRGKVHPLTSHPPNIPFTSAPKVSGKRGGSRGSPSQEWVIHASPVKGTVRSGHVAKKKPEESAPLCSEKNRMGNKTVLGWESRASGPGEGLVRGKLSTKCKKVQTVQPVQKQLVSRVELSFGNAHHRAEYSQDSQRGTPARPASEAWTNIPPHQKEREEHLRFYHQQFQQPPLLQQKLKYQPLKRSLRQYRPPEGQLTNETPPLFHSYSENHDGAQVEELDDSDFSEDSFSHISSQRATKQRNTLENSEDSFFLHQTWGQGPEKQVAERQQSLFSSPRTGDKKDLTKSWVDSRDPINHRRAALDHSCSPSKGPVDWSRENSTSSGPSPRDSLAEKPYCSQVDFIYRQERGGGSSFDLRKDASQSEVSGENEGNLPSPEEDGFTISLSHVAVPGSPDQRDTVTTPLREVSADGPIQVTSTVKNGHAVPGEDPRGQLGTHAEYASGLMSPLTMSLLENPDNEGSPPSEQLVQDGATHSLVAESTGGPVVSHTVPSGDQEAALPVSSATRHLWLSSSPPDNKPGGDLPALSPSPIRQHPADKLPSREADLGEACQSRETVLFSHEHMGSEQYDADAEETGLDGSWGFPGKPFTTIHMGVPHSGPTLTPRTGSSDVADQLWAQERKHPTRLGWQEFGLSTDPIKLPCNSENVTWLKPRPISRCLARPSSPLVPSCSPKTAGTLRQPTLEQAQQVVIRAHQEQLDEMAELGFKEETLMSQLASNDFEDFVTQLDEIMVLKSKCIQSLRSQLQLYLTCHGPTAAPEGTVPS

SEQ ID NO: 50862 - protein, 1368 aa, Homo sapiens; identical to SEQ ID NO: 50861

SEQ ID NO: 50863 - protein, 1158 aa, Homo sapiens
MASWLYECLCEAELAQYYSHFTALGLQKIDELAKITMKDYSKLGVHDMNDRKRLFQLIKIIKIMQEEDKAVSIPERHLQTSSLRIKSQELRSGPRRQLNFDSPADNKDRNASNDGFEMCSLSDFSANEQKSTYLKVLEHMLPDDSQYHTKTGILNATAGDSYVQTEISTSLFSPNYLSAILGDCDIPIIQRISHVSGYNYGIPHSCIRQNTSEKQNPWTEMEKIRVCVRKRPLGMREVRRGEINIITVEDKETLLVHEKKEAVDLTQYILQHVFYFDEVFGEACTNQDVYMKTTHPLIQHIFNGGNATCFAYGQTGAGKTYTMIGTHENPGLYALAAKDIFRQLEVSQPRKHLFVWISFYEIYCGQLYDLLNRRKRLFAREDSKHMVQIVGLQELQVDSVELLLEVILKGSKERSTGATGVNADSSRSHAVIQIQIKDSAKRTFGRISFIDLAGSERAADARDSDRQTKMEGAEINQSLLALKECIRALDQEHTHTPFRQSKLTQVLKDSFIGNAKTCMIANISPSHVATEHTLNTLRYADRVKELKKGIKCCTSVTSRNRTSGNSSPKRIQSSPGALSEDKCSPKKVKLGFQQSLTVAAPGSTRGKVHPLTSHPPNIPFTSAPKVSGKRGGSRGSPSQEWVIHASPVKGTVRSGHVAKKKPEESAPLCSEKNRMGNKTVLGWESRASGPGEGLVRGKLSTKCKKVQTVQPVQKQLVSRVELSFGNAHHRAEYSQDSQRGTPARPASEAWTNIPPHQKEREEHLRFYHQQFQQPPLLQQKLKYQPLKRSLRQYRPPEGQLTNETPPLFHSYSENHDGAQVEELDDSDFSEDSFSHISSQRATKQRNTLENSEDSFFLHQTWGQGPEKQVAERQQSLFSSPRTGDKKDLTKSWVDSRDPINHRRAALDHSCSPSKGPVDWSRENSTSSGPSPRDSLAEKPYCSQVDFIYRQERGGGSSFDLRKDASQSEVSGENEGNLPSPEEDGFTISLSHVAVPGSPDQRDTVTTPLREVSADGPIQVTSTVKNGHAVPGEDPRGQLGTHAEYASGLMSPLTMSLLENPDNEGSPPSEQLVQDGATHSLVAESTGGPVVSHTVPSGDQEAALPVSSATRHLWLSSSPPDNKPGGDLPALGPGEKTSYKAWLAGVWFVHRPHQVALQQ

SEQ ID NO: 50864 - protein, 332 aa, Homo sapiens
MTWTSGQLQREKQARPGSGAVLAFPDDKDLRVYGPAESQSAVFGDVCPLLTSLLDGYNVCVMAYGQTGSGKSYTMLGRHSDDGPVLPLDPQSDLGIIPRVAEELFRLILENTSRSPKVEVSIVEVYNNDIFDLLAKDSIAAVSGVKREVVTAKDGRTEVALLASEAVGSASKLMELVHGGLQLRAKHPTLVHADSSRSHLIITVTLTTASCSDSTADQACSATLPREQTEAGRAGRSRRASQGALAPQLVPGNPAGHAEQVQARLQLVDSAGSECVGGDAKLLVILCISPSQRHLAQTLQGLGFGIRARQVQRGPARKKPPSSQTEGKRRPD

SEQ ID NO: 50865 - protein, 384 aa, Homo sapiens
MTWTSGQLQREKQARPGSGAVLAFPDDKDLRVYGPAESQSAVFGDVCPLLTSLLDGYNVCVMAYGQTGSGKSYTMLGRHSDDGPVLPLDPQSDLGIIPRVAEELFRLILENTSRSPKVEVSIVEVYNNDIFDLLAKDSIAAVSGVKREVVTAKDGRTEVALLASEAVGSASKLMELVHGGLQLRAKHPTLVHADSSRSHLIITVTLTTASCSDSTADQACSATLPREQTEAGRAGRSRRASQGALAPQLVPGNPAGHAEQVQARLQLVDSAGSECVGVSGVTGLALREMACISRSLAALAGVLGALLEHRGHAPYRNSRLTHLLQDCLGGDAKLLVILCISPSQRHLAQTLQGLGFGIRARQVQRGPARKKPPSSQTEGKRRPD

SEQ ID NO: 50866 - protein, 384 aa, Homo sapiens; identical to SEQ ID NO: 50865

SEQ ID NO: 50867 - protein, 1882 aa, Homo sapiens
MVGRGVPLCAAQPAVAEGGPAREPPPLLEVSPRKRLPAGPDQDPCGSRPAPEGAGAGPEQGHSAGGGGWCRHCHTKLVELKRQAWKLVSGPGTTLRDPCLSALLLDKLPAPGALPACRPEAERRCDVCATHLQQLTREAMHLLQAPASHEDLDAPHGGPSLAPPSTTTSSRDTPGPAGPAGRQPGRAGPDRTKGLAWSPGPSVQVSVAPAGLGGALSTVTIQAQQCLEGMWSVSRVNSFLPPACLAEAAVAAVAVADTVRECPPVAGPDGLSKAWGRGGVCTSALVTPTPGSVGGSTGPSAAASFFIRAMQKLSLASKRKKPHPPPPPATRGTSTYPTDFSGVLQLWPPPAPPCLLRAASKTKDNPGSIGKVKVMLRIWPAQGAQRSAEAMSFLKVDPRKKQVILYDPAAGPPGSAGPRRAATAAVPKMFAFDAVFPQDSEQAEVCSGTVADVLQSVVSGADGCIFSFGHMSLGKSYTMIGKDSSPQSLGIVPCAISWLFRLIEERRERTGTRFSVRVSAVEVCGRDQSLRDLLAEVAPGSLQDTQSPGVYLREDPVCGAQLQNQSELRAPTAEKAAFYLDAALAARSTSRAGCGEDARRSSHMLFTLHVYQYRMEKCGRGGMSGGRSRLHLIDLGSCEAAAGRAGEAAGGPLCLSLSALGSVILALVNGAKHVPYRDHRLTMLLRESLATAGCRTTMIAHVSDAPAQHAETLSTVQLAARIHRLRRKKAKYASSSSGGESSCEEGRARRPPHLRPFHPRTVALDPDRTPPCLPGDPDYSSSSEQSCDTVIYVGPGGAALSDRELTDNEGPPDFVPIIPALSRHRPSKGPRDADHFRCSTFAELQERLECMDGNEGPSGGPGGTDGAQASPARGGRKPSPPEAASPRKAVGTPMAASTPRGSSGPDTHQGTPEPCKAIVWGDQREDSSAWPELLVPEKAAVSGGRRPLPSPAPPPPQLLEACRAPEEPGGGGTDGVARTPPVGMSGQVAGSPMLPGATCPRLAAGSRCPERGLLTTTVTLQRPVELNGEDELVFTVVEELSLGALAGAGRPTSLASFDSDCSLRALASGSRPVSIISSINDEFDAYTSQAPEGGPLEGAAWAGSSHGSSISSWLSEVSVCTADSRDPTPQPRFSPDSLAGLDPGGPPALDGSLGDGSSGFLGPDRPDSPGPTWGPCPGEVAAVAPSRPGREPQAGPSRWASAAQTIHSSLPRKPRTASATTRVGCARLGQSPPGRGGLFEDPWLLRVGECDTQAASAGRAPSPTLGSPRLPEAQVMLACAQRVVDGCEVAARAARRPEAVARIPPLRRGATTLGVTTPAVSWGDAPTEVVACSGSLKASPTSKKGLAPKAGFLPRPSGAAPPAPPTRKSSLEQRSSPASAPPHAVNPARVGAAAVLRGEEEPRPSSRADHSVPRATSSLKARASKVEAAHRLAGHASLERYEGLAHSSSKGREAPGRPPRAVPKLGVPPSSPTHGPAPACRSGAAKAVGAPKPPVGGGKGRGLVAGGSRALGPSVKLSTASVTGRSPGGPVAGPRAAPRAGPSVGAKAGRGTVMGTKQALRAAHSRVHELSASGAPGRGGSSWGSADSDSGHDSGVNVGEERPPTGPALPSPYSKVTAPRRPQRYSSGHGSDNSSVLSGELPPAMGRTALFHHSGGSSGYESLRRDSEATGSASSAPDSMSESGAASPGARTRSLKSPKKRATGLQRRRLIPAPLPDTTALGRKPSLPGQWVDLPPPLAGSLKEPFEIKVYEIDDVERLQRPRPTPREAPTQGLACVSTRLRLAERRQQRLREVQAKHKHLCEELAETQGRLMLEPGRWLEQFEVDPELEPESAEYLAALERATAALEQCVNLCKAHVMMVTCFDISVAASAAIPGPQEVDV

SEQ ID NO: 50868 - protein, 1727 aa, Homo sapiens
MMMDWKAVAAQKLNLSSKKKKHRPSTSSAAEPPLFATSFSGILQTSPPPAPPCLLRAVNKVKDTPGLGKVKVMLRICSTLARDTSESSSFLKVDPRKKQITLYDPLTCGGQNAFQKRGNQVPPKMFAFDAVFPQDASQAEVCAGTVAEVIQSVVNGADGCVFCFGHAKLGKSYTMIGKDDSMQNLGIIPCAISWLFKLINERKEKTGARFSVRVSAVEVWGKEENLRDLLSEVATGSLQDGQSPGVYLCEDPICGTQLQNQSELRAPTAEKAAFFLDAAIASRRSHQQDCDEDDHRNSHVFFTLHIYQYRMEKSGKGGMSGGRSRLHLIDLGSCVKALSKNREGGSGLCLSLSALGNVILALVNGSKHIPYKESKLAMLLRESLGNMNCRTTMIAHISAAVGSYAETLSTIQIASRVLRMKKKKTKYTSSSSGGESSCEEGRMRRPTQLRPFHTRATVDPDFPIAHLSSDPDYSSSSEQSCDTVIYIGPNGTALSDKELTDNEGPPDFVPIVPALQKTRGDSRPAEAGEAAAGKSERDCLKCNTFAELQERLDCIDGSEEPSSFPFEELPAQFGPEQASRGPRLSQAAGASPLSESDKEDNGSEGQLTNREGPELPASKMQRSHSPVPAAAPAHSPSPASPRSVPGSSSQHSASPLVQSPSLQSSRESLNSCGFVEGKPRPMGSPRLGIASLSKTSEYKPPSSPSQRCKVYTQKGVLPSPAPLPPSSKDSGVASRESLLQPEVRTPPVGMSPQVLKKSMSAGSEGFPETPVDDEQQAATPSESKKEILSTTMVTVQQPLELNGEDELVFTLVEELTISGVLDSGRPTSIISFNSDCSARALASGSRPVSIISSISEDLECYSSTAPVSEVSITQFLPLPKMSLDEKAQDAGSRRSSISSWLSEMSAGSEGEQSCHSFIAQTCFGHGEAMAEPVASEFVSSLQNTAVVCREKPKASPDNLLILSEMGDDSFNKAAPIKGCKISTVSKAMVTISNTANLSSCEGYIPMKTNITVYPCIAMSPRNIQEPEAPTATPKAGPTLAQSRESKENSAKKEMKFEDPWLKREEEVKKETAHPNEEGMMRCETATGPSNAETRAEQEQDGKPSPGDRLSSSSGEVSASPVTDNFRRVVDGCEMALPGLATQSPVHPNKSVKSSSLPRAFQKASRQEEPDSLSYYCAAETNGVGAASGTPPSKATLEGKVASPKHCVLARPKGTPPLPPVRKSSLDQKNRASPQHSASGSGTSSPLNQPAAFPAGLPDEPSGKTKDASSSSKLFSAKLEQLASRSNSLGRATVSHYECLSLERAESLSSVSSRLHAGKDGTMPRAGRSLGRSAGTSPPSSGASPKAGQSKISAVSRLLLASPRARGPSASTTKTLSFSTKSLPQAVGQGSSSPPGGKHTPWSTQSLSRNRSSGLASKLPLRAVSGRISELLQGGAGARGLQLRAGPEAEARGGALAEDEPAAAHLLPSPYSKITPPRRPHRCSSGHGSDNSSVLSGELPPAMGKTALFYHSGGSSGYESVMRDSEATGSASSAQDSTSENSSSVGGRCRSLKTPKKRSNPGSQRRRLIPALSLDTSSPVRKPPNSTGVRWVDGPLRSSPRGLGEPFEIKVYEIDDVERLQRRRGGASKEAMCFNAKLKILEHRQQRIAEVRAKYEWLMKELEATKQYLMLDPNKWLSEFDLEQVWELDSLEYLEALECVTERLESRVNFCKAHLMMITCFDITSRRR

SEQ ID NO: 50869 - protein, 2108 aa, Homo sapiens
MNSVAGNKERLAVSTRGKKYGVNEVCSPTKPAAPFSPESWYRKAYEESRAGSRPTPEGAGSALGSSGTPSPGSGTSSPSSFTGSPGPASPGIGTSSPGSLGGSPGFGTGSPGSGSGGGSSPGSDRGVWCENCNARLVELKRQALRLLLPGPFPGKDPAFSAVIHDKLQVPNTIRKAWNDRDNRCDICATHLNQLKQEAIQMVLTLEQAAGSEHYDASPCSPPPLSNIPTLVGSRHVGGLQQPRDWAFVPAPCATSNYTGFANKHGSKPSSLGVSNGAEKKSGSPTHQAKVSLQMATSPSNGNILNSVAIQAHQYLDGTWSLSRTNGVTLYPYQISQLMTESSREGLTEAVLNRYNADKPSACSVPASQGSCVASETSTGTSVAASFFARAAQKLNLSSKKKKHRPSTSSAAEPPLFATSFSGILQTSPPPAPPCLLRAVNKVKDTPGLGKVKVMLRICSTLARDTSESSSFLKVDPRKKQITLYDPLTCGGQNAFQKRGNQVPPKMFAFDAVFPQDASQAEVCAGTVAEVIQSVVNGADGCVFCFGHAKLGKSYTMIGKDDSMQNLGIIPCAISWLFKLINERKEKTGARFSVRVSAVEVWGKEENLRDLLSEVATGSLQDGQSPGVYLCEDPICGTQLQNQSELRAPTAEKAAFFLDAAIASRRSHQQDCDEDDHRNSHVFFTLHIYQYRMEKSGKGGMSGGRSRLHLIDLGSCVKALSKNREGGSGLCLSLSALGNVILALVNGSKHIPYKESKLAMLLRESLGNMNCRTTMIAHISAAVGSYAETLSTIQIASRVLRMKKKKTKYTSSSSGGESSCEEGRMRRPTQLRPFHTRATVDPDFPIAHLSSDPDYSSSSEQSCDTVIYIGPNGTALSDKELTDNEGPPDFVPIVPALQKTRGDSRPAEAGEAAAGKSERDCLKCNTFAELQERLDCIDGSEEPSSFPFEELPAQFGPEQASRGPRLSQAAGASPLSESDKEDNGSEGQLTNREGPELPASKMQRSHSPVPAAAPAHSPSPASPRSVPGSSSQHSASPLVQSPSLQSSRESLNSCGFVEGKPRPMGSPRLGIASLSKTSEYKPPSSPSQRCKVYTQKGVLPSPAPLPPSSKDSGVASRESLLQPEVRTPPVGMSPQVLKKSMSAGSEGFPETPVDDEQQAATPSESKKEILSTTMVTVQQPLELNGEDELVFTLVEELTISGVLDSGRPTSIISFNSDCSARALASGSRPVSIISSISEDLECYSSTAPVSEVSITQFLPLPKMSLDEKAQDAGSRRSSISSWLSEMSAGSEGEQSCHSFIAQTCFGHGEAMAEPVASEFVSSLQNTAVVCREKPKASPDNLLILSEMGDDSFNKAAPIKGCKISTVSKAMVTISNTANLSSCEGYIPMKTNITVYPCIAMSPRNIQEPEAPTATPKAGPTLAQSRESKENSAKKEMKFEDPWLKREEEVKKETAHPNEEGMMRCETATGPSNAETRAEQEQDGKPSPGDRLSSSSGEVSASPVTDNFRRVVDGCEMALPGLATQSPVHPNKSVKSSSLPRAFQKASRQEEPDSLSYYCAAETNGVGAASGTPPSKATLEGKVASPKHCVLARPKGTPPLPPVRKSSLDQKNRASPQHSASGSGTSSPLNQPAAFPAGLPDEPSGKTKDASSSSKLFSAKLEQLASRSNSLGRATVSHYECLSLERAESLSSVSSRLHAGKDGTMPRAGRSLGRSAGTSPPSSGASPKAGQSKISAVSRLLLASPRARGPSASTTKTLSFSTKSLPQAVGQGSSSPPGGKHTPWSTQSLSRNRSSGLASKLPLRAVSGRISELLQGGAGARGLQLRAGPEAEARGGALAEDEPAAAHLLPSPYSKITPPRRPHRCSSGHGSDNSSVLSGELPPAMGKTALFYHSGGSSGYESVMRDSEATGSASSAQDSTSENSSSVGGRCRSLKTPKKRSNPGSQRRRLIPALSLDTSSPVRKPPNSTGVRWVDGPLRSSPRGLGEPFEIKVYEIDDVERLQRRRGGASKEAMCFNAKLKILEHRQQRIAEVRAKYEWLMKELEATKQYLMLDPNKWLSEFDLEQVWELDSLEYLEALECVTERLESRVNFCKAHLMMITCFDITSRRR

SEQ ID NO: 50870 - protein, 1724 aa, Homo sapiens
DWKTKAAQKLNLSSKKKKHRPSTSSAAEPPLFATSFSGILQTSPPPAPPCLLRAVNKVKDTPGLGKVKVMLRICSTLARDTSESSSFLKVDPRKKQITLYDPLTCGGQNAFQKRGNQVPPKMFAFDAVFPQDASQAEVCAGTVAEVIQSVVNGADGCVFCFGHAKLGKSYTMIGKDDSMQNLGIIPCAISWLFKLINERKEKTGARFSVRVSAVEVWGKEENLRDLLSEVATGSLQDGQSPGVYLCEDPICGTQLQNQSELRAPTAEKAAFFLDAAIASRRSHQQDCDEDDHRNSHVFFTLHIYQYRMEKSGKGGMSGGRSRLHLIDLGSCVKALSKNREGGSGLCLSLSALGNVILALVNGSKHIPYKESKLAMLLRESLGNMNCRTTMIAHISAAVGSYAETLSTIQIASRVLRMKKKKTKYTSSSSGGESSCEEGRMRRPTQLRPFHTRATVDPDFPIAHLSSDPDYSSSSEQSCDTVIYIGPNGTALSDKELTDNEGPPDFVPIVPALQKTRGDSRPAEAGEAAAGKSERDCLKCNTFAELQERLDCIDGSEEPSSFPFEELPAQFGPEQASRGPRLSQAAGASPLSESDKEDNGSEGQLTNREGPELPASKMQRSHSPVPAAAPAHSPSPASPRSVPGSSSQHSASPLVQSPSLQSSRESLNSCGFVEGKPRPMGSPRLGIASLSKTSEYKPPSSPSQRCKVYTQKGVLPSPAPLPPSSKDSGVASRESLLQPEVRTPPVGMSPQVLKKSMSAGSEGFPETPVDDEQQAATPSESKKEILSTTMVTVQQPLELNGEDELVFTLVEELTISGVLDSGRPTSIISFNSDCSARALASGSRPVSIISSISEDLECYSSTAPVSEVSITQFLPLPKMSLDEKAQDAGSRRSSISSWLSEMSAGSEGEQSCHSFIAQTCFGHGEAMAEPVASEFVSSLQNTAVVCREKPKASPDNLLILSEMGDDSFNKAAPIKGCKISTVSKAMVTISNTANLSSCEGYIPMKTNITVYPCIAMSPRNIQEPEAPTATPKAGPTLAQSRESKENSAKKEMKFEDPWLKREEEVKKETAHPNEEGMMRCETATGPSNAETRAEQEQDGKPSPGDRLSSSSGEVSASPVTDNFRRVVDGCEMALPGLATQSPVHPNKSVKSSSLPRAFQKASRQEEPDSLSYYCAAETNGVGAASGTPPSKATLEGKVASPKHCVLARPKGTPPLPPVRKSSLDQKNRASPQHSASGSGTSSPLNQPAAFPAGLPDEPSGKTKDASSSSKLFSAKLEQLASRSNSLGRATVSHYECLSLERAESLSSVSSRLHAGKDGTMPRAGRSLGRSAGTSPPSSGASPKAGQSKISAVSRLLLASPRARGPSASTTKTLSFSTKSLPQAVGQGSSSPPGGKHTPWSTQSLSRNRSSGLASKLPLRAVSGRISELLQGGAGARGLQLRAGPEAEARGGALAEDEPAAAHLLPSPYSKITPPRRPHRCSSGHGSDNSSVLSGELPPAMGKTALFYHSGGSSGYESVMRDSEATGSASSAQDSTSENSSSVGGRCRSLKTPKKRSNPGSQRRRLIPALSLDTSSPVRKPPNSTGVRWVDGPLRSSPRGLGEPFEIKVYEIDDVERLQRRRGGASKEAMCFNAKLKILEHRQQRIAEVRAKYEWLMKELEATKQYLMLDPNKWLSEFDLEQVWELDSLEYLEALECVTERLESRVNFCKAHLMMITCFDITSRRR

SEQ ID NO: 50871 - protein, 671 aa, Homo sapiens
MIDFDDVAAINPELLQLLPLHPKDNLPLQENVTIQKQKRRSVNSKIPAPKESLRSRSTRMSTVSELRITAQENDMEVELPAAANSRKQFSVPPAPTRPSCPAVAEIPLRMVSEEMEEQVHSIRGSSSANPVNSVRRKSCLVKEVEKMKNKREEKKAQNSEMRMKRAQEYDSSFPNWEFARMIKEFRATLECHPLTMTDPIEEHRICVCVRKRPLNKQELAKKEIDVISIPSKCLLLVHEPKLKVDLTKYLENQAFCFDFAFDETASNEVVYRFTARPLVQTIFEGGKATCFAYGQTGSGKTHTMGGDLSGKAQNASKGIYAMASRDVFLLKNQPCYRKLGLEVYVTFFEIYNGKLFDLLNKKAKLRVLEDGKQQVQVVGLQEHLVNSADDVIKMIDMGSACRTSGQTFANSNSSRSHACFQIILRAKGRMHGKFSLVDLAGNERGADTSSADRQTRMEGAEINKSLLALKECIRALGQNKAHTPFRESKLTQVLRDSFIGENSRTCMIATISPGISSCEYTLNTLRYADRVKELSPHSGPSGEQLIQMETEEMEACSNGALIPGNLSKEEEELSSQMSSFNEAMTQIRELEEKAMEELKEIIQQGPDWLELSEMTEQPDYDLETFVNKAESALAQQAKHFSALRDVIKALRLAMQLEEQASRQISSKKRPQ

SEQ ID NO: 50872 - protein, 684 aa, Homo sapiens
MAMDSSLQARLFPGLAIKIQRSNGLIHSANVRTVNLEKSCVSVEWAEGGATKGKEIDFDDVAAINPELLQLLPLHPKDNLPLQENVTIQKQKRRSVNSKIPAPKESLRSRSTRMSTVSELRITAQENDMEVELPAAANSRKQFSVPLRRKSCLVKEVEKMKNKREEKKAQNSEMRMKRAQEYDSSFPNWEFARMIKEFRATLECHPLTMTDPIEEHRICVCVRKRPLNKQELAKKEIDVISIPSKCLLLVHEPKLKVDLTKYLENQAFCFDFAFDETASNEVVYRFTARPLVQTIFEGGKATCFAYGQTGSGKTHTMGGDLSGKAQNASKGIYAMASRDVFLLKNQPCYRKLGLEVYVTFFEIYNGKLFDLLNKKAKLRVLEDGKQQVQVVGLQEHLVNSADDVIKMIDMGSACRTSGQTFANSNSSRSHACFQIILRAKGRMHGKFSLVDLAGNERGADTSSADRQTRMEGAEINKSLLALKECIRALGQNKAHTPFRESKLTQVLRDSFIGENSRTCMIATISPGISSCEYTLNTLRYADRVKELSPHSGPSGEQLIQMETEEMEACSNGALIPGNLSKEEEELSSQMSSFNEAMTQIRELEEKAMEELKEIIQQGPDWLELSEMTEQPDYDLETFVNKAESALAQQAKHFSALRDVIKALRLAMQLEEQASRQISSKKRPQ

SEQ ID NO: 50873 - protein, 612 aa, Homo sapiens
MSTVSELRITAQENDMEVELPAAANSRKQFSVPPAPTRPSCPAVAEIPLRMVSEEMEEQVHSIRGSSSANPVNSVRRKSCLVKEVEKMKNKREEKKAQNSEMRMKRAQEYDSSFPNWEFARMIKEFRATLECHPLTMTDPIEEHRICVCVRKRPLNKQELAKKEIDVISIPSKCLLLVHEPKLKVDLTKYLENQAFCFDFAFDETASNEVVYRFTARPLVQTIFEGGKATCFAYGQTGSGKTHTMGGDLSGKAQNASKGIYAMASRDVFLLKNQPCYRKLGLEVYVTFFEIYNGKLFDLLNKKAKLRVLEDGKQQVQVVGLQEHLVNSADDVIKMIDMGSACRTSGQTFANSNSSRSHACFQIILRAKGRMHGKFSLVDLAGNERGADTSSADRQTRMEGAEINKSLLALKECIRALGQNKAHTPFRESKLTQVLRDSFIGENSRTCMIATISPGISSCEYTLNTLRYADRVKELSPHSGPSGEQLIQMETEEMEACSNGALIPGNLSKEEEELSSQMSSFNEAMTQIRELEEKAMEELKEIIQQGPDWLELSEMTEQPDYDLETFVNKAESALAQQAKHFSALRDVIKALRLAMQLEEQASRQISSKKRPQ

SEQ ID NO: 50874 - protein, 725 aa, Homo sapiens
MAMDSSLQARLFPGLAIKIQRSNGLIHSANVRTVNLEKSCVSVEWAEGGATKGKEIDFDDVAAINPELLQLLPLHPKDNLPLQENVTIQKQKRRSVNSKIPAPKESLRSRSTRMSTVSELRITAQENDMEVELPAAANSRKQFSVPPAPTRPSCPAVAEIPLRMVSEEMEEQVHSIRGSSSANPVNSVRRKSCLVKEVEKMKNKREEKKAQNSEMRMKRAQEYDSSFPNWEFARMIKEFRATLECHPLTMTDPIEEHRICVCVRKRPLNKQELAKKEIDVISIPSKCLLLVHEPKLKVDLTKYLENQAFCFDFAFDETASNEVVYRFTARPLVQTIFEGGKATCFAYGQTGSGKTHTMGGDLSGKAQNASKGIYAMASRDVFLLKNQPCYRKLGLEVYVTFFEIYNGKLFDLLNKKAKLRVLEDGKQQVQVVGLQEHLVNSADDVIKMIDMGSACRTSGQTFANSNSSRSHACFQIILRAKGRMHGKFSLVDLAGNERGADTSSADRQTRMEGAEINKSLLALKECIRALGQNKAHTPFRESKLTQVLRDSFIGENSRTCMIATISPGISSCEYTLNTLRYADRVKELSPHSGPSGEQLIQMETEEMEACSNGALIPGNLSKEEEELSSQMSSFNEAMTQIRELEEKAMEELKEIIQQGPDWLELSEMTEQPDYDLETFVNKAESALAQQAKHFSALRDVIKALRLAMQLEEQASRQISSKKRPQ

SEQ ID NO: 50875 - protein, 107 aa, Homo sapiens
  VARIANT 1: note = MOD_RES - Any amino acid
XKECIRALGQNKAHTPFRESKLTQVLRDSFIGENSRTCMIATISPGISSCEYTLNTLRYADRQGCHSIPLEPQASKPGRCHIPLLSKEEEELSSQMSSFNEAMTQIR

SEQ ID NO: 50876 - protein, 336 aa, Homo sapiens
MAMDSSLQARLFPGLAIKIQRSNGLIHSANVRTVNLEKSCVSVEWAEGGATKGKEIDFDDVAAINPELLQLLPLHPKDNLPLQENVTIQKQKRRSVNSKIPAPKESLRSRSTRMSTVSELRITAQENDMEVELPAAANSRKQFSVPLRRKSCLVKEVEKMKNKREEKKAQNSEMRMKRAQEYDSSFPNWEFARMIKEFRATLECHPLTMTDPIEEHRICVCVRKRPLNKQELAKKEIDVISIPSKCLLLVHEPKLKVDLTKYLENQAFCFDFAFDETASNEVVYRFTARPLVQTIFEGGKATCFAYGQTGSGKTHTMGGDLSGKAQNASKGIYAMA

SEQ ID NO: 50877 - protein, 287 aa, Homo sapiens
MVRSGVPRSRGLVSGLIHSANVRTVNLEKSCVSVEWAEGGATKGKEIDFDDVAAINPELLQLLPLHPKDNLPLQENVTIQKQKRRSVNSKIPAPKESLRSRSTRMSTVSELRITAQENDMEVELPAAANSRKQFSVPPAPTRPSCPAVAEIPLRMVSEEMEEQVHSIRGSSSANPVNSVRRKSCLVKEVEKMKNKREEKKAQNSEMRMKRAQEYDSSFPNWEFARMIKEFRATLECHPLTMTDPIEEHRICVCVRKRPLNKQELAKKEIDVISIPSKCLLLVHEPKL

SEQ ID NO: 50878 - protein, 747 aa, Homo sapiens
MSKLKSSESVRVVVRCRPMNGKEKAASYDKVVDVDVKLGQVSVKNPKGTAHEMPKTFTFDAVYDWNAKQFELYDETFRPLVDSVLQGFNGTIFAYGQTGTGKTYTMEGIRGDPEKRGVIPNSFDHIFTHISRSQNQQYLVRASYLEIYQEEIRDLLSKDQTKRLELKERPDTGVYVKDLSSFVTKSVKEIEHVMNVGNQNRSVGATNMNEHSSRSHAIFVITIECSEVGLDGENHIRVGKLNLVDLAGSERQAKTGAQGERLKEATKINLSLSALGNVISALVDGKSTHIPYRDSKLTRLLQDSLGGNAKTVMVANVGPASYNVEETLTTLRYANRAKNIKNKPRVNEDPKDALLREFQEEIARLKAQLEKRSIGRRKRREKRREGGGSGGGGEEEEEEGEEGEEEGDDKDDYWREQQEKLEIEKRAIVEDHSLVAEEKMRLLKEKEKKMEDLRREKDAAEMLGAKIKAMESKLLVGGKNIVDHTNEQQKILEQKRQEIAEQKRREREIQQQMESRDEETLELKETYSSLQQEVDIKTKKLKKLFSKLQAVKAEIHDLQEEHIKERQELEQTQNELTRELKLKHLIIENFIPLEEKSKIMNRAFFDEEEDHWKLHPITRLENQQMMKRPVSAVGYKRPLSQHARMSMMIRPEARYRAENIVLLELDMPSRTTRDYEGPAIAPKVQAALDAALQDEDEIQVDASSFESTANKKSKARPKSGRKSGSSSSSSGTPASQLYPQSRGLVPK

SEQ ID NO: 50879 - protein, 373 aa, Homo sapiens
MVANVGPASYNVEETLTTLRYANRAKNIKNKPRVNEDPKDALLREFQEEIARLKAQLEKRSIEEKMRLLKEKEKKMEDLRREKDAAEMLGAKIKAMESKLLVGGKNIVDHTNEQQKILEQKRQEIAEQKRREREIQQQMESRDEETLELKETYSSLQQEVDIKTKKLKKLFSKLQAVKAEIHDLQEEHIKERQELEQTQNELTRELKLKHLIIENFIPLEEKSKIMNRAFFDEEEDHWKLHPITRLENQQMMKRPVSAVGYKRPLSQHARMSMMIRPEARYRAENIVLLELDMPSRTTRDYEGPAIAPKVQAALDAALQDEDEIQVDASSFESTANKKSKARPKSGRKSGSSSSSSGTPASQLYPQSRGLVPK

SEQ ID NO: 50880 - protein, 793 aa, Homo sapiens
MASKTKASEALKVVARCRPLSRKEEAAGHEQILTMDVKLGQVTLRNPRAAPGELPKTFTFDAVYDASSKQADLYDETVRPLIDSVLQGFNGTVFAYGQTGTGKTYTMQGTWVEPELRGVIPNAFEHIFTHISRSQNQQYLVRASYLEIYQEEIRDLLSKEPGKRLELKENPETGVYIKDLSSFVTKNVKEIEHVMNLGNQTRAVGSTHMNEVSSRSHAIFIITVECSERGSDGQDHIRVGKLNLVDLAGSERQNKAGPNTAGGAATPSSGGGGGGGGSGGGAGGERPKEASKINLSLSALGNVIAALAGNRSTHIPYRDSKLTRLLQDSLGGNAKTIMVATLGPASHSYDESLSTLRFANRAKNIKNKPQVNEDPKDTLLREFQEEIARLKAQLEKRGMLGKRPRRKSSRRKKAVSAPPGYPEGPVIEAWVAEEEDDNNNNHRPPQPILESALEKNMENYLQEQKERLEEEKAAIQDDRSLVSEEKQKLLEEKEKMLEDLRREQQATELLAAKYKAMESKLLIGGRNIMDHTNEQQKMLELKRQEIAEQKRREREMQQEMMLRDEETMELRGTYTSLQQEVEVKTKKLKKLYAKLQAVKAEIQDQHDEYIRVRQDLEEAQNEQTRELKLKYLIIENFIPPEEKNKIMNRLFLDCEEEQWKFQPLVPAGVSSSQMKKRPTSAVGYKRPISQYARVAMAMGSHPRYRAENIMFLELDVSPPAVFEMEFSHDQEQDPRALHMERLMRLDSFLERPSTSKVRKSRSWCQSPQRPPPSTTHASLASASLRPATVADHE

SEQ ID NO: 50881 - protein, 793 aa, Homo sapiens; identical to SEQ ID NO: 50880

SEQ ID NO: 50882 - protein, 599 aa, Homo sapiens
MNLGNQTRAVGSTHMNEVSSRSHAIFIITVECSERGSDGQDHIRVGKLNLVDLAGSERQNKAGPNTAGGAATPSSGGGGGGGGSGGGAGGERPKEASKINLSLSALGNVIAALAGNRSTHIPYRDSKLTRLLQDSLGGNAKTIMVATLGPASHSYDESLSTLRFANRAKNIKNKPQVNEDPKDTLLREFQEEIARLKAQLEKRGMLGKRPRRKSSRRKKAVSAPPGYPEGPVIEAWVAEEEDDNNNNHRPPQPILESALEKNMENYLQEQKERLEEEKAAIQDDRSLVSEEKQKLLEEKEKMLEDLRREQQATELLAAKYKAMESKLLIGGRNIMDHTNEQQKMLELKRQEIAEQKRREREMQQEMMLRDEETMELRGTYTSLQQEVEVKTKKLKKLYAKLQAVKAEIQDQHDEYIRVRQDLEEAQNEQTRELKLKYLIIENFIPPEEKNKIMNRLFLDCEEEQWKFQPLVPAGVSSSQMKKRPTSAVGYKRPISQYARVAMAMGSHPRYRAENIMFLELDVSPPAVFEMEFSHDQEQDPRALHMERLMRLDSFLERPSTSKVRKSRSWCQSPQRPPPSTTHASLASASLRPATVADHE

SEQ ID NO: 50883 - protein, 1127 aa, Homo sapiens
MKEEVKGIPVRVALRCRPLVPKEISEGCQMCLSFVPGEPQVVVGTDKSFTYDFVFDPSTEQEEVFNTAVAPLIKGVFKGYNATVLAYGQTGSGKTYSMGGAYTAEQENEPTVGVIPRVIQLLFKEIDKKSDFEFTLKVSYLEIYNEEILDLLCPSREKAQINIREDPKEGIKIVGLTEKTVLVALDTVSCLEQGNNSRTVASTAMNSQSSRSHAIFTISLEQRKKSDKNSSFRSKLHLVDLAGSERQKKTKAEGDRLKEGININRGLLCLGNVISALGDDKKGGFVPYRDSKLTRLLQDSLGGNSHTLMIACVSPADSNLEETLNTLRYADRARKIKNKPIVNIDPQTAELNHLKQQVQQLQVLLLQAHGGTLPGSITVEPSENLQSLMEKNQSLVEENEKLSRGLSEAAGQTAQMLERIILTEQANEKMNAKLEELRQHAACKLDLQKLVETLEDQELKENVEIICNLQQLITQLSDETVACMAAAIDTAVEQEAQVETSPETSRSSDAFTTQHALRQAQMSKELVELNKALALKEALARKMTQNDSQLQPIQYQYQDNIKELELEVINLQKEKEELVLELQTAKKDANQAKLSERRRKRLQELEGQIADLKKKLNEQSKLLKLKESTERTVSKLNQEIRMMKNQRVQLMRQMKEDAEKFRQWKQKKDKEVIQLKERDRKRQYELLKLERNFQKQSNVLRRKTEEAAAANKRLKDALQKQREVADKRKETQSRGMEGTAARVKNWLGNEIEVMVSTEEAKRHLNDLLEDRKILAQDVAQLKEKKESGENPPPKLRRRTFSLTEVRGQVSESEDSITKQIESLETEMEFRSAQIADLQQKLLDAESEDRPKQRWENIATILEAKCALKYLIGELVSSKIQVSKLESSLKQSKTSCADMQKMLFEERNHFAEIETELQAELVRMEQQHQEKVLYLLSQLQQSQMAEKQLEESVSEKEQQLLSTLKCQDEELEKMREVCEQNQQLLRENEIIKQKLTLLQVASRQKHLPKDTLLSPDSSFEYVPPKPKPSRVKEKFLEQSMDIEDLKYCSEHSVNEHEDGDGDDDEGDDEEWKPTKLVKVSRKNIQGVLLLTPVISALWEAEARGLLEARSSRPAWATWRDPVSTKPKN

SEQ ID NO: 50884 - protein, 1232 aa, Homo sapiens
MKEEVKGIPVRVALRCRPLVPKEISEGCQMCLSFVPGEPQVVVGTDKSFTYDFVFDPSTEQEEVFNTAVAPLIKGVFKGYNATVLAYGQTGSGKTYSMGGAYTAEQENEPTVGVIPRVIQLLFKEIDKKSDFEFTLKVSYLEIYNEEILDLLCPSREKAQINIREDPKEGIKIVGLTEKTVLVALDTVSCLEQGNNSRTVASTAMNSQSSRSHAIFTISLEQRKKSDKNSSFRSKLHLVDLAGSERQKKTKAEGDRLKEGININRGLLCLGNVISALGDDKKGGFVPYRDSKLTRLLQDSLGGNSHTLMIACVSPADSNLEETLNTLRYADRARKIKNKPIVNIDPQTAELNHLKQQVQQLQVLLLQAHGGTLPGSITVEPSENLQSLMEKNQSLVEENEKLSRGLSEAAGQTAQMLERIILTEQANEKMNAKLEELRQHAACKLDLQKLVETLEDQELKENVEIICNLQQLITQLSDETVACMAAAIDTAVEQEAQVETSPETSRSSDAFTTQHALRQAQMSKELVELNKALALKEALARKMTQNDSQLQPIQYQYQDNIKELELEVINLQKEKEELVLELQTAKKDANQAKLSERRRKRLQELEGQIADLKKKLNEQSKLLKLKESTERTVSKLNQEIRMMKNQRVQLMRQMKEDAEKFRQWKQKKDKEVIQLKERDRKRQYELLKLERNFQKQSNVLRRKTEEAAAANKRLKDALQKQREVADKRKETQSRGMEGTAARVKNWLGNEIEVMVSTEEAKRHLNDLLEDRKILAQDVAQLKEKKESGENPPPKLRRRTFSLTEVRGQVSESEDSITKQIESLETEMEFRSAQIADLQQKLLDAESEDRPKQRWENIATILEAKCALKYLIGELVSSKIQVSKLESSLKQSKTSCADMQKMLFEERNHFAEIETELQAELVRMEQQHQEKVLYLLSQLQQSQMAEKQLEESVSEKEQQLLSTLKCQDEELEKMREVCEQNQQLLRENEIIKQKLTLLQVASRQKHLPKDTLLSPDSSFEYVPPKPKPSRVKEKFLEQSMDIEDLKYCSEHSVNEHEDGDGDDDEGDDEEWKPTKLVKVSRKNIQGCSCKGWCGNKQCGCRKQKSDCGVDCCCDPTKCRNRQQGKDSLGTVERTQDSEGSFKLEDPTEVTPGLSFFNPVCATPNSKILKEMCDVEQVLSKKTPPAPSPFDLPELKHVATEYQENKAPGKKKKRALASNTSFFSGCSPIEEEAH

SEQ ID NO: 50885 - protein, 534 aa, Homo sapiens
MCSDVKREAAAANKRLKDALQKQREVADKRKETQSRGMEGTAARVKNWLGNEIEVMVSTEEAKRHLNDLLEDRKILAQDVAQLKEKKESGENPPPKLRRRTFSLTEVRGQVSESEDSITKQIESLETEMEFRSAQIADLQQKLLDAESEDRPKQRWENIATILEAKCALKYLIGELVSSKIQVSKLESSLKQSKTSCADMQKMLFEERNHFAEIETELQAELVRMEQQHQEKVLYLLSQLQQSQMAEKQLEESVSEKEQQLLSTLKCQDEELEKMREVCEQNQQLLRENEIIKQKLTLLQVASRQKHLPKDTLLSPDSSFEYVPPKPKPSRVKEKFLEQSMDIEDLKYCSEHSVNEHEDGDGDDDEGDDEEWKPTKLVKVSRKNIQGCSCKGWCGNKQCGCRKQKSDCGVDCCCDPTKCRNRQQGKDSLGTVERTQDSEGSFKLEDPTEVTPGLSFFNPVCATPNSKILKEMCDVEQVLSKKTPPAPSPFDLPELKHVATEYQENKAPGKKKKRALASNTSFFSGCSPIEEEAH

SEQ ID NO: 50886 - protein, 1234 aa, Homo sapiens
MKEEVKGIPVRVALRCRPLVPKEISEGCQMCLSFVPGETQVVVGTDKSFTYDFVFDPCTEQEEVFNKAVAPLIKGIFKGYNATVLAYGQTGSGKTYSMGGAYTAEQENEPTVGIIPRVIQLLFKEIDKKSDFEFTLKVSYLEIYNEEILDLLCPSREKAQINIREDPKEGIKIVGLTEKTVLVALDTVSCLEQGNNSRTVASTAMNSQSSRSHAIFTISIEQRKKSDKNCSFRSKLHLVDLAGSERQKKTKAEGDRLKEGININRGLLCLGNVISALGDDKKGSFVPYRDSKLTRLLQDSLGGNSHTLMIACVSPADSNLEETLSTLRYADRARKIKNKPIVNIDPHTAELNHLKQQVQQLQVLLLQAHGGTLPGSINAEPSENLQSLMEKNQSLVEENEKLSRCLSKAAGQTAQMLERIILTEQVNEKLNAKLEELRQHVACKLDLQKLVETLEDQELKENVEIICNLQQLITQLSDETVACTAAAIDTAVEEEAQVETSPETSRSSDAFTTQHALHQAQMSKEVVELNNALALKEALVRKMTQNDNQLQPIQFQYQDNIKNLELEVINLQKEKEELVRELQTAKKNVNQAKLSEHRHKLLQELEGQIADLKKKLNEQSKLLKLKESTERTVSKLNQEIWMMKNQRVQLMRQMKEDAEKFRQWKQKKDKEVIQLKERDRKRQYELLKLERNFQKQSSVLRRKTEEAAAANKRLKDALQKQREVTDKRKETQSHGKEGIAARVRNWLGNEIEVMVSTEEAKRHLNDLLEDRKILAQDVVQLKEKKESRENPPPKLRKCTFSLSEVHGQVLESEDCITKQIESLETEMELRSAQIADLQQKLLDAESEDRPKQCWENIATILEAKCALKYLIGELVSSKIHVTKLENSLRQSKASCADMQKMLFEEQNHFSEIETELQAELVRMEQQHQEKVLYLVSQLQESQMAEKQLEKSASEKEQQLVSTLQCQDEELEKMREVCEQNQQLLQENEIIKQKLILLQVASRQKHLPNDTLLSPDSSFEYIPPKPKPSRVKEKFLEQSMDIEDLKYCSEHSVNEHEDGDGDGDSDEGDDEEWKPTKLVKVSRKNIQGCSCKGWCGNKQCGCRKQKSDCGVDCSCDPTKCRNRQQGKDSLGTVEQTQDSEGSFKLEDPTEVTPGLSFFNPVCATPNSKILKEMCDMEQVLSKKTAPAPSPFDLPESKHGATEYQQNKPPGKKKKRALASNTSFFSGCSPIEEEAH

SEQ ID NO: 50887 - protein, 1032 aa, Homo sapiens
MAETNNECSIKVLCRFRPLNQAEILRGDKFIPIFQGDDSVVIGGKPYVFDRVFPPNTTQEQVYHACAMQIVKDVLAGYNGTIFAYGQTSSGKTHTMEGKLHDPQLMGIIPRIARDIFNHIYSMDENLEFHIKVSYFEIYLDKIRDLLDVTKTNLSVHEDKNRVPFVKGCTERFVSSPEEILDVIDEGKSNRHVAVTNMNEHSSRSHSIFLINIKQENMETEQKLSGKLYLVDLAGSEKVSKTGAEGAVLDEAKNINKSLSALGNVISALAEGTKSYVPYRDSKMTRILQDSLGGNCRTTMFICCSPSSYNDAETKSTLMFGQRAKTIKNTASVNLELTAEQWKKKYEKEKEKTKAQKETIAKLEAELSRWRNGENVPETERLAGEEAALGAELCEETPVNDNSSIVVRIAPEERQKYEEEIRRLYKQLDDKDDEINQQSQLIEKLKQQMLDQEELLVSTRGDNEKVQRELSHLQSENDAAKDEVKEVLQALEELAVNYDQKSQEVEEKSQQNQLLVDELSQKVATMLSLESELQRLQEVSGHQRKRIAEVLNGLMKDLSEFSVIVGNGEIKLPVEISGAIEEEFTVARLYISKIKSEVKSVVKRCRQLENLQVECHRKMEVTGRELSSCQLLISQHEAKIRSLTEYMQSVELKKRHLEESYDSLSDELAKLQAQETVHEVALKDKEPDTQDADEVKKALELQMESHREAHHRQLARLRDEINEKQKTIDELKDLNQKLQLELEKLQADYEKLKSEEHEKSTKLQELTFLYERHEQSKQDLKGLEETVARELQTLHNLRKLFVQDVTTRVKKSAEMEPEDSGGIHSQKQKISFLENNLEQLTKVHKQLVRDNADLRCELPKLEKRLRATAERVKALEGALKEAKEGAMKDKRRYQQEVDRIKEAVRYKSSGKRGHSAQIAKPVRPGHYPASSPTNPYGTRSPECISYTNSLFQNYQNLYLQATPSSTSDMYFANSCTSSGATSSGGPLASYQKANMDNGNATDINDNRSDLPCGYEAEDQAKLFPLHQETAAS

SEQ ID NO: 50888 - protein, 126 aa, Homo sapiens
KSSGKRGHSAQIAKPVRPGHYPASSPTNPYGTRSPECISYTNSLFQNYQNLYLQATPSSTSDMYFANSCTSSGATSSGGPLASYQKANMDNGNATDINDNRSDLPCGYEAEDQAKLFPLHQETAAS

SEQ ID NO: 50889 - protein, 963 aa, Homo sapiens
MADLAECNIKVMCRFRPLNESEVNRGDKYIAKFQGEDTVVIASKPYAFDRVFQSSTSQEQVYNDCAKKIVKDVLEGYNGTIFAYGQTSSGKTHTMEGKLHDPEGMGIIPRIVQDIFNYIYSMDENLEFHIKVSYFEIYLDKIRDLLDVSKTNLSVHEDKNRVPYVKGCTERFVCSPDEVMDTIDEGKSNRHVAVTNMNEHSSRSHSIFLINVKQENTQTEQKLSGKLYLVDLAGSEKVSKTGAEGAVLDEAKNINKSLSALGNVISALAEGSTYVPYRDSKMTRILQDSLGGNCRTTIVICCSPSSYNESETKSTLLFGQRAKTIKNTVCVNVELTAEQWKKKYEKEKEKNKILRNTIQWLENELNRWRNGETVPIDEQFDKEKANLEAFTVDKDITLTNDKPATAIGVIGNFTDAERRKCEEEIAKLYKQLDDKDEEINQQSQLVEKLKTQMLDQEELLASTRRDQDNMQAELNRLQAENDASKEEVKEVLQALEELAVNYDQKSQEVEDKTKEYELLSDELNQKSATLASIDAELQKLKEMTNHQKKRAAEMMASLLKDLAEIGIAVGNNDVKQPEGTGMIDEEFTVARLYISKMKSEVKTMVKRCKQLESTQTESNKKMEENEKELAACQLRISQHEAKIKSLTEYLQNVEQKKRQLEESVDALSEELVQLRAQEKVHEMEKEHLNKVQTANEVKQAVEQQIQSHRETHQKQISSLRDEVEAKAKLITDLQDQNQKMMLEQERLRVEHEKLKATDQEKSRKLHELTVMQDRREQARQDLKGLEETVAKELQTLHNLRKLFVQDLATRVKKSAEIDSDDTGGSAAQKQKISFLENNLEQLTKVHKQLVRDNADLRCELPKLEKRLRATAERVKALESALKEAKENASRDRKRYQQEVDRIKEAVRSKNMARRGHSAQIAKPIRPGQHPAASPTHPSAIRGGGAFVQNSQPVAVRGGGGKQV

SEQ ID NO: 50890 - protein, 860 aa, Homo sapiens
GKLHDPQLMGIIPRIAHDIFDHIYSMDENLEFHIKVSYFEIYLDKIRDLLDVSKTNLAVHEDKNRVPYVKGCTERFVSSPEEVMDVIDEGKANRHVAVTNMNEHSSRSHSIFLINIKQENVETEKKLSGKLYLVDLAGSEKVSKTGAEGAVLDEAKNINKSLSALGNVISALAEGTKTHVPYRDSKMTRILQDSLGGNCRTTIVICCSPSVFNEAETKSTLMFGQRAKTIKNTVSVNLELTAEEWKKKYEKEKEKNKTLKNVIQHLEMELNRWRNGEAVPEDEQISAKDQKNLEPCDNTPIIDNIAPVVAGISTEEKEKYDEEISSLYRQLDDKDDEINQQSQLAEKLKQQMLDQDELLASTRRDYEKIQEELTRLQIENEAAKDEVKEVLQALEELAVNYDQKSQEVEDKTRANEQLTDELAQKTTTLTTTQRELSQLQELSNHQKKRATEILNLLLKDLGEIGGIIGTNDVKTLADVNGVIEEEFTMARLYISKMKSEVKSLVNRSKQLESAQMDSNRKMNASERELAACQLLISQHEAKIKSLTDYMQNMEQKRRQLEESQDSLSEELAKLRAQEKMHEVSFQDKEKEHLTRLQDAEEMKKALEQQMESHREAHQKQLSRLRDEIEEKQKIIDEIRDLNQKLQLEQEKLSSDYNKLKIEDQEREMKLEKLLLLNDKREQAREDLKGLEETVSRELQTLHNLRKLFVQDLTTRVKKSVELDNDDGGGSAAQKQKISFLENNLEQLTKVHKQLVRDNADLRCELPKLEKRLRATAERVKALESALKEAKENAMRDRKRYQQEVDRIKEAVRAKNMARRAHSAQIAKPIRPGHYPASSPTAVHAIRGGGGSSSNSTHYQK

SEQ ID NO: 50891 - protein, 725 aa, Homo sapiens
MATYIHVSKTGAEGAVLDEAKNINKSLSALGNVISALAEGTKTHVPYRDSKMTRILQDSLGGNCRTTIVICCSPSVFNEAETKSTLMFGQRAKTIKNTVSVNLELTAEEWKKKYEKEKEKNKTLKNVIQHLEMELNRWRNGEAVPEDEQISAKDQKNLEPCDNTPIIDNIAPVVAGISTEEKEKYDEEISSLYRQLDDKDDEINQQSQLAEKLKQQMLDQDELLASTRRDYEKIQEELTRLQIENEAAKDEVKEVLQALEELAVNYDQKSQEVEDKTRANEQLTDELAQKTTTLTTTQRELSQLQELSNHQKKRATEILNLLLKDLGEIGGIIGTNDVKTLADVNGVIEEEFTMARLYISKMKSEVKSLVNRSKQLESAQMDSNRKMNASERELAACQLLISQHEAKIKSLTDYMQNMEQKRRQLEESQDSLSEELAKLRAQEKMHEVSFQDKEKEHLTRLQDAEEMKKALEQQMESHREAHQKQLSRLRDEIEEKQKIIDEIRDLNQKLQLEQEKLSSDYNKLKIEDQEREMKLEKLLLLNDKREQAREDLKGLEETVSRELQTLHNLRKLFVQDLTTRVKKSVELDNDDGGGSAAQKQKISFLENNLEQLTKVHKQLVRDNADLRCELPKLEKRLRATAERVKALESALKEAKENAMRDRKRYQQEVDRIKEAVRAKNMARRAHSAQIAKPIRPGHYPASSPTAVHAIRGGGGSSSNSTHYQK

SEQ ID NO: 50892 - protein, 862 aa, Homo sapiens
MWGKLHDPQLMGIIPRIAHDIFDHIYSMDENLEFHIKVSYFEIYLDKIRDLLDVSKTNLAVHEDKNRVPYVKGCTERFVSSPEEVMDVIDEGKANRHVAVTNMNEHSSRSHSIFLINIKQENVETEKKLSGKLYLVDLAGSEKVSKTGAEGAVLDEAKNINKSLSALGNVISALAEGTKTHVPYRDSKMTRILQDSLGGNCRTTIVICCSPSVFNEAETKSTLMFGQRAKTIKNTVSVNLELTAEEWKKKYEKEKEKNKTLKNVIQHLEMELNRWRNGEAVPEDEQISAKDQKNLEPCDNTPIIDNIAPVVAGISTEEKEKYDEEISSLYRQLDDKDDEINQQSQLAEKLKQQMLDQDELLASTRRDYEKIQEELTRLQIENEAAKDEVKEVLQALEELAVNYDQKSQEVEDKTRANEQLTDELAQKTTTLTTTQRELSQLQELSNHQKKRATEILNLLLKDLGEIGGIIGTNDVKTLADVNGVIEEEFTMARLYISKMKSEVKSLVNRSKQLESAQMDSNRKMNASERELAACQLLISQHEAKIKSLTDYMQNMEQKRRQLEESQDSLSEELAKLRAQEKMHEVSFQDKEKEHLTRLQDAEEMKKALEQQMESHREAHQKQLSRLRDEIEEKQKIIDEIRDLNQKLQLEQEKLSSDYNKLKIEDQEREMKLEKLLLLNDKREQAREDLKGLEETVSRELQTLHNLRKLFVQDLTTRVKKSVELDNDDGGGSAAQKQKISFLENNLEQLTKVHKQLVRDNADLRCELPKLEKRLRATAERVKALESALKEAKENAMRDRKRYQQEVDRIKEAVRAKNMARRAHSAQIAKPIRPGHYPASSPTAVHAIRGGGGSSSNSTHYQK

SEQ ID NO: 50893 - protein, 957 aa, Homo sapiens
MADPAECSIKVMCRFRPLNEAEILRGDKFIPKFKGDETVVIGQGKPYVFDRVLPPNTTQEQVYNACAKQIVKDVLEGYNGTIFAYGQTSSGKTHTMEGKLHDPQLMGIIPRIAHDIFDHIYSMDENLEFHIKVSYFEIYLDKIRDLLDVSKTNLAVHEDKNRVPYVKGCTERFVSSPEEVMDVIDEGKANRHVAVTNMNEHSSRSHSIFLINIKQENVETEKKLSGKLYLVDLAGSEKVSKTGAEGAVLDEAKNINKSLSALGNVISALAEGTKTHVPYRDSKMTRILQDSLGGNCRTTIVICCSPSVFNEAETKSTLMFGQRAKTIKNTVSVNLELTAEEWKKKYEKEKEKNKTLKNVIQHLEMELNRWRNGEAVPEDEQISAKDQKNLEPCDNTPIIDNIAPVVAGISTEEKEKYDEEISSLYRQLDDKDDEINQQSQLAEKLKQQMLDQDELLASTRRDYEKIQEELTRLQIENEAAKDEVKEVLQALEELAVNYDQKSQEVEDKTRANEQLTDELAQKTTTLTTTQRELSQLQELSNHQKKRATEILNLLLKDLGEIGGIIGTNDVKTLADVNGVIEEEFTMARLYISKMKSEVKSLVNRSKQLESAQMDSNRKMNASERELAACQLLISQHEAKIKSLTDYMQNMEQKRRQLEESQDSLSEELAKLRAQEKMHEVSFQDKEKEHLTRLQDAEEMKKALEQQMESHREAHQKQLSRLRDEIEEKQKIIDEIRDLNQKLQLEQEKLSSDYNKLKIEDQEREMKLEKLLLLNDKREQAREDLKGLEETVSRELQTLHNLRKLFVQDLTTRVKKSVELDNDDGGGSAAQKQKISFLENNLEQLTKVHKQLVRDNADLRCELPKLEKRLRATAERVKALESALKEAKENAMRDRKRYQQEVDRIKEAVRAKNMARRAHSAQIAKPIRPGHYPASSPTAVHAIRGGGGSSSNSTHYQK

SEQ ID NO: 50894 - protein, 72 aa, Homo sapiens
MADPAECSIKVMCRFRPLNEAEILRGDKFIPKFKGDETVVIGQGKPYVFDRVLPPNTTQEQVYNACAKQIVK

SEQ ID NO: 50895 - protein, 265 aa, Homo sapiens
MREEMSLGCQEAFEIFKRDHADSVTIDDNKQILKQRFSEAKALGESINEARSKIGHLKEEITQRHIQQVALGISENMAVPLMPDQQEEKLRSQLEEEKRRYKTMFTRLKALKVEIEHLQLLMDKAKVKLQKEFEVWWAEEATNLQVNSPAVNSLDHTKPFLQTSDSQHEWSQLLSNKSSGGWEVQDQGTGRFDVCDVNARKILPSPCPSPHSQKQSSTSTPLEDSIPKRPVSSIPLTGDSQTDSDIIAFIKARQSILQKQCLGSN

SEQ ID NO: 50896 - protein, 814 aa, Homo sapiens
MVKQTIQIFARVKPPVRKHQQGIYSIDEDEKLIPSLEIILPRDLADGFVNNKRESYKFKFQRIFDQDANQETVFENIAKPVAGSVLAGYNGTIFAYGQTGSGKTFTITGGAERYSDRGIIPRTLSYIFEQLQKDSSKIYTTHISYLEIYNECGYDLLDPRHEASSLEDLPKVTILEDPDQNIHLKNLTLHQATTEEEALNLLFLGDTNRMIAETPMNQASTRSHCIFTIHLSSKEPGSATVRHAKLHLVDLAGSERVAKTGVGGHLLTEAKYINLSLHYLEQVIIALSEKHRSHIPYRNSMMTSVLRDSLGGNCMTTMIATLSLEKRNLDESISTCRFAQRVALIKNEAVLNEEINPRLVIKRLQKEIQELKDELAMVTGEQRTEALTEAELLQLEKLITSFLEDQDSDSRLEVGADMRKVHHCFHHLKKLLNDKKILENNTVSSESKDQDCQEPLKEEEYRKLRDILKQRDNEINILVNMLKKEKKKAQEALHLAGMDRREFRQSQSPPFRLGNPEEGQRMRLSSAPSQAQDFSILGKRSSLLHKKIGMREEMSLGCQEAFEIFKRDHADSVTIDDNKQILKQRFSEAKALGESINEARSKIGHLKEEITQRHIQQVALGISENMAVPLMPDQQEEKLRSQLEEEKRRYKTMFTRLKALKVEIEHLQLLMDKAKVKLQKEFEVWWAEEATNLQVNSPAVNSLDHTKPFLQTSDSQHEWSQLLSNKSSGGWEVQDQGTGRFDVCDVNARKILPSPCPSPHSQKQSSTSTPLEDSIPKRPVSSIPLTGDSQTDSDIIAFIKARQSILQKQCLGSN

SEQ ID NO: 50897 - protein, 165 aa, Homo sapiens
MIAETPMNQASTRSHCIFTIHLSSKEPGSATVRHAKLHLVDLAGSERVAKTGVGGHLLTEAKYINLSLHYLEQVIIALSEKHRSHIPYRNSMMTSVLRDSLGGNCMTTMIATLSLEKRNLDESISTCRFAQRVALIKNEAVLNEEINPRLKAPSSSDGVLFCRNQ

SEQ ID NO: 50898 - protein, 653 aa, Homo sapiens
MASSLYDLKKVTILEDPDQNIHLKNLTLHQATTEEEALNLLFLGDTNRMIAETPMNQASTRSHCIFTIHLSSKEPGSATVRHAKLHLVDLAGSERVAKTGVGGHLLTEAKYINLSLHYLEQVIIALSEKHRSHIPYRNSMMTSVLRDSLGGNCMTTMIATLSLEKRNLDESISTCRFAQRVALIKNEAVLNEEINPRLVIKRLQKEIQELKDELAMVTGEQRTEALTEAELLQLEKLITSFLEDQDSDSRLEVGADMRKVHHCFHHLKKLLNDKKILENNTVSSESKDQDCQEPLKEEEYRKLRDILKQRDNEINILVNMLKKEKKKAQEALHLAGMDRREFRQSQSPPFRLGNPEEGQRMRLSSAPSQAQDFSILGKRSSLLHKKIGMREEMSLGCQEAFEIFKRDHADSVTIDDNKQILKQRFSEAKALGESINEARSKIGHLKEEITQRHIQQVALGISENMAVPLMPDQQEEKLRSQLEEEKRRYKTMFTRLKALKVEIEHLQLLMDKAKVKLQKEFEVWWAEEATNLQVNSPAVNSLDHTKPFLQTSDSQHEWSQLLSNKSSGGWEVQDQGTGRFDVCDVNARKILPSPCPSPHSQKQSSTSTPLEDSIPKRPVSSIPLTGDSQTDSDIIAFIKARQSILQKQCLGSN

SEQ ID NO: 50899 - protein, 797 aa, Homo sapiens
MVKQTIQIFARVKPPVRKHQQGIYSIDEDEKLIPSLEIILPRDLADGFVNNKRESYKFKFQRIFDQDANQETVFENIAKPVAGSVLAGYNGTIFAYGQTGSGKTFTITGGAERYSDRGIIPRTLSYIFEQLQKDSSKIYTTHISYLEIYNECGYDLLDPRHEASSLEDLPKVTILEDPDQNIHLKNLTLHQATTEEEALNLLFLGDTNRMIAETPMNQASTRSHCIFTIHLSSKEPGSATVRHAKLHLVDLAGSERVAKTGVGGHLLTEAKYINLSLHYLEQVIIALSEKHRSHIPYRNSMMTSVLRDSLGGNCMTTMIATLSLEKRNLDESISTCRFAQRVALIKNEAVLNEEINPRLVIKRLQKEIQELKDELAMVTGEQRTEALTEAELLQLEKLITSFLEDQDSDSRLEVGADMRKVHHCFHHLKKLLNDKKILENNTVSSESKDQDCQEPLKEEEYRKLRDILKQRDNEINILVNMLKKEKKKAQEALHLAGMDRREFRQSQSPPFRLGNPEEGQRMRLSSAPSQAQDFSILGKRSSLLHKKIGMREEMSLGCQEAFEIFKRDHADSVTIDDNKQILKQRFSEAKALGESINEARSKIGISENMAVPLMPDQQEEKLRSQLEEEKRRYKTMFTRLKALKVEIEHLQLLMDKAKVKLQKEFEVWWAEEATNLQVNSPAVNSLDHTKPFLQTSDSQHEWSQLLSNKSSGGWEVQDQGTGRFDVCDVNARKILPSPCPSPHSQKQSSTSTPLEDSIPKRPVSSIPLTGDSQTDSDIIAFIKARQSILQKQCLGSN

SEQ ID NO: 50900 - protein, 797 aa, Homo sapiens
MVKQTIQIFARVKPPVRKHQQGIYSIDEDEKLIPSLEIILPRDLADGFVNNKRESYKFKFQRIFDQDANQETVFENIAKPVAGSVLAGYNGTIFAYGQTGSGKTFTITGGAERYSDRGIIPRTLSYIFEQLQKDSSKIYTTHISYLEIYNECGYDLLDPRHEASSLEDLPKVTILEDPDQNIHLKNLTLHQATTEEEALNLLFLGDTNRMIAETPMNQASTRSHCIFTIHLSSKEPGSATVRHAKLHLVDLAGSERVAKTGVGGHLLTEAKYINLSLHYLEQVIIALSEKHRSHIPYRNSMMTSVLRDSLGGNCMTTMIATLSLEKRNLDESISTCRFAQRVALIKNEAVLNEEINPRLVIKRLQKEIQELKDELAMVTGEQRTEALTEAELLQLEKLITSFLEDQDSDSRLEVGADMRKVHHCFHHLKKLLNDKKILENNTVSSESKDQDCQEPLKEEEYRKLRDILKQRDNEINILVNMLKKEKKKAQEALHLAGMDRREFRQSQSPPFRLGNPEEGQRMRLSSAPSQAQDFSILGKRSSLLHKKIGMREEMSLGCQEAFEIFKRDHADSVTIDDNKQILKQRFSEAKALGESINEARSKIGHLKEEITQRHIQQVALGISENMAVPLMPDQQEEKLRSQLEEEKRRYKTMFTRLKALKVEIEHLQLLMDKAKVKLQKEFEVWWAEEATNLQVNSPAVNSLDHTKPFLQTSDSQHEWSQLLSNKSDVNARKILPSPCPSPHSQKQSSTSTPLEDSIPKRPVSSIPLTGDSQTDSDIIAFIKARQSILQKQCLGSN

SEQ ID NO: 50901 - protein, 248 aa, Homo sapiens
MREEMSLGCQEAFEIFKRDHADSVTIDDNKQILKQRFSEAKALGESINEARSKIGHLKEEITQRHIQQVALGISENMAVPLMPDQQEEKLRSQLEEEKRRYKTMFTRLKALKVEIEHLQLLMDKAKVKLQKEFEVWWAEEATNLQVNSPAVNSLDHTKPFLQTSDSQHEWSQLLSNKSDVNARKILPSPCPSPHSQKQSSTSTPLEDSIPKRPVSSIPLTGDSQTDSDIIAFIKARQSILQKQCLGSN

SEQ ID NO: 50902 - protein, 161 aa, Homo sapiens
TPMNQASTRSHCIFTIHLSSKEPGSATVRHAKLHLVDLAGSERVAKTGVGGHLLTEAKYINLSLHYLEQVIIALSEKHRSHIPYRNSMMTSVLRDSLGGNCMTTMIATLSLEKRNLDESISTCRFAQRVALIKNEAVLNEEINPRLKAPSSSDGVLFCRNQ

SEQ ID NO: 50903 - protein, 689 aa, Homo sapiens
  VARIANT 1: note = MOD_RES - Any amino acid
XGAERYSDRGIIPRTLSYIFEQLQKDSSKIYTTHISYLEIYNECGYDLLDPRHEASSLEDLPKVTILEDPDQNIHLKNLTLHQATTEEEALNLLFLGDTNRMIAETPMNQASTRSHCIFTIHLSSKEPGSATVRHAKLHLVDLAGSERVAKTGVGGHLLTEAKYINLSLHYLEQVIIALSEKHRSHIPYRNSMMTSVLRDSLGGNCMTTMIATLSLEKRNLDESISTCRFAQRVALIKNEAVLNEEINPRLVIKRLQKEIQELKDELAMVTGEQRTEALTEAELLQLEKLITSFLEDQDSDSRLEVGADMRKVHHCFHHLKKLLNDKKILENNTVSSESKDQDCQEPLKEEEYRKLRDILKQRDNEINILVNMLKKEKKKAQEALHLAGMDRREFRQSQSPPFRLGNPEEGQRMRLSSAPSQAQDFSILGKRSSLLHKKIGMREEMSLGCQEAFEIFKRDHADSVTIDDNKQILKQRFSEAKALGESINEARSKIGHLKEEITQRHIQQVALGISENMAVPLMPDQQEEKLRSQLEEEKRRYKTMFTRLKALKVEIEHLQLLMDKAKVKLQKEFEVWWAEEATNLQVNSPAVNSLDHTKPFLQTSDSQHEWSQLLSNKSDVNARKILPSPCPSPHSQKQSSTSTPLEDSIPKRPVSSIPLTGDSQTDSDIIAFIKARQSILQKQCLGSN

SEQ ID NO: 50904 - protein, 758 aa, Homo sapiens
MVKQTIQIFARVKPPVRKHQQGIYSIDEDEKLIPSLEIILPRDLADGFVNNKRESYKFKFQRIFDQDANQETVFENIAKPVAGSVLAGYNGTIFAYGQTGSGKTFTITGGAERYSDRGIIPRTLSYIFEQLQKDSSKIYTTHISYLEIYNECGYDLLDPRHEASSLEDLPKVTILEDPDQNIHLKNLTLHQATTEEEALNLLFLGDTNRMIAETPMNQASTRSHCIFTIHLSSKEPGSATVRHAKLHLVDLAGSERVAKTGVGGHLLTEAKYINLSLHYLEQVIIALSEKHRSHIPYRNSMMTSVLRDSLGGNCMTTMIATLSLEKRNLDESISTCRFAQRVALIKNEAVLNEEINPRLVIKRLQKEIQELKDELAMVTGEQRTEALTEAELLQLEKLITSFLEDQDSDSRLEVGADMRKVHHCFHHLKKLLNDKKILENNTVSSESKDQDCQEPLKEEEYRKLRDILKQRDNEISILSEVMKKLPLSWFERGMREEMSLGCQEAFEIFKRDHADSVTIDDNKQILKQRFSEAKALGESINEARSKIGHLKEEITQRHIQQVALGISENMAVPLMPDQQEEKLRSQLEEEKRRYKTMFTRLKALKVEIEHLQLLMDKAKVKLQKEFEVWWAEEATNLQVNSPAVNSLDHTKPFLQTSDSQHEWSQLLSNKSSGGWEVQDQGTGRFDVCDVNARKILPSPCPSPHSQKQSSTSTPLEDSIPKRPVSSIPLTGDSQTDSDIIAFIKARQSILQKQCLGSN

SEQ ID NO: 50905 - protein, 171 aa, Homo sapiens
MREEMSLGCQEAFEIFKRDHADSVTIDDNKQILKQRFSEAKALGESINEARSKIGHLKEEITQRHIQQVALGISENMAVPLMPDQQEEKLRSQLEEEKRRYKTMFTRLKALKVEIEHLQLLMDKAKVKLQKEFEVWWAEEATNLQVNSPAVNSLDHTKSKIKALADSMSGL

SEQ ID NO: 50906 - protein, 293 aa, Homo sapiens
MREEMSLGCQEAFEIFKRDHADSVTIDDNKQILKQRFSEAKALGESINEARSKIGHLKEEITQRHIQQVALGISENMAVPLMPDQQEEKLRSQLEEEKRRYKTMFTRLKALKVEIEHLQLLMDKAKVKLQKEFEVWWAEEATNLQVNSPAVNSLDHTKPFLQTSDSQHEWSQLLSNKSSGGWEVQDQGTGRFDVCDVNARKILPSPCPSPHSQKQSSTSTPLEDSIPKRPVSSIPLTGDSQTDSDIIAFIKARQSILQKQYLQLLCSLFPKSAVSSAQASTNRKGLSDVLVTR

SEQ ID NO: 50907 - protein, 1343 aa, Homo sapiens
MGLEAQRLPGAEEAPVRVALRVRPLLPKELLHGHQSCLQVEPGLGRVTLGRDRHFGFHVVLAEDAGQEAVYQACVQPLLEAFFEGFNATVFAYGQTGSGKTYTMGEASVASLLEDEQGIVPRAMAEAFKLIDENDLLDCLVHVSYLEVYKEEFRDLLEVGTASRDIQLREDERGNVVLCGVKEVDVEGLDEVLSLLEMGNAARHTGATHLNHLSSRSHTVFTVTLEQRGRAPSRLPRPAPGQLLVSKFHFVDLAGSERVLKTGSTGERLKESIQINSSLLALGNVISALGDPQRRGSHIPYRDSKITRILKDSLGGNAKTVMIACVSPSSSDFDETLNTLNYASRAQNIRNRATVNWRPEAERPPEETASGARGPPRHRSETRIIHRGRRAPGPATASAAAAMRLGAECARYRACTDAAYSLLRELQAEPGLPGAAARKVRDWLCAVEGERSALSSASGPDSGIESASVEDQAAQGAGGRKEDEGAQQLLTLQNQVARLEEENRDFLAALEDAMEQYKLQSDRLREQQEEMVELRLRLELVRPGWGGPRLLNGLPPGSFVPRPHTAPLGGAHAHVLGMVPPACLPGDEVGSEQRGEQVTNGREAGAELLTEVNRLGSGSSAASEEEEEEEEPPRRTLHLRRNRISNCSQRAGARPGSLPERKGPELCLEELDAAIPGSRAVGGSKARVQARQVPPATASEWRLAQAQQKIRELAINIRMKEELIGELVRTGKAAQALNRQHSQRIRELEQEAEQVRAELSEGQRQLRELEGKELQDAGERSRLQEFRRRVAAAQSQVQVLKEKKQATERLVSLSAQSEKRLQELERNVQLMRQQQGQLQRRLREETEQKRRLEAEMSKRQHRVKELELKHEQQQKILKIKTEEIAAFQRKRRSGSNGSVVSLEQQQKIEEQKKWLDQEMEKVLQQRRALEELGEELHKREAILAKKEALMQEKTGLESKRLRSSQALNEDIVRVSSRLEHLEKELSEKSGQLRQGSAQSQQQIRGEIDSLRQEKDSLLKQRLEIDGKLRQGSLLSPEEERTLFQLDEAIEALDAAIEYKNEAITCRQRVLRASASLLSQCEMNLMAKLSYLSSSETRALLCKYFDKVVTLREEQHQQQIAFSELEMQLEEQQRLVYWLEVALERQRLEMDRQLTLQQKEHEQNMQLLLQQSRDHLGEGLADSRRQYEARIQALEKELGRYMWINQELKQKLGGVNAVGHSRGGEKRSLCSEGRQAPGNEDELHLAPELLWLSPLTEGAPRTREETRDLVHAPLPLTWKRSSLCGEEQGSPEELRQREAAEPLVGRVLPVGEAGLPWNFGPLSKPRRELRRASPGMIDVRKNPL

SEQ ID NO: 50908 - protein, 673 aa, Homo sapiens
MDPQRSPLLEVKGNIELKRPLIKAPSQLPLSGSRLKRRPDQMEDGLEPEKKRTRGLGATTKITTSHPRVPSLTTVPQTQGQTTAQKVSKKTGPRCSTAIATGLKNQKPVPAVPVQKSGTSGVPPMAGGKKPSKRPAWDLKGQLCDLNAELKRCRERTQTLDQENQQLQDQLRDAQQQVKALGTERTTLEGHLAKVQAQAEQGQQELKNLRACVLELEERLSTQEGLVQELQKKQVELQEERRGLMSQLEEKERRLQTSEAALSSSQAEVASLRQETVAQAALLTEREERLHGLEMERRRLHNQLQELKGNIRVFCRVRPVLPGEPTPPPGLLLFPSGPGGPSDPPTRLSLSRSDERRGTLSGAPAPPTRHDFSFDRVFPPGSGQDEVFEEIAMLVQSALDGYPVCIFAYGQTGSGKTFTMEGGPGGDPQLEGLIPRALRHLFSVAQELSGQGWTYSFVASYVEIYNETVRDLLATGTRKGQGGECEIRRAGPGSEELTVTNARYVPVSCEKEVDALLHLARQNRAVARTAQNERSSRSHSVFQLQISGEHSSRGLQCGAPLSLVDLAGSERLDPGLALGPGERERLRETQAINSSLSTLGLVIMALSNKESHVPYRNSKLTYLLQNSLGGSAKMLMFVNISPLEENVSESLNSLRFASKVNQCVIGTAQANRK

SEQ ID NO: 50909 - protein, 203 aa, Homo sapiens
MDPQRSPLLEVKGNIELKRPLIKAPSQLPLSGSRLKRRPDQMEDGLEPEKKRTRGLGATTKITTSHPRVPSLTTVPQTQGQTTGPSSHPLPWQCHHQPFLVTDPGGRSWGPGQKWHRLHLWCTSAQKVSKKTGPRCSTAIATGLKNQKPVPAVPVQKSGTSGVPPMAGGKKPSKRPAWDLKGQLCDLNAELKRCRERTQTLDQ

SEQ ID NO: 50910 - protein, 203 aa, Homo sapiens
MDPQRSPLLEVKGNIELKRPLIKAPSQLPLSGSRLKRRPDQMEDGLEPEKKRTRGLGATTKITTSHPRVPSLTTVPQTQGQTTGPSSHPLPWQCHHQPFLETDPGGRSWGPGQKWHRLHLWCTSAQKVSKKTGPRCSTAIATGLKNQKPVPAVPVQKSGTSGVPPMAGGKKPSKRPAWDLKGQLCDLNAELKRCRERTQTLDQ

SEQ ID NO: 50911 - protein, 673 aa, Homo sapiens; identical to SEQ ID NO: 50908

SEQ ID NO: 50912 - protein, 673 aa, Homo sapiens; identical to SEQ ID NO: 50908

SEQ ID NO: 50913 - protein, 203 aa, Homo sapiens; identical to SEQ ID NO: 50910

SEQ ID NO: 50914 - protein, 833 aa, Homo sapiens
MVPSRRTWNLGATPSLRGLWRVGRAPEPEPGMARPAPAPASPAARPFPHTGPGRLRTGRGKDTPVCGDEDSSARSAARPALAQCRALSVDWAGPGSPHGLYLTLQVEHLKEKLISQAQEVSRLRSELGGTDLEKHRDLLMVENERLRQEMRRCEAELQELRTKPAGPCPGCEHSQESAQLRDKLSQLQLEMAESKGMLSELNLEVQQKTDRLAEVELRLKDCLAEKAQEEERLSRRLRDSHETIASLRAQSPPVKYVIKTVEVESSKTKQALSESQARNQHLQEQVAMQRQVLKEMEQQLQSSHQLTARLRAQIAMYESELERAHGQMLEEMQSLEEDKNRAIEEAFARAQVEMKAVHENLAGVRTNLLTLQPALRTLTNDYNGLKRQVRGFPLLLQEALRSVKAEIGQAIEEVNSNNQELLRKYRRELQLRKKCHNELVRLKGNIRVIARVRPVTKEDGEGPEATNAVTFDADDDSIIHLLHKGKPVSFELDKVFSPQASQQDVFQEVQALVTSCIDGFNVCIFAYGQTGAGKTYTMEGTAENPGINQRALQLLFSEVQEKASDWEYTITVSAAEIYNEVLRDLLGKEPQEKLEIRLCPDGSGQLYVPGLTEFQVQSVDDINKVFEFGHTNRTTEFTNLNEHSSRSHALLIVTVRGVDCSTGLRTTGKLNLVDLAGSERVGKSGAEGSRLREAQHINKSLSALGDVIAALRSRQGHVPFRNSKLTYLLQDSLSGDSKTLMVVQVSPVEKNTSETLYSLKFAERVRSVELGPGLRRAELGSWSSQEHLEWEPACQTPQPSARAHSAPSSGTSSRPGSIRRKLQPSGKSRPLPV

SEQ ID NO: 50915 - protein, 687 aa, Homo sapiens
MVENERLRQEMRRCEAELQELRTKPAGPCPGCEHSQESAQLRDKLSQLQLEMAESKGMLSELNLEVQQKTDRLAEVELRLKDCLAEKAQEEERLSRRLRDSHETIASLRAQSPPVKYVIKTVEVESSKTKQALSESQARNQHLQEQVAMQRQVLKEMEQQLQSSHQLTARLRAQIAMYESELERAHGQMLEEMQSLEEDKNRAIEEAFARAQVEMKAVHENLAGVRTNLLTLQPALRTLTNDYNGLKRQVRGFPLLLQEALRSVKAEIGQAIEEVNSNNQELLRKYRRELQLRKKCHNELVRLKGNIRVIARVRPVTKEDGEGPEATNAVTFDADDDSIIHLLHKGKPVSFELDKVFSPQASQQDVFQEVQALVTSCIDGFNVCIFAYGQTGAGKTYTMEGTAENPGINQRALQLLFSEVQEKASDWEYTITVSAAEIYNEVLRDLLGKEPQEKLEIRLCPDGSGQLYVPGLTEFQVQSVDDINKVFEFGHTNRTTEFTNLNEHSSRSHALLIVTVRGVDCSTGLRTTGKLNLVDLAGSERVGKSGAEGSRLREAQHINKSLSALGDVIAALRSRQGHVPFRNSKLTYLLQDSLSGDSKTLMVVQVSPVEKNTSETLYSLKFAERVRSVELGPGLRRAELGSWSSQEHLEWEPACQTPQPSARAHSAPSSGTSSRPGSIRRKLQPSA

SEQ ID NO: 50916 - protein, 826 aa, Homo sapiens
MVPSRRTWNLGATPSLRGLWRVGRAPEPEPGMARPAPAPASPAARPFPHTGPGRLRTGRGKDTPVCGDEDSSARSAARPALAQCRALSVDWAGPGSPHGLYLTLQVEHLKEKLISQAQEVSRLRSELGGTDLEKHRDLLMVENERLRQEMRRCEAELQELRTKPAGPCPGCEHSQESAQLRDKLSQLQLEMAESKGMLSELNLEVQQKTDRLAEVELRLKDCLAEKAQEEERLSRRLRDSHETIASLRAQSPPVKYVIKTVEVESSKTKQALSESQARNQHLQEQVAMQRQVLKEMEQQLQSSHQLTARLRAQIAMYESELERAHGQMLEEMQSLEEDKNRAIEEAFARAQVEMKAVHENLAGVRTNLLTLQPALRTLTNDYNGLKRQVRGFPLLLQEALRSVKAEIGQAIEEVNSNNQELLRKYRRELQLRKKCHNELVRLKGNIRVIARVRPVTKEDGEGPEATNAVTFDADDDSIIHLLHKGKPVSFELDKVFSPQASQQDVFQEVQALVTSCIDGFNVCIFAYGQTGAGKTYTMEGTAENPGINQRALQLLFSEVQEKASDWEYTITVSAAEIYNEVLRDLLGKEPQEKLEIRLCPDGSGQLYVPGLTEFQVQSVDDINKVFEFGHTNRTTEFTNLNEHSSRSHALLIVTVRGVDCSTGLRTTGKLNLVDLAGSERVGKSGAEGSRLREAQHINKSLSALGDVIAALRSRQGHVPFRNSKLTYLLQDSLSGDSKTLMVVQVSPVEKNTSETLYSLKFAERVRSVELGPGLRRAELGSWSSQEHLEWEPACQTPQPSARAHSAPSSGTSSRPGSIRRKLQPSA

SEQ ID NO: 50917 - protein, 768 aa, Homo sapiens
MVLRMVEAMSQLQDEKTQLQEELVVLQERLALRDSDQQATSTQLQNQVEHLKEKLISQAQEVSRLRSELGGTDLEKHRDLLMVENERLRQEMRRCEAELQELRTKPAGPCPGCEHSQESAQLRDKLSQLQLEMAESKGMLSELNLEVQQKTDRLAEVELRLKDCLAEKAQEEERLSRRLRDSHETIASLRAQSPPVKYVIKTVEVESSKTKQALSESQARNQHLQEQVAMQRQVLKEMEQQLQSSHQLTARLRAQIAMYESELERAHGQMLEEMQSLEEDKNRAIEEAFARAQVEMKAVHENLAGVRTNLLTLQPALRTLTNDYNGLKRQVRGFPLLLQEALRSVKAEIGQAIEEVNSNNQELLRKYRRELQLRKKCHNELVRLKGNIRVIARVRPVTKEDGEGPEATNAVTFDADDDSIIHLLHKGKPVSFELDKVFSPQASQQDVFQEVQALVTSCIDGFNVCIFAYGQTGAGKTYTMEGTAENPGINQRALQLLFSEVQEKASDWEYTITVSAAEIYNEVLRDLLGKEPQEKLEIRLCPDGSGQLYVPGLTEFQVQSVDDINKVFEFGHTNRTTEFTNLNEHSSRSHALLIVTVRGVDCSTGLRTTGKLNLVDLAGSERVGKSGAEGSRLREAQHINKSLSALGDVIAALRSRQGHVPFRNSKLTYLLQDSLSGDSKTLMVVQVSPVEKNTSETLYSLKFAERVRSVELGPGLRRAELGSWSSQEHLEWEPACQTPQPSARAHSAPSSGTSSRPGSIRRKLQPSA

SEQ ID NO: 50918 - protein, 724 aa, Homo sapiens
MIKVEHLKEKLISQAQEVSRLRSELGGTDLEKHRDLLMVENERLRQEMRRCEAELQELRTKPAGPCPGCEHSQESAQLRDKLSQLQLEMAESKGMLSELNLEVQQKTDRLAEVELRLKDCLAEKAQEEERLSRRLRDSHETIASLRAQSPPVKYVIKTVEVESSKTKQALSESQARNQHLQEQVAMQRQVLKEMEQQLQSSHQLTARLRAQIAMYESELERAHGQMLEEMQSLEEDKNRAIEEAFARAQVEMKAVHENLAGVRTNLLTLQPALRTLTNDYNGLKRQVRGFPLLLQEALRSVKAEIGQAIEEVNSNNQELLRKYRRELQLRKKCHNELVRLKGNIRVIARVRPVTKEDGEGPEATNAVTFDADDDSIIHLLHKGKPVSFELDKVFSPQASQQDVFQEVQALVTSCIDGFNVCIFAYGQTGAGKTYTMEGTAENPGINQRALQLLFSEVQEKASDWEYTITVSAAEIYNEVLRDLLGKEPQEKLEIRLCPDGSGQLYVPGLTEFQVQSVDDINKVFEFGHTNRTTEFTNLNEHSSRSHALLIVTVRGVDCSTGLRTTGKLNLVDLAGSERVGKSGAEGSRLREAQHINKSLSALGDVIAALRSRQGHVPFRNSKLTYLLQDSLSGDSKTLMVVQVSPVEKNTSETLYSLKFAERVRSVELGPGLRRAELGSWSSQEHLEWEPACQTPQPSARAHSAPSSGTSSRPGSIRRKLQPSA

SEQ ID NO: 50919 - protein, 848 aa, Homo sapiens
MCASACKDTAAWCPEEAAEPQAMVPSRRTWNLGATPSLRGLWRVGRAPEPEPGMARPAPAPASPAARPFPHTGPGRLRTGRGKDTPVCGDEDSSARSAARPALAQCRALSVDWAGPGSPHGLYLTLQVEHLKEKLISQAQEVSRLRSELGGTDLEKHRDLLMVENERLRQEMRRCEAELQELRTKPAGPCPGCEHSQESAQLRDKLSQLQLEMAESKGMLSELNLEVQQKTDRLAEVELRLKDCLAEKAQEEERLSRRLRDSHETIASLRAQSPPVKYVIKTVEVESSKTKQALSESQARNQHLQEQVAMQRQVLKEMEQQLQSSHQLTARLRAQIAMYESELERAHGQMLEEMQSLEEDKNRAIEEAFARAQVEMKAVHENLAGVRTNLLTLQPALRTLTNDYNGLKRQVRGFPLLLQEALRSVKAEIGQAIEEVNSNNQELLRKYRRELQLRKKCHNELVRLKGNIRVIARVRPVTKEDGEGPEATNAVTFDADDDSIIHLLHKGKPVSFELDKVFSPQASQQDVFQEVQALVTSCIDGFNVCIFAYGQTGAGKTYTMEGTAENPGINQRALQLLFSEVQEKASDWEYTITVSAAEIYNEVLRDLLGKEPQEKLEIRLCPDGSGQLYVPGLTEFQVQSVDDINKVFEFGHTNRTTEFTNLNEHSSRSHALLIVTVRGVDCSTGLRTTGKLNLVDLAGSERVGKSGAEGSRLREAQHINKSLSALGDVIAALRSRQGHVPFRNSKLTYLLQDSLSGDSKTLMVVQVSPVEKNTSETLYSLKFAERVRSVELGPGLRRAELGSWSSQEHLEWEPACQTPQPSARAHSAPSSGTSSRPGSIRRKLQPSA

SEQ ID NO: 50920 - protein, 684 aa, Homo sapiens
MVENERLRQEMRRCEAELQELRTKPAGPCPGCEHSQESAQLRDKLSQLQLEMAESKGMLSELNLEVQQKTDRLAEVELRLKDCLAEKAQEEERLSRRLRDSHETIASLRAQSPPVKYVIKTVEVESSKTKQALSESQARNQHLQEQVAMQRQVLKEMEQQLQSSHQLTARLRAQIAMYESELERAHGQMLEEMQSLEEDKNRAIEEAFARAQVEMKAVHENLAGVRTNLLTLQPALRTLTNDYNGLKRQVRGFPLLLQEALRSVKAEIGQAIEEVNSNNQELLRKYRRELQLRKKCHNELVRLKGNIRVIARVRPVTKEDGEGPEATNAVTFDADDDSIIHLLHKGKPVSFELDKVFSPQASQQDEVQALVTSCIDGFNVCIFAYGQTGAGKTYTMEGTAENPGINQRALQLLFSEVQEKASDWEYTITVSAAEIYNEVLRDLLGKEPQEKLEIRLCPDGSGQLYVPGLTEFQVQSVDDINKVFEFGHTNRTTEFTNLNEHSSRSHALLIVTVRGVDCSTGLRTTGKLNLVDLAGSERVGKSGAEGSRLREAQHINKSLSALGDVIAALRSRQGHVPFRNSKLTYLLQDSLSGDSKTLMVVQVSPVEKNTSETLYSLKFAERVRSVELGPGLRRAELGSWSSQEHLEWEPACQTPQPSARAHSAPSSGTSSRPGSIRRKLQPSA

SEQ ID NO: 50921 - protein, 637 aa, Homo sapiens
MYDNMSTMVYIKEDKLEKLTQDEIISKTKQVIQGLEALKNEHNSILQSLLETLKCLKKDDESNLVEEKSNMIRKSLEMLELGLSEAQVMMALSNHLNAVESEKQKLRAQVRRLCQENQWLRDELANTQQKLQKSEQSVAQLEEEKKHLEFMNQLKKYDDDISPSEDKDTDSTKEPLDDLFPNDEDDPGQGIQQQHSSAAAAAQQGGYEIPARLRTLHNLVIQYASQGRYEVAVPLCKQALEDLEKTSGHDHPDVATMLNILALVYRDQNKYKDAANLLNDALAIREKTLGKDHPAVAATLNNLAVLYGKRGKYKEAEPLCKRALEIREKVLGKDHPDVAKQLNNLALLCQNQGKYEEVEYYYQRALEIYQTKLGPDDPNVAKTKNNLASCYLKQGKFKQAETLYKEILTRAHEREFGSVDDENKPIWMHAEEREECKGKQKDGTSFGEYGGWYKACKVDSPTVTTTLKNLGALYRRQGKFEAAETLEEAAMRSRKQGLDNVHKQRVAEVLNDPENMEKRRSRESLNVDVVKYESGPDGGEEVSMSVEWNGDGTGSLKRSGSFSKLRASIRRSSEKLVRKLKGGSSRESEPKNPGMKRASSLNVLNVGGKAAEDRFQERNNCLADSRALSASHTDLAH

SEQ ID NO: 50922 - protein, 639 aa, Homo sapiens
MYDNMSTMVYIKEDKLEKLTQDEIISKTKQVIQGLEALKNEHNSILQSLLETLKCLKKDDESNLVEEKSNMIRKSLEMLELGLSEAQVMMALSNHLNAVESEKQKLRAQVRRLCQENQWLRDELANTQQKLQKSEQSVAQLEEEKKHLEFMNQLKKYDDDISPSEDKDTDSTKEPLDDLFPNDEDDPGQGIQQQHSSAAAAAQQGGYEIPARLRTLHNLVIQYASQGRYEVAVPLCKQALEDLEKTSGHDHPDVATMLNILALVYRDQNKYKDAANLLNDALAIREKTLGKDHPAVAATLNNLAVLYGKRGKYKEAEPLCKRALEIREKVLGKDHPDVAKQLNNLALLCQNQGKYEEVEYYYQRALEIYQTKLGPDDPNVAKTKNNLASCYLKQGKFKQAETLYKEILTRAHEREFGSVDDENKPIWMHAEEREECKGKQKDGTSFGEYGGWYKACKVDSPTVTTTLKNLGALYRRQGKFEAAETLEEAAMRSRKQGLDNVHKQRVAEVLNDPENMEKRRSRESLNVDVVKYESGPDGGEEVSMSVEWNGDGTGSLKRSGSFSKLRASIRRSSEKLVRKLKGGSSRESEPKNPGMKRASSLNVLNVGGKAAEDRFQGVSGRASFCGKRQQQQWPGRRHR

SEQ ID NO: 50923 - protein, 628 aa, Homo sapiens
MYDNMSTMVYIKEDKLEKLTQDEIISKTKQVIQGLEALKNEHNSILQSLLETLKCLKKDDESNLVEEKSNMIRKSLEMLELGLSEAQVMMALSNHLNAVESEKQKLRAQVRRLCQENQWLRDELANTQQKLQKSEQSVAQLEEEKKHLEFMNQLKKYDDDISPSEDKDTDSTKEPLDDLFPNDEDDPGQGIQQQHSSAAAAAQQGGYEIPARLRTLHNLVIQYASQGRYEVAVPLCKQALEDLEKTSGHDHPDVATMLNILALVYRDQNKYKDAANLLNDALAIREKTLGKDHPAVAATLNNLAVLYGKRGKYKEAEPLCKRALEIREKVLGKDHPDVAKQLNNLALLCQNQGKYEEVEYYYQRALEIYQTKLGPDDPNVAKTKNNLASCYLKQGKFKQAETLYKEILTRAHEREFGSVDDENKPIWMHAEEREECKGKQKDGTSFGEYGGWYKACKVDSPTVTTTLKNLGALYRRQGKFEAAETLEEAAMRSRKQGLDNVHKQRVAEVLNDPENMEKRRSRESLNVDVVKYESGPDGGEEDGTGSLKRSGSFSKLRASIRRSSEKLVRKLKGGSSRESEPKNPGMKRASSLNVLNVGGKAAEDRFQERNNCLADSRALSASHTDLAH

SEQ ID NO: 50924 - protein, 573 aa, Homo sapiens
MYDNMSTMVYIKEDKLEKLTQDEIISKTKQVIQGLEALKNEHNSILQSLLETLKCLKKDDESNLVEEKSNMIRKSLEMLELGLSEAQVMMALSNHLNAVESEKQKLRAQVRRLCQENQWLRDELANTQQKLQKSEQSVAQLEEEKKHLEFMNQLKKYDDDISPSEDKDTDSTKEPLDDLFPNDEDDPGQGIQQQHSSAAAAAQQGGYEIPARLRTLHNLVIQYASQGRYEVAVPLCKQALEDLEKTSGHDHPDVATMLNILALVYRDQNKYKDAANLLNDALAIREKTLGKDHPAVAATLNNLAVLYGKRGKYKEAEPLCKRALEIREKVLGKDHPDVAKQLNNLALLCQNQGKYEEVEYYYQRALEIYQTKLGPDDPNVAKTKNNLASCYLKQGKFKQAETLYKEILTRAHEREFGSVDDENKPIWMHAEEREECKGKQKDGTSFGEYGGWYKACKVDSPTVTTTLKNLGALYRRQGKFEAAETLEEAAMRSRKQGLDNVHKQRVAEVLNDPENMEKRRSRESLNVDVVKYESGPDGGEEVSMSVEWNGGVSGRASFCGKRQQQQWPGRRHR

SEQ ID NO: 50925 - protein, 576 aa, Homo sapiens
MYDNMSTMVYIKEDKLEKLTQDEIISKTKQVIQGLEALKNEHNSILQSLLETLKCLKKDDESNLVEEKSNMIRKSLEMLELGLSEAQVMMALSNHLNAVESEKQKLRAQVRRLCQENQWLRDELANTQQKLQKSEQSVAQLEEEKKHLEFMNQLKKYDDDISPSEDKDTDSTKEPLDDLFPNDEDDPGQGIQQQHSSAAAAAQQGGYEIPARLRTLHNLVIQYASQGRYEVAVPLCKQALEDLEKTSGHDHPDVATMLNILALVYRDQNKYKDAANLLNDALAIREKTLGKDHPAVAATLNNLAVLYGKRGKYKEAEPLCKRALEIREKVLGKDHPDVAKQLNNLALLCQNQGKYEEVEYYYQRALEIYQTKLGPDDPNVAKTKNNLASCYLKQGKFKQAETLYKEILTRAHEREFGSVDDENKPIWMHAEEREECKGKQKDGTSFGEYGGWYKACKVDSPTVTTTLKNLGALYRRQGKFEAAETLEEAAMRSRKQRSISEIPKKILSANGSNHFPLPGSQGLDNVHKQRVAEVLNDPENMEKRRSRESLNVDVVKYESGPDGGEEMRKMKLGLVN

SEQ ID NO: 50926 - protein, 560 aa, Homo sapiens
MYDNMSTMVYIKEDKLEKLTQDEIISKTKQVIQGLEALKNEHNSILQSLLETLKCLKKDDESNLVEEKSNMIRKSLEMLELGLSEAQVMMALSNHLNAVESEKQKLRAQVRRLCQENQWLRDELANTQQKLQKSEQSVAQLEEEKKHLEFMNQLKKYDDDISPSEDKDTDSTKEPLDDLFPNDEDDPGQGIQQQHSSAAAAAQQGGYEIPARLRTLHNLVIQYASQGRYEVAVPLCKQALEDLEKTSGHDHPDVATMLNILALVYRDQNKYKDAANLLNDALAIREKTLGKDHPAVAATLNNLAVLYGKRGKYKEAEPLCKRALEIREKVLGKDHPDVAKQLNNLALLCQNQGKYEEVEYYYQRALEIYQTKLGPDDPNVAKTKNNLASCYLKQGKFKQAETLYKEILTRAHEREFGSVDDENKPIWMHAEEREECKGKQKDGTSFGEYGGWYKACKVDSPTVTTTLKNLGALYRRQGKFEAAETLEEAAMRSRKQGLDNVHKQRVAEVLNDPENMEKRRSRESLNVDVVKYESGPDGGEEVSMSVEWNGMRKMKLGLVN

SEQ ID NO: 50927 - protein, 584 aa, Homo sapiens
MYDNMSTMVYIKEDKLEKLTQDEIISKTKQVIQGLEALKNEHNSILQSLLETLKCLKKDDESNLVEEKSNMIRKSLEMLELGLSEAQVMMALSNHLNAVESEKQKLRAQVRRLCQENQWLRDELANTQQKLQKSEQSVAQLEEEKKHLEFMNQLKKYDDDISPSEDKDTDSTKEPLDDLFPNDEDDPGQGIQQQHSSAAAAAQQGGYEIPARLRTLHNLVIQYASQGRYEVAVPLCKQALEDLEKTSGHDHPDVATMLNILALVYRDQNKYKDAANLLNDALAIREKTLGKDHPAVAATLNNLAVLYGKRGKYKEAEPLCKRALEIREKVLGKDHPDVAKQLNNLALLCQNQGKYEEVEYYYQRALEIYQTKLGPDDPNVAKTKNNLASCYLKQGKFKQAETLYKEILTRAHEREFGSVDDENKPIWMHAEEREECKGKQKDGTSFGEYGGWYKACKVDSPTVTTTLKNLGALYRRQGKFEAAETLEEAAMRSRKQGLDNVHKQRVAEVLNDPENMEKRRSRESLNVDVVKYESGPDGGEEMKRASSLNVLNVGGKAAEDRFQERNNCLADSRALSASHTDLAH

SEQ ID NO: 50928 - protein, 618 aa, Homo sapiens
MYDNMSTMVYIKEDKLEKLTQDEIISKTKQVIQGLEALKNEHNSILQSLLETLKCLKKDDESNLVEEKSNMIRKSLEMLELGLSEAQVMMALSNHLNAVESEKQKLRAQVRRLCQENQWLRDELANTQQKLQKSEQSVAQLEEEKKHLEFMNQLKKYDDDISPSEDKDTDSTKEPLDDLFPNDEDDPGQGIQQQHSSAAAAAQQGGYEIPARLRTLHNLVIQYASQGRYEVAVPLCKQALEDLEKTSGHDHPDVATMLNILALVYRDQNKYKDAANLLNDALAIREKTLGKDHPAVAATLNNLAVLYGKRGKYKEAEPLCKRALEIREKVLGKDHPDVAKQLNNLALLCQNQGKYEEVEYYYQRALEIYQTKLGPDDPNVAKTKNNLASCYLKQGKFKQAETLYKEILTRAHEREFGSVDDENKPIWMHAEEREECKGKQKDGTSFGEYGGWYKACKVDSPTVTTTLKNLGALYRRQGKFEAAETLEEAAMRSRKQGLDNVHKQRVAEVLNDPENMEKRRSRESLNVDVVKYESGPDGGEEVSMSVEWNGDGTGSLKRSGSFSKLRASIRRSSEKLVRKLKGGSSRESEPKNPGASLAEPLFVENDSSSSGLEDATAN

SEQ ID NO: 50929 - protein, 560 aa, Homo sapiens; identical to SEQ ID NO: 50926

SEQ ID NO: 50930 - protein, 131 aa, Homo sapiens
  VARIANT 1: note = MOD_RES - Any amino acid
XENKPIWMHAEEREECKGKQKDGTSFGEYGGWYKACKVDSPTVTTTLKNLGALYRRQGKFEAAETLEEAAMRSRKQGLDNVHKQRVAEVLNDPENMEKRRSRESLNVDVVKYESGPDGGEEMRKMKLGLVN

SEQ ID NO: 50931 - protein, 630 aa, Homo sapiens
MYDNMSTMVYIKEDKLEKLTQDEIISKTKQVIQGLEALKNEHNSILQSLLETLKCLKKDDESNLVEEKSNMIRKSLEMLELGLSEAQVMMALSNHLNAVESEKQKLRAQVRRLCQENQWLRDELANTQQKLQKSEQSVAQLEEEKKHLEFMNQLKKYDDDISPSEDKDTDSTKEPLDDLFPNDEDDPGQGIQQQHSSAAAAAQQGGYEIPARLRTLHNLVIQYASQGRYEVAVPLCKQALEDLEKTSGHDHPDVATMLNILALVYRDQNKYKDAANLLNDALAIREKTLGKDHPAVAATLNNLAVLYGKRGKYKEAEPLCKRALEIREKVLGKDHPDVAKQLNNLALLCQNQGKYEEVEYYYQRALEIYQTKLGPDDPNVAKTKNNLASCYLKQGKFKQAETLYKEILTRAHEREFGSVDDENKPIWMHAEEREECKGKQKDGTSFGEYGGWYKACKVDSPTVTTTLKNLGALYRRQGKFEAAETLEEAAMRSRKQGLDNVHKQRVAEVLNDPENMEKRRSRESLNVDVVKYESGPDGGEEDGTGSLKRSGSFSKLRASIRRSSEKLVRKLKGGSSRESEPKNPGMKRASSLNVLNVGGKAAEDRFQGVSGRASFCGKRQQQQWPGRRHR

SEQ ID NO: 50932 - protein, 150 aa, Homo sapiens
MYDNMSTMVYIKEDKLEKLTQDEIISKTKQVIQGLEALKNEHNSILQSLLETLKCLKKDDESNLVEEKSNMIRKSLEMLELGLSEAQVMMALSNHLNAVESEKQKLRAQVRRLCQENQWLRDELANTQQKLQKSEQSVAQLEEEKKHLEF

SEQ ID NO: 50933 - protein, 564 aa, Homo sapiens
MYDNMSTMVYIKEDKLEKLTQDEIISKTKQVIQGLEALKNEHNSILQSLLETLKCLKKDDESNLVEEKSNMIRKSLEMLELGLSEAQVMMALSNHLNAVESEKQKLRAQVRRLCQENQWLRDELANTQQKLQKSEQSVAQLEEEKKHLEFMNQLKKYDDDISPSEDKDTDSTKEPLDDLFPNDEDDPGQGIQQQHSSAAAAAQQGGYEIPARLRTLHNLVIQYASQGRYEVAVPLCKQALEDLEKTSGHDHPDVATMLNILALVYRDQNKYKDAANLLNDALAIREKTLGKDHPAVAATLNNLAVLYGKRGKYKEAEPLCKRALEIREKVLGKDHPDVAKQLNNLALLCQNQGKYEEVEYYYQRALEIYQTKLGPDDPNVAKTKNNLASCYLKQGKFKQAETLYKEILTRAHEREFGSVDDENKPIWMHAEEREECKGKQKDGTSFGEYGGWYKACKVDSPTVTTTLKNLGALYRRQGKFEAAETLEEAAMRSRKQGLDNVHKQRVAEVLNDPENMEKRRSRESLNVDVVKYESGPDGGEEGVSGRASFCGKRQQQQWPGRRHR

SEQ ID NO: 50934 - protein, 622 aa, Homo sapiens
MAMMVFPREEKLSQDEIVLGTKAVIQGLETLRGEHRALLAPLVAPEAGEAEPGSQERCILLRRSLEAIELGLGEAQVILALSSHLGAVESEKQKLRAQVRRLVQENQWLREELAGTQQKLQRSEQAVAQLEEEKQHLLFMSQIRKLDEDASPNEEKGDVPKDTLDDLFPNEDEQSPAPSPGGGDVSGQHGGYEIPARLRTLHNLVIQYASQGRYEVAVPLCKQALEDLEKTSGHDHPDVATMLNILALVYRDQNKYKEAAHLLNDALAIREKTLGKDHPAVAATLNNLAVLYGKRGKYKEAEPLCKRALEIREKVLGKFHPDVAKQLSNLALLCQNQGKAEEVEYYYRRALEIYATRLGPDDPNVAKTKNNLASCYLKQGKYQDAETLYKEILTRAHEKEFGSVNGDNKPIWMHAEEREESKDKRRDSAPYGEYGSWYKACKVDSPTVNTTLRSLGALYRRQGKLEAAHTLEDCASRNRKQGLDPASQTKVVELLKDGSGRRGDRRSSRDMAGGAGPRSESDLEDVGPTAEWNGDGSGSLRRSGSFGKLRDALRRSSEMLVKKLQGGTPQEPPNPRMKRASSLNFLNKSVEEPTQPGGTGLSDSRTLSSSSMDLSRRSSLVG

SEQ ID NO: 50935 - protein, 545 aa, Homo sapiens
MAMMVFPREEKLSQDEIVLGTKAVIQGLETLRGEHRALLAPLVAPEAGEAEPGSQERCILLRRSLEAIELGLGEAQEEKGDVPKDTLDDLFPNEDEQSPAPSPGGGDVSGQHGGYEIPARLRTLHNLVIQYASQGRYEVAVPLCKQALEDLEKTSGHDHPDVATMLNILALVYRDQNKYKEAAHLLNDALAIREKTLGKDHPAVAATLNNLAVLYGKRGKYKEAEPLCKRALEIREKVLGKFHPDVAKQLSNLALLCQNQGKAEEVEYYYRRALEIYATRLGPDDPNVAKTKNNLASCYLKQGKYQDAETLYKEILTRAHEKEFGSVNGDNKPIWMHAEEREESKDKRRDSAPYGEYGSWYKACKVDSPTVNTTLRSLGALYRRQGKLEAAHTLEDCASRNRKQGLDPASQTKVVELLKDGSGRRGDRRSSRDMAGGAGPRSESDLEDVGPTAEWNGDGSGSLRRSGSFGKLRDALRRSSEMLVKKLQGGTPQEPPNPRMKRASSLNFLNKSVEEPTQPGGTGLSDSRTLSSSSMDLSRRSSLVG

SEQ ID NO: 50936 - protein, 622 aa, Homo sapiens; identical to SEQ ID NO: 50934

SEQ ID NO: 50937 - protein, 622 aa, Homo sapiens; identical to SEQ ID NO: 50934

SEQ ID NO: 50938 - protein, 545 aa, Homo sapiens; identical to SEQ ID NO: 50935

SEQ ID NO: 50939 - protein, 166 aa, Homo sapiens
MAMMVFPREEKLSQDEIVLGTKAVIQGLETLRGEHRALLAPLVAPEAGEAEPGSQERCILLRRSLEAIELGLGEAQVILALSSHLGAVESEKQKLRAQVRRLVQENQWLREELAGTQQKLQRSEQAVAQLEEEKQHLLFMSQIRKLDEDASPNEEKGDVPKDTLDD

SEQ ID NO: 50940 - protein, 189 aa, Homo sapiens
MAMMVFPREEKLSQDEIVLGTKAVIQGLETLRGEHRALLAPLVAPEAGEAEPGSQERCILLRRSLEAIELGLGEAQEEKGDVPKDTLDDLFPNEDEQSPAPSPGGGDVSGQHGGYEIPARLRTLHNLVIQYASQGRYEVAVPLCKQALEDLEKTSGHDHPDVATMLNILALVYRDQNKYKEAAHLLNDA

SEQ ID NO: 50941 - protein, 171 aa, Homo sapiens
MAMMVFPREEKLSQDEIVLGTKAVIQGLETLRGEHRALLAPLVAPEAGEAEPGSQERCILLRRSLEAIELGLGEAQVILALSSHLGAVESEKQKLRAQVRRLVQENQWLREELAGTQQKLQRSEQAVAQLEEEKQHLLFMSQIRKLDEDASPNEEKGDVPKDTLDDLFPNE

SEQ ID NO: 50942 - protein, 145 aa, Homo sapiens
MAMMVFPREEKLSQDEIVLGTKAVIQGLETLRGEHRALLAPLVAPEAGEAEPGSQERCILLRRSLEAIELGLGEAQVILALSSHLGAVESEKQKLRAQVRRLVQENQWLREELAGTQQKLQRSEQAVAQLEEEKQHLLFMSQIRK

SEQ ID NO: 50943 - protein, 105 aa, Homo sapiens
MAMMVFPREEKLSQDEIVLGTKAVIQGLETLRGEHRALLAPLVAPEAGEAEPGSQERCILLRRSLEAIELGLGEAQVILALSSHLGAVESEKQKLRAQVRRLVQE

SEQ ID NO: 50944 - protein, 504 aa, Homo sapiens
MSVQVAAPGSAGLGPERLSPEELVRQTRQVVQGLEALRAEHHGLAGHLAEALAGQGPAAGLEMLEEKQQVVSHSLEAIELGLGEAQVLLALSAHVGALEAEKQRLRSQARRLAQENVWLREELEETQRRLRASEESVAQLEEEKRHLEFLGQLRQYDPPAESQQSESPPRRDSLASLFPSEEEERKGPEAAGAAAAQQGGYEIPARLRTLHNLVIQYAGQGRYEVAVPLCRQALEDLERSSGHCHPDVATMLNILALVYRDQNKYKEATDLLHDALQIREQTLGPEHPAVAATLNNLAVLYGKRGRYREAEPLCQRALEIREKVLGADHPDVAKQLNNLALLCQNQGKFEDVERHYARALSIYEALGGPHDPNVAKTKNNLASAYLKQNKYQQAEELYKEILHKEDLPAPLGAPNTGTAGDAEQALRRSSSLSKIRESIRRGSEKLVSRLRGEAAAGAAGMKRAMSLNTLNVDAPRAPGTQFPSWHLDKAPRTLSASTQDLSPH

SEQ ID NO: 50945 - protein, 518 aa, Homo sapiens
MIPQTPHHCSPGAAMSVQVAAPGSAGLGPERLSPEELVRQTRQVVQGLEALRAEHHGLAGHLAEALAGQGPAAGLEMLEEKQQVVSHSLEAIELGLGEAQVLLALSAHVGALEAEKQRLRSQARRLAQENVWLREELEETQRRLRASEESVAQLEEEKRHLEFLGQLRQYDPPAESQQSESPPRRDSLASLFPSEEEERKGPEAAGAAAAQQGGYEIPARLRTLHNLVIQYAGQGRYEVAVPLCRQALEDLERSSGHCHPDVATMLNILALVYRDQNKYKEATDLLHDALQIREQTLGPEHPAVAATLNNLAVLYGKRGRYREAEPLCQRALEIREKVLGADHPDVAKQLNNLALLCQNQGKFEDVERHYARALSIYEALGGPHDPNVAKTKNNLASAYLKQNKYQQAEELYKEILHKEDLPAPLGAPNTGTAGDAEQALRRSSSLSKIRESIRRGSEKLVSRLRGEAAAGAAGMKRAMSLNTLNVDAPRAPGTQFPSWHLDKAPRTLSASTQDLSPH

SEQ ID NO: 50946 - protein, 792 aa, Homo sapiens
MQGEDARYLKRKVKGGNIDVHPSEKALIVHYEVEATILGEMGDPMLGERKECQKIIRLKSLNANTDITSLARKVVEECKLIHPSKLNEVEQLLYYLQNRRDSLSGKEKKEKSSKPKDPPPFEGMEIDEVANINDMDEYIELLYEDIPDKVRGSALILQLARNPDNLEELLLNETALGALARVLREDWKQSVELATNIIYIFFCFSSFSQFHGLITHYKIGALCMNIIDHELKRHELWQEELSKKKKAVDEDPENQTLRKDYEKTFKKYQGLVVKQEQLLRVALYLLLNLAEDTRTELKMRNKNIVHMLVKALDRDNFELLILVVSFLKKLSIFMENKNDMVEMDIVEKLVKMIPCEHEDLLNITLRLLLNLSFDTGLRNKMVQVGLLPKLTALLGNDNYKQIAMCVLYHISMDDRFKSMFAYTDCIPQLMKMLFECSDERIDLELISFCINLAANKRNVQLICEGNGLKMLMKRALKFKDPLLMKMIRNISQHDGPTKNLFIDYVGDLAAQISNDEEEEFVIECLGTLANLTIPDLDWELVLKEYKLVPYLKDKLKPGAAEDDLVLEVVIMIGTVSMDDSCAALLAKSGIIPALIELLNAQQEDDEFVCQIIYVFYQMVFHQATRDVIIKETQAPAYLIDLMHDKNNEIRKVCDNTLDIIAEYDEEWAKKIQSEKFRWHNSQWLEMVESRQMDESEQYLYGDDRIEPYIHEGDILERPDLFYNSDGLIASEGAISPDFFNDYHLQNGDVVGQHSFPGSLGMDGFGQPVGILGRPATAYGFRPDEPYYYGYGS

SEQ ID NO: 50947 - protein, 752 aa, Homo sapiens
MGDPMLGERKECQKIIRLKSLNANTDITSLARKVVEECKLIHPSKLNEVEQLLYYLQNRRDSLSGKEKKEKSSKPKDPPPFEGMEIDEVANINDMDEYIELLYEDIPDKVRGSALILQLARNPDNLEELLLNETALGALARVLREDWKQSVELATNIIYIFFCFSSFSQFHGLITHYKIGALCMNIIDHELKRHELWQEELSKKKKAVDEDPENQTLRKDYEKTFKKYQGLVVKQEQLLRVALYLLLNLAEDTRTELKMRNKNIVHMLVKALDRDNFELLILVVSFLKKLSIFMENKNDMVEMDIVEKLVKMIPCEHEDLLNITLRLLLNLSFDTGLRNKMVQVGLLPKLTALLGNDNYKQIAMCVLYHISMDDRFKSMFAYTDCIPQLMKMLFECSDERIDLELISFCINLAANKRNVQLICEGNGLKMLMKRALKFKDPLLMKMIRNISQHDGPTKNLFIDYVGDLAAQISNDEEEEFVIECLGTLANLTIPDLDWELVLKEYKLVPYLKDKLKPGAAEDDLVLEVVIMIGTVSMDDSCAALLAKSGIIPALIELLNAQQEDDEFVCQIIYVFYQMVFHQATRDVIIKETQAPAYLIDLMHDKNNEIRKVCDNTLDIIAEYDEEWAKKIQSEKFRWHNSQWLEMVESRQMDESEQYLYGDDRIEPYIHEGDILERPDLFYNSDGLIASEGAISPDFFNDYHLQNGDVVGQHSFPGSLGMDGFGQPVGILGRPATAYGFRPDEPYYYGYGS

SEQ ID NO: 50948 - protein, 748 aa, Homo sapiens
MQGEDARYLKSIRLKSLNANTDITSLARKVVEECKLIHPSKLNEVEQLLYYLQNRRDSLSGKEKKEKSSKPKDPPPFEGMEIDEVANINDMDEYIELLYEDIPDKVRGSALILQLARNPDNLEELLLNETALGALARVLREDWKQSVELATNIIYIFFCFSSFSQFHGLITHYKIGALCMNIIDHELKRHELWQEELSKKKKAVDEDPENQTLRKDYEKTFKKYQGLVVKQEQLLRVALYLLLNLAEDTRTELKMRNKNIVHMLVKALDRDNFELLILVVSFLKKLSIFMENKNDMVEMDIVEKLVKMIPCEHEDLLNITLRLLLNLSFDTGLRNKMVQVGLLPKLTALLGNDNYKQIAMCVLYHISMDDRFKSMFAYTDCIPQLMKMLFECSDERIDLELISFCINLAANKRNVQLICEGNGLKMLMKRALKFKDPLLMKMIRNISQHDGPTKNLFIDYVGDLAAQISNDEEEEFVIECLGTLANLTIPDLDWELVLKEYKLVPYLKDKLKPGAAEDDLVLEVVIMIGTVSMDDSCAALLAKSGIIPALIELLNAQQEDDEFVCQIIYVFYQMVFHQATRDVIIKETQAPAYLIDLMHDKNNEIRKVCDNTLDIIAEYDEEWAKKIQSEKFRWHNSQWLEMVESRQMDESEQYLYGDDRIEPYIHEGDILERPDLFYNSDGLIASEGAISPDFFNDYHLQNGDVVGQHSFPGSLGMDGFGQPVGILGRPATAYGFRPDEPYYYGYGS

SEQ ID NO: 50949 - protein, 714 aa, Homo sapiens
MSIALGNTYRRSLSDSETVSVLQASLCEEKKEKSSKPKDPPPFEGMEIDEVANINDMDEYIELLYEDIPDKVRGSALILQLARNPDNLEELLLNETALGALARVLREDWKQSVELATNIIYIFFCFSSFSQFHGLITHYKIGALCMNIIDHELKRHELWQEELSKKKKAVDEDPENQTLRKDYEKTFKKYQGLVVKQEQLLRVALYLLLNLAEDTRTELKMRNKNIVHMLVKALDRDNFELLILVVSFLKKLSIFMENKNDMVEMDIVEKLVKMIPCEHEDLLNITLRLLLNLSFDTGLRNKMVQVGLLPKLTALLGNDNYKQIAMCVLYHISMDDRFKSMFAYTDCIPQLMKMLFECSDERIDLELISFCINLAANKRNVQLICEGNGLKMLMKRALKFKDPLLMKMIRNISQHDGPTKNLFIDYVGDLAAQISNDEEEEFVIECLGTLANLTIPDLDWELVLKEYKLVPYLKDKLKPGAAEDDLVLEVVIMIGTVSMDDSCAALLAKSGIIPALIELLNAQQEDDEFVCQIIYVFYQMVFHQATRDVIIKETQAPAYLIDLMHDKNNEIRKVCDNTLDIIAEYDEEWAKKIQSEKFRWHNSQWLEMVESRQMDESEQYLYGDDRIEPYIHEGDILERPDLFYNSDGLIASEGAISPDFFNDYHLQNGDVVGQHSFPGSLGMDGFGQPVGILGRPATAYGFRPDEPYYYGYGS

SEQ ID NO: 50950 - protein, 494 aa, Homo sapiens
MRNKNIVHMLVKALDRDNFELLILVVSFLKKLSIFMENKNDMVEMDIVEKLVKMIPCEHEDLLNITLRLLLNLSFDTGLRNKMVQVGLLPKLTALLGNDNYKQIAMCVLYHISMDDRFKSMFAYTDCIPQLMKMLFECSDERIDLELISFCINLAANKRNVQLICEGNGLKMLMKRALKFKDPLLMKMIRNISQHDGPTKNLFIDYVGDLAAQISNDEEEEFVIECLGTLANLTIPDLDWELVLKEYKLVPYLKDKLKPGAAEDDLVLEVVIMIGTVSMDDSCAALLAKSGIIPALIELLNAQQEDDEFVCQIIYVFYQMVFHQATRDVIIKETQAPAYLIDLMHDKNNEIRKVCDNTLDIIAEYDEEWAKKIQSEKFRWHNSQWLEMVESRQMDESEQYLYGDDRIEPYIHEGDILERPDLFYNSDGLIASEGAISPDFFNDYHLQNGDVVGQHSFPGSLGMDGFGQPVGILGRPATAYGFRPDEPYYYGYGS

SEQ ID NO: 50951 - protein, 644 aa, Homo sapiens
MKLITILFLCSRLLLSLTQESQSEEIDCNDKDLFKAVDAALKKYNSQNQSNNQFVLYRITEATKTVGSDTFYSFKYEIKEGDCPVQSGKTWQDCEYKDAAKAATGECTATVGKRSSTKFSVATQTCQITPAEGPVVTAQYDCLGCVHPISTQSPDLEPILRHGIQYFNNNTQHSSLFMLNEVKRAQRQVVAGLNFRITYSIVQTNCSKENFLFLTPDCKSLWNGDTGECTDNAYIDIQLRIASFSQNCDIYPGKDFVQPPTKICVGCPRDIPTNSPELEETLTHTITKLNAENNATFYFKIDNVKKARVQVVAGKKYFIDFVARETTCSKESNEELTESCETKKLGQSLDCNAEVYVVPWEKKIYPTVNCQPLGMISLMKRPPGFSPFRSSRIGEIKEETTVSPPHTSMAPAQDEERDSGKEQGHTRRHDWGHEKQRKHNLGHGHKHERDQGHGHQRGHGLGHGHEQQHGLGHGHKFKLDDDLEHQGGHVLDHGHKHKHGHGHGKHKNKGKKNGKHNGWKTEHLASSSEDSTTPSAQTQEKTEGPTPIPSLAKPGVTVTFSDFQDSDLIATMMPPISPAPIQSDDDWIPDIQIDPNGLSFNPISDFPDTTSPKCPGRPWKSVSEINPTTQMKESYYFDLTDGLS

SEQ ID NO: 50952 - protein, 427 aa, Homo sapiens
MKLITILFLCSRLLLSLTQESQSEEIDCNDKDLFKAVDAALKKYNSQNQSNNQFVLYRITEATKTVGSDTFYSFKYEIKEGDCPVQSGKTWQDCEYKDAAKAATGECTATVGKRSSTKFSVATQTCQITPAEGPVVTAQYDCLGCVHPISTQSPDLEPILRHGIQYFNNNTQHSSLFMLNEVKRAQRQVVAGLNFRITYSIVQTNCSKENFLFLTPDCKSLWNGDTGECTDNAYIDIQLRIASFSQNCDIYPGKDFVQPPTKICVGCPRDIPTNSPELEETLTHTITKLNAENNATFYFKIDNVKKARVQVVAGKKYFIDFVARETTCSKESNEELTESCETKKLGQSLDCNAEVYVVPWEKKIYPTVNCQPLGMISLMKRPPGFSPFRSSRIGEIKEETTSHLRSCEYKGRPPKAGAEPASEREVS

SEQ ID NO: 50953 - protein, 415 aa, Homo sapiens [sequence omitted]

SEQ ID NO: 50954 - protein, 391 aa, Homo sapiens
MKLITILFLCSRLLLSLTQESQSEEIDCNDKDLFKAVDAALKKYNSQNQSNNQFVLYRITEATKTVGSDTFYSFKYEIKEGDCPVQSGKTWQDCEYKDAAKAATGECTATVGKRSSTKFSVATQTCQITPAEGPVVTAQYDCLGCVHPISTQSPDLEPILRHGIQYFNNNTQHSSLFMLNEVKRAQRQDTGECTDNAYIDIQLRIASFSQNCDIYPGKDFVQPPTKICVGCPRDIPTNSPELEETLTHTITKLNAENNATFYFKIDNVKKARVQVVAGKKYFIDFVARETTCSKESNEELTESCETKKLGQSLDCNAEVYVVPWEKKIYPTVNCQPLGMISLMKRPPGFSPFRSSRIGEIKEETTSHLRSCEYKGRPPKAGAEPASEREVS

SEQ ID NO: 50955 - protein, 101 aa, Homo sapiens
MDIPISSRDFRGLQLACVALGLVAGSIIIGISVSKAAAAMGGVFIGAAVLGSLRIHPHPGADHGEGRSSTNGNKEGARSSLSTVSRTLEKLKPGTRGAEEC

SEQ ID NO: 50956 - protein, 124 aa, Homo sapiens
MDIPISSRDFRGLQLACVALGLVAGSIIIGISVSKAAAAMGGVFIGAAVLGLLILAYPFLKARFNLDHILPTIGSLRIHPHPGADHGEGRSSTNGNKEGARSSLSTVSRTLEKLKPGTRGAEEC

SEQ ID NO: 50957 - protein, 1044 aa, Homo sapiens
MKPGCAAGSPGNEWIFFSTDEITTRYRNTMSNGGLQRSVILSALILLRAVTGFSGDGRAIWSKNPNFTPVNESQLFLYDTFPKNFFWGIGTGALQVEGSWKKDGKGPSIWDHFIHTHLKNVSSTNGSSDSYIFLEKDLSALDFIGVSFYQFSISWPRLFPDGIVTVANAKGLQYYSTLLDALVLRNIEPIVTLYHWDLPLALQEKYGGWKNDTIIDIFNDYATYCFQMFGDRVKYWITIHNPYLVAWHGYGTGMHAPGEKGNLAAVYTVGHNLIKAHSKVWHNYNTHFRPHQKGWLSITLGSHWIEPNRSENTMDIFKCQQSMVSVLGWFANPIHGDGDYPEGMRKKLFSVLPIFSEAEKHEMRGTADFFAFSFGPNNFKPLNTMAKMGQNVSLNLREALNWIKLEYNNPRILIAENGWFTDSRVKTEDTTAIYMMKNFLSQVLQAIRLDEIRVFGYTAWSLLDGFEWQDAYTIRRGLFYVDFNSKQKERKPKSSAHYYKQIIRENGFSLKESTPDVQGQFPCDFSWGVTESVLKPESVASSPQFSDPHLYVWNATGNRLLHRVEGVRLKTRPAQCTDFVNIKKQLEMLARMKVTHYRFALDWASVLPTGNLSAVNRQALRYYRCVVSEGLKLGISAMVTLYYPTHAHLGLPEPLLHADGWLNPSTAEAFQAYAGLCFQELGDLVKLWITINEPNRLSDIYNRSGNDTYGAAHNLLVAHALAWRLYDRQFRPSQRGAVSLSLHADWAEPANPYADSHWRAAERFLQFEIAWFAEPLFKTGDYPAAMREYIASKHRRGLSSSALPRLTEAERRLLKGTVDFCALNHFTTRFVMHEQLAGSRYDSDRDIQFLQDITRLSSPTRLAVIPWGVRKLLRWVRRNYGDMDIYITASGIDDQALEDDRLRKYYLGKYLQEVLKAYLIDKVRIKGYYAFKLAEEKSKPRFGFFTSDFKAKSSIQFYNKVISSRGFPFENSSSRCSQTQENTECTVCLFLVQKKPLIFLGCCFFSTLVLLLSIAIFQRQKRRKFWKAKNLQHIPLKKGKRVVS

SEQ ID NO: 50958 - protein, 462 aa, Homo sapiens
MGTQALQGFLFLLFLPLLQPRGASAGSLHSPGLSECFQVNGADYRGHQNRTGPRGAGRPCLFWDQTQQHSYSSASDPHGRWGLGAHNFCRNPDGDVQPWCYVAETEEGIYWRYCDIPSCHMPGYLGCFVDSGAPPALSGPSGTSTKLTVQVCLRFCRMKGYQLAGVEAGYACFCGSESDLARGRLAPATDCDQICFGHPGQLCGGDGRLGVYEVSVGSCQGNWTAPQGVIYSPDFPDEYGPDRNCSWALGPPGAALELTFRLFELADPRDRLELRDAASGSLLRAFDGARPPPSGPLRLGTAALLLTFRSDARGHAQGFALTYRGLQDAAEDPEAPEGSAQTPAAPLDGANVSCSPRPGAPPAAIGARVFSTVTAVSVLLLLLLGLLRPLRRRSCLLAPGKGPPALGASRGPRRSWAVWYQQPRGVALPCSPGDPQAEGSAAGYRPLSASSQSSLRSLISAL

SEQ ID NO: 50959 - protein, 420 aa, Homo sapiens
MGTQALQGFLFLLFLPLLQPRGASAGSLHSPGLSECFQVNGADYRGHQNRTGPRGAGRPCLFWDQTQQHSYSSASDPHGRWGLGAHNFCRNPDGDVQPWCYVAETEEGIYWRYCDIPSCHMPGYLGCFVDSGAPPALSGPSGTSTKLTVQVCLRFCRMKGYQLAGVEAGYACFCGSESDLARGRLAPATDCDQICFGHPGQLCGGDGRLGVYEVSVGSCQGNWTAPQGVIYSPDFPDEYGPDRNCSWALGPPGAALELTFRLFELADPRDRLELRDAASGSLLRAFDGARPPPSGPLRLGTAALLLTFRSDARGHAQGFALTYRGLQDAAEDPEAPEGSAQTPAAPLDGANVSCSPRPGAPPAAIGGAVCWLREKGPRRWGLPGAPGEAGLCGTNSPEGWPCPAPPGTPRLRVLPRATGL

SEQ ID NO: 50960 - protein, 423 aa, Homo sapiens
MGTQALQGFLFLLFLPLLQPRGASAGSLHSPGLSECFQVNGADYRGHQNRTGPRGAGRPCLFWDQTQQHSYSSASDPHGRWGLGAHNFCRNPDGDVQPWCYVAETEEGIYWRYCDIPSCHMPGYLGCFVDSGAPPALSGPSGTSTKLTVQVCLRFCRMKGYQLCGGDGRLGVYEVSVGSCQGNWTAPQGVIYSPDFPDEYGPDRNCSWALGPPGAALELTFRLFELADPRDRLELRDAASGSLLRAFDGARPPPSGPLRLGTAALLLTFRSDARGHAQGFALTYRGLQDAAEDPEAPEGSAQTPAAPLDGANVSCSPRPGAPPAAIGARVFSTVTAVSVLLLLLLGLLRPLRRRSCLLAPGKGPPALGASRGPRRSWAVWYQQPRGVALPCSPGDPQAEGSAAGYRPLSASSQSSLRSLISAL

SEQ ID NO: 50961 - protein, 381 aa, Homo sapiens
MGTQALQGFLFLLFLPLLQPRGASAGSLHSPGLSECFQVNGADYRGHQNRTGPRGAGRPCLFWDQTQQHSYSSASDPHGRWGLGAHNFCRNPDGDVQPWCYVAETEEGIYWRYCDIPSCHMPGYLGCFVDSGAPPALSGPSGTSTKLTVQVCLRFCRMKGYQLCGGDGRLGVYEVSVGSCQGNWTAPQGVIYSPDFPDEYGPDRNCSWALGPPGAALELTFRLFELADPRDRLELRDAASGSLLRAFDGARPPPSGPLRLGTAALLLTFRSDARGHAQGFALTYRGLQDAAEDPEAPEGSAQTPAAPLDGANVSCSPRPGAPPAAIGGAVCWLREKGPRRWGLPGAPGEAGLCGTNSPEGWPCPAPPGTPRLRVLPRATGL

SEQ ID NO: 50962 - protein, 736 aa, Homo sapiens
MGNPENIEDAYVAVIRPKNTASLNSREYRAKSYEILLHEVPIEGQKKKRKKVLLETKLQGNSEITQGILDYVVETTKPISPANQGIRGKRVVLMKKFPLDGEKMGREASLFIVPSVVKDNTKYTYTPGCPIFYCLQDIMRVCSESSTHFATLTARMLIALDKWLDERHAQSHFIPALFRPSPLERIKTNVINPAYATESGQTENSLHMGYSALEIKSKMLALEKADTCIYNPLFGSDLQYTNRVDKVVINPYFGLGAPDYSKIQIPKQEKWQRSMSSVTEDKERQWVDDFPLHRSACEGDSELLSRLLSERFSVNQLDSDHWAPIHYACWYGKVEATRILLEKGKCNPNLLNGQLSSPLHFAAGGGHAEIVQILLNHPETDRHITDQQGRSPLNICEENKQNNWEEAAKLLKEAINKPYEKVRIYRMDGSYRSVELKHGNNTTVQQIMEGMRLSQETQQYFTIWICSENLSLQLKPYHKPLQHVRDWPEILAELTNLDPQRETPQLFLRRDVRLPLEVEKQIEDPLAILILFDEARYNLLKGFYTAPDAKLITLASLLLQIVYGNYESKKHKQGFLNEENLKSIVPVTKLKSKAPHWTNRILHEYKNLSTSEGVSKEMHHLQRMFLQNCWEIPTYGAAFFTGQIFTKASPSNHKVIPVYVGVNIKGLHLLNMETKALLISLKYGCFMWQLGDTDTCFQIHSMENKMSFIVHTKQAGLVVKLLMKLNGQLMPTERNS

SEQ ID NO: 50963 - protein, 381 aa, Homo sapiens
MASPSLERPEKGAGKSEFRNQKPKPENQDESELLTVPDGWKEPAFSKEDNPRGLLEESSFATLFPKYREAYLKECWPLVQKALNEHHVNATLDLIEGSMTVCTTKKTFDPYIIIRARDLIKLLARSVSFEQAVRILQDDVACDIIKIGSLVRNKERFVKRRQRLIGPKGSTLKALELLTNCYIMVQGNTVSAIGPFSGLKEVRKVVLDTMKNIHPIYNIKSLMIKRELAKDSELRSQSWERFLPQFKHKNVNKRKEPKKKTVKKEYTPFPPPQPESQIDKELASGEYFLKANQKKRQKMEAIKAKQAEAISKRQEERNKAFIPPKEKPIVKPKEASTETKIDVASIKEKVKKAKNKKLGALTAEEIALKMEADEKKKKKKK

SEQ ID NO: 50964 - protein, 512 aa, Homo sapiens
MHTPDFAGPDDARAVDIMDICESILERKRHDSERSTCSILEQTDMEAVEALVCMSSWGQRSQKGDLLRIRPLTPVSDSGDVTTTVHMDAATPELPKDFHSLSTLCITPPQSPDLVEPSTRTPVSPQVTDSKACTATDVLQSSAVVARALSGGAERGLLGLEPVPSSPCRAKGTSVIRHTGESPAACFPTIQTPDCRLSDSREGEEQLLGHFETLQDTHLTDSLLSTNLVSCQPCLHKSGGLLLTDKGQQAGWPGAVQTCSPKNYENDLPRKTTPLISVSVPAPPVLCQMIPVTGQSSMLPAFLKPPPQLSVGTVRPILAQAAPAPQPVFVGPAVPQGAVMLVLPQGALPPPAPCAANVMAAGNTKLLPLAPAPVFITSSQNCVPQVDFSRRRNYVCSFPGCRKTYFKSSHLKAHLRTHTGEKPFNCSWDGCDKKFARSDELSRHRRTHTGEKKFVCPVCDRRFMRSDHLTKHARRHMTTKKIPGWQAEVGKLNRIASAESPGSPLVSMPASA

SEQ ID NO: 50965 - protein, 495 aa, Homo sapiens
MDICESILERKRHDSERSTCSILEQTDMEAVEALVCMSSWGQRSQKGDLLRIRPLTPVSDSGDVTTTVHMDAATPELPKDFHSLSTLCITPPQSPDLVEPSTRTPVSPQVTDSKACTATDVLQSSAVVARALSGGAERGLLGLEPVPSSPCRAKGTSVIRHTGESPAACFPTIQTPDCRLSDSREGEEQLLGHFETLQDTHLTDSLLSTNLVSCQPCLHKSGGLLLTDKGQQAGWPGAVQTCSPKNYENDLPRKTTPLISVSVPAPPVLCQMIPVTGQSSMLPAFLKPPPQLSVGTVRPILAQAAPAPQPVFVGPAVPQGAVMLVLPQGALPPPAPCAANVMAAGNTKLLPLAPAPVFITSSQNCVPQVDFSRRRNYVCSFPGCRKTYFKSSHLKAHLRTHTGEKPFNCSWDGCDKKFARSDELSRHRRTHTGEKKFVCPVCDRRFMRSDHLTKHARRHMTTKKIPGWQAEVGKLNRIASAESPGSPLVSMPASA

SEQ ID NO: 50966 - protein, 495 aa, Homo sapiens; identical to SEQ ID NO: 50965

SEQ ID NO: 50967 - protein, 402 aa, Homo sapiens
ISVHLMRKHVKNINTFENRMLMLDGMPAVRVKTELLESEQGSPNVHNYPDMEAVPLLLNNVKGEPPEDSLSVDHFQTQTEPVDLSINKARTSPTAVSSSPVSMTASASSPSSTSTSSSSSSRLASSPTVITSVSSASSSSTVLTPGPLVASASGVGGQQFLHIIHPVPPSSPMNLQSNKLSHVHRIPVVVQSVPVVYTAVRSPGNVNNTIVVPLLEDGRGHGKAQMDPRGLSPRQSKSDSDDDDLPNVTLDSVNETGSTALSIARAVQEVHPSPVSRVRGNRMNNQKFPCSISPFSIESTRRQRRSESPDSRKRRIHRCDFEGCNKVYTKSSHLKAHRRTHTGEKPYKCTWEGCTWKFARSDELTRHYRKHTGVKPFKCADCDRSFSRSDHLALHRRRHMLV

SEQ ID NO: 50968 - protein, 402 aa, Homo sapiens
MNIHMKRKTIKNINTFENRMLMLDGMPAVRVKTELLESEQGSPNVHNYPDMEAVPLLLNNVKGEPPEDSLSVDHFQTQTEPVDLSINKARTSPTAVSSSPVSMTASASSPSSTSTSSSSSSRLASSPTVITSVSSASSSSTVLTPGPLVASASGVGGQQFLHIIHPVPPSSPMNLQSNKLSHVHRIPVVVQSVPVVYTAVRSPGNVNNTIVVPLLEDGRGHGKAQMDPRGLSPRQSKSDSDDDDLPNVTLDSVNETGSTALSIARAVQEVHPSPVSRVRGNRMNNQKFPCSISPFSIESTRRQRRSESPDSRKRRIHRCDFEGCNKVYTKSSHLKAHRRTHTGEKPYKCTWEGCTWKFARSDELTRHYRKHTGVKPFKCADCDRSFSRSDHLALHRRRHMLV

SEQ ID NO: 50969 - protein, 402 aa, Homo sapiens; identical to SEQ ID NO: 50968

SEQ ID NO: 50970 - protein, 288 aa, Homo sapiens
MAAAAYVDHFAAECLVSMSSRAVVHGPREGPESRPEGAAVAATPTLPRVEERRDGKDSASLFVVARILADLNQQAPAPAPAERREGAAARKARTPCRLPPPAPEPTSPGAEGAAAAPPSPAWSEPEPEAGLEPEREPGPAGSGEPGLRQRVRRGRSRADLESPQRKHKCHYAGCEKVYGKSSHLKAHLRTHTGERPFACSWQDCNKKFARSDELARHYRTHTGEKKFSCPICEKRFMRSDHLTKHARRHANFHPGMLQRRGGGSRTGSLSDYSRSDASSPTISPASSP

SEQ ID NO: 50971 - protein, 416 aa, Homo sapiens
MVDHLLPVDENFSSPKCPVGYLGDRLVGRRAYHMLPSPVSEDDSDASSPCSCSSPDSQALCSCYGGGLGTESQDSILDFLLSQATLGSGGGSGSSIGASSGPVAWGPWRRAAAPVKGEHFCLPEFPLGDPDDVPRPFQPTLEEIEEFLEENMEPGVKEVPEGNSKDLDACSQLSAGPHKSHLHPGSSGRERCSPPPGGASAGGAQGPGGGPTPDGPIPVLLQIQPVPVKQESGTGPASPGQAPENVKVAQLLVNIQGQTFALVPQVVPSSNLNLPSKFVRIAPVPIAAKPVGSGPLGPGPAGLLMGQKFPKNPAAELIKMHKCTFPGCSKMYTKSSHLKAHLRRHTGEKPFACTWPGCGWRFSRSDELSRHRRSHSGVKPYQCPVCEKKFARSDHLSKHIKVHRFPRSSRSVRSVN

SEQ ID NO: 50972 - protein, 355 aa, Homo sapiens
MALSEPILPSFSTFASPCRERGLQERWPRAEPESGGTDDDLNSVLDFILSMGLDGLGAEAAPEPPPPPPPPAFYYPEPGAPPPYSAPAGGLVSELLRPELDAPLGPALHGRFLLAPPGRLVKAEPPEADGGGGYGCAPGLTRGPRGLKREGAPGPAASCMRGPGGRPPPPPDTPPLSPDGPARLPAPGPRASFPPPFGGPGFGAPGPGLHYAPPAPPAFGLFDDAAAAAAALGLAPPAARGLLTPPASPLELLEAKPKRGRRSWPRKRTATHTCSYAGCGKTYTKSSHLKAHLRTHTGEKPYHCNWDGCGWKFARSDELTRHYRKHTGHRPFQCHLCDRAFSRSDHLALHMKRHM

SEQ ID NO: 50973 - protein, 77 aa, Homo sapiens
MDVLPMCSIFQELQIVHETGYFSALPSLEEYWQQTCLELERYLQSEPCYVSASEIKFDSQESVDQNHWLGRKRRNPN

SEQ ID NO: 50974 - protein, 281 aa, Homo sapiens
MDVLPMCSIFQELQIVHETGYFSALPSLEEYWQQTCLELERYLQSEPCYVSASEIKFDSQEDLWTKIILAREKKEESELKISSSPPEDTLISPSFCYNLETNSLNSDVSSESSDSSEELSPTAKFTSDPIGEVLVSSGKLSSSVTSTPPSSPELSREPSQLWGCVPGELPSPGKVRSGTSGKPGDKGNGDASPDGRRRVHRCHFNGCRKVYTKSSHLKAHQRTHTGQCPRGPRRAAAGGRHCIAPALEGAGPGCTGCGQGRQILTSSDVFHQSIRSFWSSE

SEQ ID NO: 50975 - protein, 283 aa, Homo sapiens
MDVLPMCSIFQELQIVHETGYFSALPSLEEYWQQTCLELERYLQSEPCYVSASEIKFDSQEDLWTKIILAREKKEESELKISSSPPEDTLISPSFCYNLETNSLNSDVSSESSDSSEELSPTAKFTSDPIGEVLVSSGKLSSSVTSTPPSSPELSREPSQLWGCVPGELPSPGKVRSGTSGKPGDKGNGDASPDGRRRVHRCHFNGCRKVYTKSSHLKAHQRTHTGEKPYRCSWEGCEWRFARSDELTRHFRKHTGAKPFKCSHCDRCFSRSDHLALHMKRHL

SEQ ID NO: 50976 - protein, 237 aa, Homo sapiens
MDVLPMCSIFQELQIVHETGYFSALPSLEEYWQQTCLELERYLQSEPCYVSASEIKFDSQEDLWTKIILAREKKEESELKISSSPPEDTLISPSFCYNLETNSLNSDVSSESSDSSEELSPTAKFTSDPIGEVLVSSGKLSSSVTSTPPSSPELSREPSQLWGCVPGELPSPGKVRSGTSGKPGDKGNGDASPDGRRRVHRCHFNGCRKVYTKSSHLKAHQRTHTGVFPGLTTWPCT

SEQ ID NO: 50977 - protein, 302 aa, Homo sapiens
MDVLASYSIFQELQLVHDTGYFSALPSLEETWQQTCLELERYLQTEPRRISETFGEDLDCFLHASPPPCIEESFRRLDPLLLPVEAAICEKSSAVDILLSRDKLLSETCLSLQPASSSLDSYTAVNQAQLNAVTSLTPPSSPELSRHLVKTSQTLSAVDGTVTLKLVAKKAALSSVKVGGVATAAAAVTAAGAVKSGQSDSDQGGLGAEACPENKKRVHRCQFNGCRKVYTKSSHLKAHQRTHTGEKPYKCSWEGCEWRFARSDELTRHYRKHTGAKPFKCNHCDRCFSRSDHLALHMKRHI

SEQ ID NO: 50978 - protein, 274 aa, Homo sapiens
MFPSWPTCLELERYLQTEPRRISETFGEDLDCFLHASPPPCIEESFRRLDPLLLPVEAAICEKSSAVDILLSRDKLLSETCLSLQPASSSLDSYTAVNQAQLNAVTSLTPPSSPELSRHLVKTSQTLSAVDGTVTLKLVAKKAALSSVKVGGVATAAAAVTAAGAVKSGQSDSDQGGLGAEACPENKKRVHRCQFNGCRKVYTKSSHLKAHQRTHTGEKPYKCSWEGCEWRFARSDELTRHYRKHTGAKPFKCNHCDRCFSRSDHLALHMKRHI

SEQ ID NO: 50979 - protein, 269 aa, Homo sapiens
MTCLELERYLQTEPRRISETFGEDLDCFLHASPPPCIEESFRRLDPLLLPVEAAICEKSSAVDILLSRDKLLSETCLSLQPASSSLDSYTAVNQAQLNAVTSLTPPSSPELSRHLVKTSQTLSAVDGTVTLKLVAKKAALSSVKVGGVATAAAAVTAAGAVKSGQSDSDQGGLGAEACPENKKRVHRCQFNGCRKVYTKSSHLKAHQRTHTGEKPYKCSWEGCEWRFARSDELTRHYRKHTGAKPFKCNHCDRCFSRSDHLALHMKRHI

SEQ ID NO: 50980 - protein, 112 aa, Homo sapiens
MDVLASYSIFQELQLVHDTGYFSALPSLEETWQQTCLELERYLQTEPRRISETFGEDLDCFLHASPPPCIEESFRRLDPLLLPVEAAICEKSSAVDILLSRDKLLSETCLSL

SEQ ID NO: 50981 - protein, 60 aa, Homo sapiens
MDVLASYSIFQELQLVHDTGYFSALPSLEETWQQTCLELERYLQTEPRRISETFGEDLDC

SEQ ID NO: 50982 - protein, 112 aa, Homo sapiens
MDVLASYSIFQELQLVHDTGYFSALPSLEETWQQTCLELERYLQTEPRRISETFGEKPYKCSWEGCEWRFARSDELTRHYRKHTGAKPFKCNHCDRCFSRSDHLALHMKRHI

SEQ ID NO: 50983 - protein, 257 aa, Homo sapiens
MVDMDKLINNLEVQLNSEGGSMQVFKQVTASVRNRDPPEIEYRSNMTSPTLLDANPMENPALFNDIKIEPPEELLASDFSLPQVEPVDLSFHKPKAPLQPASMLQAPIRPPKPQSSPQTLVVSTSTSDMSTSANIPTVLTPGSVLTSSQSTGSQQILHVIHTIPSVSLPNKMGGLKTIPVVVQSLPMVYTTLPADGGPAAITVPLIGGDGKNAGSVKVDPTSMSPLEIPSDSEESTIESGSSALQSLQGLQQEREAL

SEQ ID NO: 50984 - protein, 359 aa, Homo sapiens
MVDMDKLINNLEVQLNSEGGSMQVFKQVTASVRNRDPPEIEYRSNMTSPTLLDANPMENPALFNDIKIEPPEELLASDFSLPQVEPVDLSFHKPKAPLQPASMLQAPIRPPKPQSSPQTLVVSTSTSDMSTSANIPTVLTPGSVLTSSQSTGSQQILHVIHTIPSVSLPNKMGGLKTIPVVVQSLPMVYTTLPADGGPAAITVPLIGGDGKNAGSVKVDPTSMSPLEIPSDSEESTIESGSSALQSLQGLQQEPAAMAQMQGEESLDLKRRRIHQCDFAGCSKVYTKSSHLKAHRRIHTGEKPYKCTWDGCSWKFARSDELTRHFRKHTGIKPFRCTDCNRSFSRSDHLSLHRRRHDTM

SEQ ID NO: 50985 - protein, 256 aa, Homo sapiens
MQPAKEVTKASDGSLLGDLGHTPLSKKEGIKWQRPRLSRQALMRCCLVKWILSSTAPQGSDSSDSELELSTVRHQPEGLDQLQAQTKFTKKELQSLYRGFKNECPTGLVDEDTFKLIYAQFFPQGDATTYAHFLFNAFDADGNGAIHFEDFVVGLSILLRGTVHEKLKWAFNLYDINKDGYITKEEMLAIMKSIYDMMGRHTYPILREDAPAEHVERFFEKMDRNQDGVVTIEEFLEACQKDENIMSSMQLFENVI

SEQ ID NO: 50986 - protein, 234 aa, Homo sapiens
MQPRKEVTKASDGSLLGDLGHTPLSKKEGIKWQRPRLSRQALMRCCLVKWILSSTAPQGSDSSDSELELSTVRHQPEGLDQLQAQTKFTKKELQSLYRGFKNGDATTYAHFLFNAFDADGNGAIHFEDFVVGLSILLRGTVHEKLKWAFNLYDINKDGYITKEEMLAIMKSIYDMMGRHTYPILREDAPAEHVERFFEKMDRNQDGVVTIEEFLEACQKDENIMSSMQLFENVI

SEQ ID NO: 50987 - protein, 230 aa, Homo sapiens
MGIQGMELCAMAVVVLLFIAVLKQFGILEPISMEDSSDSELELSTVRHQPEGLDQLQAQTKFTKKELQSLYRGFKNECPTGLVDEDTFKLIYAQFFPQGDATTYAHFLFNAFDADGNGAIHFEDFVVGLSILLRGTVHEKLKWAFNLYDINKDGYITKEEMLAIMKSIYDMMGRHTYPILREDAPAEHVERFFEKMDRNQDGVVTIEEFLEACQKDENIMSSMQLFENVI

SEQ ID NO: 50988 - protein, 188 aa, Homo sapiens
MATVRHRPEALELLEAQSKFTKKELQILYRGFKNECPSGVVNEETFKEIYSQFFPQGDSTTYAHFLFNAFDTDHNGAVSFEDFIKGLSILLRGTVQEKLNWAFNLYDINKDGYITKEEMLDIMKAIYDMMGKCTYPVLKEDAPRQHVETFFQKMDKNKDGVVTIDEFIESCQKDENIMRSMQLFENVI

SEQ ID NO: 50989 - protein, 225 aa, Homo sapiens
MSGCRKRCKREILKFAQYLLRLLTGSLHTDSVEDELEMATVRHRPEALELLEAQSKFTKKELQILYRGFKNECPSGVVNEETFKEIYSQFFPQGDSTTYAHFLFNAFDTDHNGAVSFEDFIKGLSILLRGTVQEKLNWAFNLYDINKDGYITKEEMLDIMKAIYDMMGKCTYPVLKEDAPRQHVETFFQKMDKNKDGVVTIDEFIESCQKDENIMRSMQLFENVI

SEQ ID NO: 50990 - protein, 229 aa, Homo sapiens
MNLEGLEMIAVLIVIVLFVKLLEQFGLIEAGLEDSVEDELEMATVRHRPEALELLEAQSKFTKKELQILYRGFKNECPSGVVNEETFKEIYSQFFPQGDSTTYAHFLFNAFDTDHNGAVSFEDFIKGLSILLRGTVQEKLNWAFNLYDINKDGYITKEEMLDIMKAIYDMMGKCTYPVLKEDAPRQHVETFFQKMDKNKDGVVTIDEFIESCQKDENIMRSMQLFENVI

SEQ ID NO: 50991 - protein, 250 aa, Homo sapiens
MNVRRVESISAQLEEASSTGGFLYAQNSTKRSIKERLMKLLPCSAAKTSSPAIQNSVEDELEMATVRHRPEALELLEAQSKFTKKELQILYRGFKNECPSGVVNEETFKEIYSQFFPQGDSTTYAHFLFNAFDTDHNGAVSFEDFIKGLSILLRGTVQEKLNWAFNLYDINKDGYITKEEMLDIMKAIYDMMGKCTYPVLKEDAPRQHVETFFQKMDKNKDGVVTIDEFIESCQKDENIMRSMQLFENVI

SEQ ID NO: 50992 - protein, 188 aa, Homo sapiens; identical to SEQ ID NO: 50988

SEQ ID NO: 50993 - protein, 216 aa, Homo sapiens
MNVRRVESISAQLEEASSTGDSVEDELEMATVRHRPEALELLEAQSKFTKKELQILYRGFKNECPSGVVNEETFKEIYSQFFPQGDSTTYAHFLFNAFDTDHNGAVSFEDFIKGLSILLRGTVQEKLNWAFNLYDINKDGYITKEEMLDIMKAIYDMMGKCTYPVLKEDAPRQHVETFFQKMDKNKDGVVTIDEFIESCQKDENIMRSMQLFENVI

SEQ ID NO: 50994 - protein, 188 aa, Homo sapiens; identical to SEQ ID NO: 50988

SEQ ID NO: 50995 - protein, 182 aa, Homo sapiens
  VARIANT 1: note = MOD_RES - Any amino acid
XGMNAGFEDCLVFDELMDKFSNDLSLCLPVFSRLRIPDDHAISDLSMYNYIEMRAHVNSSWFIFQKNMERFLHAIMPSTFIPLYTMVTFSRIRYHEAVQRWHWQKKVINKGLFFLGSLIAISSTYLLIHYMSPRSFLRLRRPWNWIAHFRNTTCFPAKAVDSLEQISNLISRLLSHSEILQT

SEQ ID NO: 50996 - protein, 452 aa, Homo sapiens
MDSSVIQRKKVAVIGGGLVGSLQACFLAKRNFQIDVYEAREDTRVATFTRGRSINLALSHRGRQALKAVGLEDQIVSQGIPMRARMIHSLSGKKSAIPYGTKSQYILSVSRENLNKDLLTAAEKYPNVKMHFNHRLLKCNPEEGMITVLGSDKVPKDVTCDLIVGCDGAYSTVRSHLMKKPRFDYSQQYIPHGYMELTIPPKNGDYAMEPNYLHIWPRNTFMMIALPNMNKSFTCTLFMPFEEFEKLLTSNDVVDFFQKYFPDAIPLIGEKLLVQDFFLLPAQPMISVKCSSFHFKSHCVLLGDAAHAIVPFFGQGMNAGFEDCLVFDELMDKFSNDLSLCLPVFSRLRIPDDHAISDLSMYNYIEVTFSRIRYHEAVQRWHWQKKVINKGLFFLGSLIAISSTYLLIHYMSPRSFLRLRRPWNWIAHFRNTTCFPAKAVDSLEQISNLISR

SEQ ID NO: 50997 - protein, 473 aa, Homo sapiens
MDSSVIQRKKVAVIGGGLVGSLQACFLAKRNFQIDVYEAREDTRVATFTRGRSINLALSHRGRQALKAVGLEDQIVSQGIPMRARMIHSLSGKKSAIPYGTKSQYILSVSRENLNKDLLTAAEKYPNVKMHFNHRLLKCNPEEGMITVLGSDKVPKDVTCDLIVGCDGAYSTVRSHLMKKPRFDYSQQYIPHGYMELTIPPKNGDYAMEPNYLHIWPRNTFMMIALPNMNKSFTCTLFMPFEEFEKLLTSNDVVDFFQKYFPDAIPLIGEKLLVQDFFLLPAQPMISVKCSSFHFKSHCVLLGDAAHAIVPFFGQGMNAGFEDCLVFDELMDKFSNDLSLCLPVFSRLRIPDDHAISDLSMYNYIEKNMERFLHAIMPSTFIPLYTMVTFSRIRYHEAVQRWHWQKKVINKGLFFLGSLIAISSTYLLIHYMSPRSFLRLRRPWNWIAHFRNTTCFPAKAVDSLEQISNLISR

SEQ ID NO: 50998 - protein, 486 aa, Homo sapiens
MDSSVIQRKKVAVIGGGLVGSLQACFLAKRNFQIDVYEAREDTRVATFTRGRSINLALSHRGRQALKAVGLEDQIVSQGIPMRARMIHSLSGKKSAIPYGTKSQYILSVSRENLNKDLLTAAEKYPNVKMHFNHRLLKCNPEEGMITVLGSDKVPKDVTCDLIVGCDGAYSTVRSHLMKKPRFDYSQQYIPHGYMELTIPPKNGDYAMEPNYLHIWPRNTFMMIALPNMNKSFTCTLFMPFEEFEKLLTSNDVVDFFQKYFPDAIPLIGEKLLVQDFFLLPAQPMISVKCSSFHFKSHCVLLGDAAHAIVPFFGQGMNAGFEDCLVFDELMDKFSNDLSLCLPVFSRLRIPDDHAISDLSMYNYIEMRAHVNSSWFIFQKNMERFLHAIMPSTFIPLYTMVTFSRIRYHEAVQRWHWQKKVINKGLFFLGSLIAISSTYLLIHYMSPRSFLRLRRPWNWIAHFRNTTCFPAKAVDSLEQISNLISR

SEQ ID NO: 50999 - protein, 562 aa, Homo sapiens
MELKKDINAVSIDMLLIVHSEKRRAAQGTLSDQQANPSSLLQRGGGFQGVGNGVRRWQKLEGNDFHENLVEKQHPQQPQVITSYNSQGTQLTVEVHPRDAMPQLLKKFSLAKRLQGDKNGNTRPRQPGGKDAHAYPWDRSSLKSMSLDLQQFEKLDIYASQVTAKSGLDELVSDLLQEAHTDLERVRAIWIWICHHIEYDIAAAQEKDRQAFKPTDILRTQKTNCDGYAGLFERMCRLAGVQCMTVPGYSKGFGYQTGQSFSGEFDHAWNAVYLEGRWHLVDSTWGSGLVDTITSKFTFLYNEFYFLTHPALFIEDHFPDNKNWQLLKPPQSLRQFENNMYHKSEFYNKGMLSAHPETSMIRTVNGKATVTIESCAPTLFMFMLNGKQEHGLLSLRKNGMKLEVYPPTMGTHKLQIFAKGNSDIYSSVLEYTLKCNYVDMGVQLPAELHQPVGPSWFSEQMGIMKPSHPDPIIHTSDGRCSISFSVEEGINVLASLHGDDGPITEETQRRYIFQLHREKQTELKVQLPHAGKFALKEVYVMVLENANHNFYSYILKYKVNAQ

SEQ ID NO: 51000 - protein, 661 aa, Homo sapiens
MELKKDINAVSIDMLLIVHSEKRRAAQGTLSDQQANPSSLLQRGGGFQGVGNGVRRWQKLEGNDFHENLVEKQHPQQPQVITSYNSQGTQLTVEVHPRDAMPQLLKKFSLAKRLQGDKNGNTRPRQPGGKDAHAYPWDRSSLKSMSLDLQQFEKLDIYASQVTAKSGLDELVSDLLQEAHTDLERVRAIWIWICHHIEYDIAAAQEKDRQAFKPTDILRTQKTNCDGYAGLFERMCRLAGVQCMTVPGYSKGFGYQTGQSFSGEFDHAWNAVYLEGRWHLVDSTWGSGLVDTITSKFTFLYNEFYFLTHPALFIEDHFPDNKNWQLLKPPQSLRQFENNMYHKSEFYNKGMLSAHPETSMIRTVNGKATVTIESCAPTLFMFMLNGKQEHGLLSLRKNGMKLEVYPPTMGTHKLQIFAKGNSDIYSSVLEYTLKCNYVDMGVQLPAELHQPVGPSWFSEQMGIMKPSHPDPIIHTSDGRCSISFSVEEGINVLASLHGDDGPITEETQRRYIFQLHREKQTELKVQLPHAGKFALKIFVKKRQEPGNYIFVFNYLVCCANTKVNWPMFPESFGNWGQDNELLEPLSGVLPANRNVPFKLKLHGIAKVLVKGQDTWPLTLNHEGYWEGSCSTAGCQEVYVMVLENANHNFYSYILKYKVNAQ

SEQ ID NO: 51001 - protein, 390 aa, Homo sapiens
MKLEAVDRMNPSLVCVASVTDVVDSRFLVHFDNWDDTYDYWCDPSSPYIHPVGWCQKQGKPLTPPQDYPDPDNFCWEKYLEETGASAVPTWAFKVRPPHSFLVNMKLEAVDRRNPALIRVASVEDVEDHRIKIHFDGWSHGYDFWIDADHPDIHPAGWCSKTGHPLQPPLGPREPSSASPGGCPPLSYRSLPHTRTSKYSFHHRKCPTPGCDGSGHVTGKFTAHHCLSGCPLAERNQSRLKAELSDSEASARKKNLSGFSPRKKPRHHGRIGRPPKYRKIPQEDFQTLTPDVVHQSLFMSALSAHPDRSLSVCWEQHCKLLPGVAGISASTVAKWTIDEVFGFVQTLTGCEDQARLFKDEVRCKCRVGDRAGVTVLKTAGSRCPPQRHFC

SEQ ID NO: 51002 - protein, 743 aa, Homo sapiens
MRRREGHGTDSEMGQGPVRESQSSDPPALQFRISEYKPLNMAGVEQPPSPELRQEGVTEYEDGGAPAGDGEAGPQQAEDHPQNPPEDPNQDPPEDDSTCQCQACGPHQAAGPDLGSSNDGCPQLFQERSVIVENSSGSTSASELLKPMKKRKRREYQSPSEEESEPEAMEKQEEGKDPEGQPTASTPESEEWSSSQPATGEKKECWSWESYLEEQKAITAPVSLFQDSQAVTHNKNGFKLGMKLEGIDPQHPSMYFILTVAEVCGYRLRLHFDGYSECHDFWVNANSPDIHPAGWFEKTGHKLQPPKGYKEEEFSWSQYLRSTRAQAAPKHLFVSQSHSPPPLGFQVGMKLEAVDRMNPSLVCVASVTDVVDSRFLVHFDNWDDTYDYWCDPSSPYIHPVGWCQKQGKPLTPPQDYPDPDNFCWEKYLEETGASAVPTWAFKVRPPHSFLVNMKLEAVDRRNPALIRVASVEDVEDHRIKIHFDGWSHGYDFWIDADHPDIHPAGWCSKTGHPLQPPLGPREPSSASPGGCPPLSYRSLPHTRTSKYSFHHRLFFPRKCPTPGCDGSGHVTGKFTAHHCLSGCPLAERNQSRLKAELSDSEASARKKNLSGFSPRKKPRHHGRIGRPPKYRKIPQEDFQTLTPDVVHQSLFMSALSAHPDRSLSVCWEQHCKLLPGVAGISASTVAKWTIDEVFGFVQTLTGCEDQARLFKDEVRCKCRVGDRAGVTVLKTAGSRCPPQRHFC

SEQ ID NO: 51003 - protein, 772 aa, Homo sapiens
MRRREGHGTDSEMGQGPVRESQSSDPPALQFRISEYKPLNMAGVEQPPSPELRQEGVTEYEDGGAPAGDGEAGPQQAEDHPQNPPEDPNQDPPEDDSTCQCQACGPHQAAGPDLGSSNDGCPQLFQERSVIVENSSGSTSASELLKPMKKRKRREYQSPSEEESEPEAMEKQEEGKDPEGQPTASTPESEEWSSSQPATGEKKECWSWESYLEEQKAITAPVSLFQDSQAVTHNKNGFKLGMKLEGIDPQHPSMYFILTVAEVCGYRLRLHFDGYSECHDFWVNANSPDIHPAGWFEKTGHKLQPPKGYKEEEFSWSQYLRSTRAQAAPKHLFVSQSHSPPPLGFQVGMKLEAVDRMNPSLVCVASVTDVVDSRFLVHFDNWDDTYDYWCDPSSPYIHPVGWCQKQGKPLTPPQDYPDPDNFCWEKYLEETGASAVPTWAFKVRPPHSFLVNMKLEAVDRRNPALIRVASVEDVEDHRIKIHFDGWSHGYDFWIDADHPDIHPAGWCSKTGHPLQPPLGPREPSSASPGGCPPLSYRSLPHTRTSKYSFHHRKCPTPGCDGSGHVTGKFTAHHCLSGCPLAERNQSRLKAELSDSEASARKKNLSGFSPRKKPRHHGRIGRPPKYRKIPQEDFQTLTPDVVHQSLFMSALSAHPDRSLSVCWEQHCKLLPGVAGISASTVAKWTIDEVFGFVQTLTGCEDQARLFKDEARIVRVTHVSGKTLVWTVAQLGDLVCSDHLQEGKGILETGVHSLLCSLPTHLLAKLSFASDSQY

SEQ ID NO: 51004 - protein, 840 aa, Homo sapiens
MHLVAGDSPGSGPHLPATAFIIPASSATLGLPSSALDVSCFPREPIHVGAPEQVAGCEPVSATVLPQLSAGPASSSTSTVRLLEWTEAAAPPPGGGLRFRISEYKPLNMAGVEQPPSPELRQEGVTEYEDGGAPAGDGEAGPQQAEDHPQNPPEDPNQDPPEDDSTCQCQACGPHQAAGPDLGSSNDGCPQLFQERSVIVENSSGSTSASELLKPMKKRKRREYQSPSEEESEPEAMEKQEEGKDPEGQPTASTPESEEWSSSQPATGEKKECWSWESYLEEQKAITAPVSLFQDSQAVTHNKNGFKLGMKLEGIDPQHPSMYFILTVAEVCGYRLRLHFDGYSECHDFWVNANSPDIHPAGWFEKTGHKLQPPKGYKEEEFSWSQYLRSTRAQAAPKHLFVSQSHSPPPLGFQVGMKLEAVDRMNPSLVCVASVTDVVDSRFLVHFDNWDDTYDYWCDPSSPYIHPVGWCQKQGKPLTPPQDYPDPDNFCWEKYLEETGASAVPTWAFKVRPPHSFLVNMKLEAVDRRNPALIRVASVEDVEDHRIKIHFDGWSHGYDFWIDADHPDIHPAGWCSKTGHPLQPPLGPREPSSASPGGCPPLSYRSLPHTRTSKYSFHHRKCPTPGCDGSGHVTGKFTAHHCLSGCPLAERNQSRLKAELSDSEASARKKNLSGFSPRKKPRHHGRIGRPPKYRKIPQEDFQTLTPDVVHQSLFMSALSAHPDRSLSVCWEQHCKLLPGVAGISASTVAKWTIDEVFGFVQTLTGCEDQARLFKDEARIVRVTHVSGKTLVWTVAQLGDLVCSDHLQEGKGILETGVHSLLCSLPTHLLAKLSFASDSQY

SEQ ID NO: 51005 - protein, 538 aa, Homo sapiens
QKAITAPVSLFQDSQAVTHNKNGFKLGMKLEGIDPQHPSMYFILTVAEVCGYRLRLHFDGYSECHDFWVNANSPDIHPAGWFEKTGHKLQPPKGYKEEEFSWSQYLRSTRAQAAPKHLFVSQSHSPPPLGFQVGMKLEAVDRMNPSLVCVASVTDVVDSRFLVHFDNWDDTYDYWCDPSSPYIHPVGWCQKQGKPLTPPQDYPDPDNFCWEKYLEETGASAVPTWAFKVRPPHSFLVNMKLEAVDRRNPALIRVASVEDVEDHRIKIHFDGWSHGYDFWIDADHPDIHPAGWCSKTGHPLQPPLGPREPSSASPGGCPPLSYRSLPHTRTSKYSFHHRKCPTPGCDGSGHVTGKFTAHHCLSGCPLAERNQSRLKAELSDSEASARKKNLSGFSPRKKPRHHGRIGRPPKYRKIPQEDFQTLTPDVVHQSLFMSALSAHPDRSLSVCWEQHCKLLPGVAGISASTVAKWTIDEVFGFVQTLTGCEDQARLFKDEMIDGEAFLLLTQADIVKIMSVKLGPALKIYNAILMFKNADDTLK

SEQ ID NO: 51006 - protein, 840 aa, Homo sapiens; identical to SEQ ID NO: 51004

SEQ ID NO: 51007 - protein, 84 aa, Homo sapiens
MAGVEQPPSPELRQEGVTEYEDGGAPAGDGEAGPQQAEDHPQNPPEDPNQDPPEDDSTCQCQACGPHQAAGPDLGSSNDGCPQL

SEQ ID NO: 51008 - protein, 138 aa, Homo sapiens
MHLVAGDSPGSGPHLPATAFIIPASSATLGLPSSALDVSCFPREPIHVGAPEQVAGCEPVSATVLPQLSAGPASSSTSTVRLLEWTEAAAPPPGGGLRFRISEYKPLNMAGVEQPPSPELRQEGVTEYEDGGAPAGDG

SEQ ID NO: 51009 - protein, 738 aa, Homo sapiens
MRRREGHGTDSEMGQGPVRESQSSDPPALQFRISEYKPLNMAGVEQPPSPELRQEGVTEYEDGGAPAGDGEAGPQQAEDHPQNPPEDPNQDPPEDDSTCQCQACGPHQAAGPDLGSSNDGCPQLFQERSVIVENSSGSTSASELLKPMKKRKRREYQSPSEEESEPEAMEKQEEGKDPEGQPTASTPESEEWSSSQPATGEKKECWSWESYLEEQKAITAPVSLFQDSQAVTHNKNGFKLGMKLEGIDPQHPSMYFILTVAEVCGYRLRLHFDGYSECHDFWVNANSPDIHPAGWFEKTGHKLQPPKGYKEEEFSWSQYLRSTRAQAAPKHLFVSQSHSPPPLGFQVGMKLEAVDRMNPSLVCVASVTDVVDSRFLVHFDNWDDTYDYWCDPSSPYIHPVGWCQKQGKPLTPPQDYPDPDNFCWEKYLEETGASAVPTWAFKVRPPHSFLVNMKLEAVDRRNPALIRVASVEDVEDHRIKIHFDGWSHGYDFWIDADHPDIHPAGWCSKTGHPLQPPLGPREPSSASPGGCPPLSYRSLPHTRTSKYSFHHRKCPTPGCDGSGHVTGKFTAHHCLSGCPLAERNQSRLKAELSDSEASARKKNLSGFSPRKKPRHHGRIGRPPKYRKIPQEDFQTLTPDVVHQSLFMSALSAHPDRSLSVCWEQHCKLLPGVAGISASTVAKWTIDEVFGFVQTLTGCEDQARLFKDEVRCKCRVGDRAGVTVLKTAGSRCPPQRHFC

SEQ ID NO: 51010 - protein, 289 aa, Homo sapiens
  VARIANT 1: note = MOD_RES - Any amino acid
XTSGSMPTPLTFTLLAGSRRRATSCSLPKSPPPLGFQVGMKLEAVDRMNPSLVCVASVTDVVDSRFLVHFDNWDDTYDYWCDPSSPYIHPVGWCQKQGKPLTPPQDYPDPDNFCWEKYLEETGASAVPTWAFKVRPPHSFLVNMKLEAVDRRNPALIRVASVEDVEDHRIKIHFDGWSHGYDFWIDADHPDIHPAGWCSKTGHPLQPPLGPREPSSASPGGCPPLSYRSLPHTRTSKYSFHHRKCPTPGCDGSGHVTGKFTAHHCLSGCPLAERNQSRLKAELSDSEAS

SEQ ID NO: 51011 - protein, 705 aa, Homo sapiens
MEKPRSIEETPSSEPMEEEEDDDLELFGGYDSFRSYNSSVGSESSSYLEESSEAENEDREAGELPTSPLHLLSPGTPRSLDGSGSEPAVCEMCGIVGTREAFFSKTKRFCSVSCSRSYSSNSKKASILARLQGKPPTKKAKVLHKAAWSAKIGAFLHSQGTGQLADGTPTGQDALVLGFDWGKFLKDHSYKAAPVSCFKHVPLYDQWEDVMKGMKVEVLNSDAVLPSRVYWIASVIQTAGYRVLLRYEGFENDASHDFWCNLGTVDVHPIGWCAINSKILVPPRTIHAKFTDWKGYLMKRLVGSRTLPVDFHIKMVESMKYPFRQGMRLEVVDKSQVSRTRMAVVDTVIGGRLRLLYEDGDSDDDFWCHMWSPLIHPVGWSRRVGHGIKMSERRSDMAHHPTFRKIYCDAVPYLFKKVRAVYTEGGWFEEGMKLEAIDPLNLGNICVATVCKVLLDGYLMICVDGGPSTDGLDWFCYHASSHAIFPATFCQKNDIELTPPKGYEAQTFNWENYLEKTKSKAAPSRLFNMDCPNHGFKVGMKLEAVDLMEPRLICVATVKRVVHRLLSIHFDGWDSEYDQWVDCESPDIYPVGWCELTGYQLQPPVAAEPATPLKAKEATKKKKKQFGKKRKRIPPTKTRPLRQGSKKPLLEDDPQGARKISSEPVPGEIIAVRVKEEHLDVASPDKASSPELPVSVENIKQETDD

SEQ ID NO: 51012 - protein, 288 aa, Homo sapiens
  VARIANT 1: note = MOD_RES - Any amino acid
XRPHLQNQWRKRKMTTWSCLVAMIVSGVITAVWAVRAAPIWRSQVKQKMRIGKQGNCRPPRCICSALGLLAPWMAVVLSQGKPPTKKAKVLHKAAWSAKIGAFLHSQGTGQLADGTPTGQDALVLGFDWGKFLKDHSYKAAPVSCFKHVPLYDQWEDVMKGMKVEVLNSDAVLPSRVYWIASVIQTAGYRVLLRYEGFENDASHDFWCNLGTVDVHPIGWCAINSKILVPPRTIHAKFTDWKGYLMKRLVGSRTLPVDFHIKVGSEPLTDVPPSALPFFCILHATHWS

SEQ ID NO: 51013 - protein, 1253 aa, Homo sapiens
MVVALRYVWPLLLCSPCLLIQIPEEYEGHHVMEPPVITEQSPRRLVVFPTDDISLKCEASGKPEVQFRWTRDGVHFKPKEELGVTVYQSPHSGSFTITGNNSNFAQRFQGIYRCFASNKLGTAMSHEIRLMAEGAPKWPKETVKPVEVEEGESVVLPCNPPPSAEPLRIYWMNSKILHIKQDERVTMGQNGNLYFANVLTSDNHSDYICHAHFPGTRTIIQKEPIDLRVKATNSMIDRKPRLLFPTNSSSHLVALQGQPLVLECIAEGFPTPTIKWLRPSGPMPADRVTYQNHNKTLQLLKVGEEDDGEYRCLAENSLGSARHAYYVTVEAAPYWLHKPQSHLYGPGETARLDCQVQGRPQPEVTWRINGIPVEELAKDQKYRIQRGALILSNVQPSDTMVTQCEARNRHGLLLANAYIYVVQLPAKILTADNQTYMAVQGSTAYLLCKAFGAPVPSVQWLDEDGTTVLQDERFFPYANGTLGIRDLQANDTGRYFCLAANDQNNVTIMANLKVKDATQITQGPRSTIEKKGSRVTFTCQASFDPSLQPSITWRGDGRDLQELGDSDKYFIEDGRLVIHSLDYSDQGNYSCVASTELDVVESRAQLLVVGSPGPVPRLVLSDLHLLTQSQVRVSWSPAEDHNAPIEKYDIEFEDKEMAPEKWYSLGKVPGNQTSTTLKLSPYVHYTFRVTAINKYGPGEPSPVSETVVTPEAAPEKNPVDVKGEGNETTNMVITWKPLRWMDWNAPQVQYRVQWRPQGTRGPWQEQIVSDPFLVVSNTSTFVPYEIKVQAVNSQGKGPEPQVTIGYSGEDYPQAIPELEGIEILNSSAVLVKWRPVDLAQVKGHLRGYNVTYWREGSQRKHSKRHIHKDHVVVPANTTSVILSGLRPYSSYHLEVQAFNGRGSGPASEFTFSTPEGVPGHPEALHLECQSNTSLLLRWQPPLSHNGVLTGYVLSYHPLDEGGKGQLSFNLRDPELRTHNLTDLSPHLRYRFQLQATTKEGPGEAIVREGGTMALSGISDFGNISATAGENYSVVSWVPKEGQCNFRFHILFKALGEEKGGASLSPQYVSYNQSSYTQWDLQPDTDYEIHLFKERMFRHQMAVKTNGTGRVRLPPAGFATEGWFIGFVSAIILLLLVLLILCFIKRSKGGKYSVKDKEDTQVDSEARPMKDETFGEYSDNEEKAFGSSQPSLNGDIKPLGSDDSLADYGGSVDVQFNEDGSFIGQYSGKKEKEAAGGNDSSGATSPINPAVALE

SEQ ID NO: 51014 - protein, 1248 aa, Homo sapiens
MVVALRYVWPLLLCSPCLLIQIPEELMEPPVITEQSPRRLVVFPTDDISLKCEASGKPEVQFRWTRDGVHFKPKEELGVTVYQSPHSGSFTITGNNSNFAQRFQGIYRCFASNKLGTAMSHEIRLMAEGAPKWPKETVKPVEVEEGESVVLPCNPPPSAEPLRIYWMNSKILHIKQDERVTMGQNGNLYFANVLTSDNHSDYICHAHFPGTRTIIQKEPIDLRVKATNSMIDRKPRLLFPTNSSSHLVALQGQPLVLECIAEGFPTPTIKWLRPSGPMPADRVTYQNHNKTLQLLKVGEEDDGEYRCLAENSLGSARHAYYVTVEAAPYWLHKPQSHLYGPGETARLDCQVQGRPQPEVTWRINGIPVEELAKDQKYRIQRGALILSNVQPSDTMVTQCEARNRHGLLLANAYIYVVQLPAKILTADNQTYMAVQGSTAYLLCKAFGAPVPSVQWLDEDGTTVLQDERFFPYANGTLGIRDLQANDTGRYFCLAANDQNNVTIMANLKVKDATQITQGPRSTIEKKGSRVTFTCQASFDPSLQPSITWRGDGRDLQELGDSDKYFIEDGRLVIHSLDYSDQGNYSCVASTELDVVESRAQLLVVGSPGPVPRLVLSDLHLLTQSQVRVSWSPAEDHNAPIEKYDIEFEDKEMAPEKWYSLGKVPGNQTSTTLKLSPYVHYTFRVTAINKYGPGEPSPVSETVVTPEAAPEKNPVDVKGEGNETTNMVITWKPLRWMDWNAPQVQYRVQWRPQGTRGPWQEQIVSDPFLVVSNTSTFVPYEIKVQAVNSQGKGPEPQVTIGYSGEDYPQAIPELEGIEILNSSAVLVKWRPVDLAQVKGHLRGYNVTYWREGSQRKHSKRHIHKDHVVVPANTTSVILSGLRPYSSYHLEVQAFNGRGSGPASEFTFSTPEGVPGHPEALHLECQSNTSLLLRWQPPLSHNGVLTGYVLSYHPLDEGGKGQLSFNLRDPELRTHNLTDLSPHLRYRFQLQATTKEGPGEAIVREGGTMALSGISDFGNISATAGENYSVVSWVPKEGQCNFRFHILFKALGEEKGGASLSPQYVSYNQSSYTQWDLQPDTDYEIHLFKERMFRHQMAVKTNGTGRVRLPPAGFATEGWFIGFVSAIILLLLVLLILCFIKRSKGGKYSVKDKEDTQVDSEARPMKDETFGEYSDNEEKAFGSSQPSLNGDIKPLGSDDSLADYGGSVDVQFNEDGSFIGQYSGKKEKEAAGGNDSSGATSPINPAVALE

SEQ ID NO: 51015 - protein, 1248 aa, Homo sapiens; identical to SEQ ID NO: 51014

SEQ ID NO: 51016 - protein, 1257 aa, Homo sapiens
MVVALRYVWPLLLCSPCLLIQIPEEYEGHHVMEPPVITEQSPRRLVVFPTDDISLKCEASGKPEVQFRWTRDGVHFKPKEELGVTVYQSPHSGSFTITGNNSNFAQRFQGIYRCFASNKLGTAMSHEIRLMAEGAPKWPKETVKPVEVEEGESVVLPCNPPPSAEPLRIYWMNSKILHIKQDERVTMGQNGNLYFANVLTSDNHSDYICHAHFPGTRTIIQKEPIDLRVKATNSMIDRKPRLLFPTNSSSHLVALQGQPLVLECIAEGFPTPTIKWLRPSGPMPADRVTYQNHNKTLQLLKVGEEDDGEYRCLAENSLGSARHAYYVTVEAAPYWLHKPQSHLYGPGETARLDCQVQGRPQPEVTWRINGIPVEELAKDQKYRIQRGALILSNVQPSDTMVTQCEARNRHGLLLANAYIYVVQLPAKILTADNQTYMAVQGSTAYLLCKAFGAPVPSVQWLDEDGTTVLQDERFFPYANGTLGIRDLQANDTGRYFCLAANDQNNVTIMANLKVKDATQITQGPRSTIEKKGSRVTFTCQASFDPSLQPSITWRGDGRDLQELGDSDKYFIEDGRLVIHSLDYSDQGNYSCVASTELDVVESRAQLLVVGSPGPVPRLVLSDLHLLTQSQVRVSWSPAEDHNAPIEKYDIEFEDKEMAPEKWYSLGKVPGNQTSTTLKLSPYVHYTFRVTAINKYGPGEPSPVSETVVTPEAAPEKNPVDVKGEGNETTNMVITWKPLRWMDWNAPQVQYRVQWRPQGTRGPWQEQIVSDPFLVVSNTSTFVPYEIKVQAVNSQGKGPEPQVTIGYSGEDYPQAIPELEGIEILNSSAVLVKWRPVDLAQVKGHLRGYNVTYWREGSQRKHSKRHIHKDHVVVPANTTSVILSGLRPYSSYHLEVQAFNGRGSGPASEFTFSTPEGVPGHPEALHLECQSNTSLLLRWQPPLSHNGVLTGYVLSYHPLDEGGKGQLSFNLRDPELRTHNLTDLSPHLRYRFQLQATTKEGPGEAIVREGGTMALSGISDFGNISATAGENYSVVSWVPKEGQCNFRFHILFKALGEEKGGASLSPQYVSYNQSSYTQWDLQPDTDYEIHLFKERMFRHQMAVKTNGTGRVRLPPAGFATEGWFIGFVSAIILLLLVLLILCFIKRSKGGKYSVKDKEDTQVDSEARPMKDETFGEYRSLESDNEEKAFGSSQPSLNGDIKPLGSDDSLADYGGSVDVQFNEDGSFIGQYSGKKEKEAAGGNDSSGATSPINPAVALE

SEQ ID NO: 51017 - protein, 1257 aa, Homo sapiens; identical to SEQ ID NO: 51016

SEQ ID NO: 51018 - protein, 151 aa, Homo sapiens
MVVALRYVWPLLLCSPCLLIQIPEEYEGHHVMEPPVITEQSPRRLVVFPTDDISLKCEASGKPEVQFRWTRDGVHFKPKEELGVTVYQSPHSGSFTITGNNSNFAQRFQGIYRCFASNKLGTAMSHEIRLMAEGAPKWPKETVKPVEVEEG

SEQ ID NO: 51019 - protein, 84 aa, Homo sapiens
MVVALRYVWPLLLCSPCLLIQIPEEYEGHHVMEPPVITEQSPRRLVVFPTDDISLKCEASGKPEVQFRWTRDGVHFKPKEELGV

SEQ ID NO: 51020 - protein, 1255 aa, Homo sapiens
MVVALRYVWPLLLCSPCLLIQIPEESFPGHRVVMEPPVITEQSPRRLVVFPTDDISLKCEASGKPEVQFRWTRDGVHFKPKEELGVTVYQSPHSGSFTITGNNSNFAQRFQGIYRCFASNKLGTAMSHEIRLMAEGAPKWPKETVKPVEVEEGESVVLPCNPPPSAEPLRIYWMNSKILHIKQDERVTMGQNGNLYFANVLTSDNHSDYICHAHFPGTRTIIQKEPIDLRVKATNSMIDRKPRLLFPTNSSSHLVALQGQPLVLECIAEGFPTPTIKWLRPSGPMPADRVTYQNHNKTLQLLKVGEEDDGEYRCLAENSLGSARHAYYVTVEAAPYWLHKPQSHLYGPGETARLDCQVQGRPQPEVTWRINGIPVEELAKDQKYRIQRGALILSNVQPSDTMVTQCEARNRHGLLLANAYIYVVQLPAKILTADNQTYMAVQGSTAYLLCKAFGAPVPSVQWLDEDGTTVLQDERFFPYANGTLGIRDLQANDTGRYFCLAANDQNNVTIMANLKVKDATQITQGPRSTIEKKGSRVTFTCQASFDPSLQPSITWRGDGRDLQELGDSDKYFIEDGRLVIHSLDYSDQGNYSCVASTELDVVESRAQLLVVGSPGPVPRLVLSDLHLLTQSQVRVSWSPAEDHNAPIEKYDIEFEDKEMAPEKWYSLGKVPGNQTSTTLKLSPYVHYTFRVTAINKYGPGEPSPVSETVVTPEAAPEKNPVDVKGEGNETTNMVITWKPLRWMDWNAPQVQYRVQWRPQGTRGPWQEQIVSDPFLVVSNTSTFVPYEIKVQAVNSQGKGPEPQVTIGYSGEDYPQAIPELEGIEILNSSAVLVKWRPVDLAQVKGHLRGYNVTYWREGSQRKHSKRHIHKDHVVVPANTTSVILSGLRPYSSYHLEVQAFNGRGSGPASEFTFSTPEGVPGHPEALHLECQSNTSLLLRWQPPLSHNGVLTGYVLSYHPLDEGGKGQLSFNLRDPELRTHNLTDLSPHLRYRFQLQATTKEGPGEAIVREGGTMALSGISDFGNISATAGENYSVVSWVPKEGQCNFRFHILFKALGEEKGGASLSPQYVSYNQSSYTQWDLQPDTDYEIHLFKERMFRHQMAVKTNGTGRVRLPPAGFATEGWFIGFVSAIILLLLVLLILCFIKRSKGGKYSVKDKEDTQVDSEARPMKDETFGEYSDNEEKAFGSSQPSLNGDIKPLGSDDSLADYGGSVDVQFNEDGSFIGQYSGKKEKEAAGGNDSSGATSPINPAVALE

SEQ ID NO: 51021 - protein, 116 aa, Homo sapiens
MAEGAPKWPKETVKPVEVEEGESVVLPCNPPPSAEPLRIYWMNSKILHIKQDERVTMGQNGNLYFANVLTSDNHSDYICHAHFPGTRTIIQKEPIDLRVKATNSMIDRKPRLLFPT

SEQ ID NO: 51022 - protein, 1259 aa, Homo sapiens
MVVALRYVWPLLLCSPCLLIQIPEESFPGHRVVMEPPVITEQSPRRLVVFPTDDISLKCEASGKPEVQFRWTRDGVHFKPKEELGVTVYQSPHSGSFTITGNNSNFAQRFQGIYRCFASNKLGTAMSHEIRLMAEGAPKWPKETVKPVEVEEGESVVLPCNPPPSAEPLRIYWMNSKILHIKQDERVTMGQNGNLYFANVLTSDNHSDYICHAHFPGTRTIIQKEPIDLRVKATNSMIDRKPRLLFPTNSSSHLVALQGQPLVLECIAEGFPTPTIKWLRPSGPMPADRVTYQNHNKTLQLLKVGEEDDGEYRCLAENSLGSARHAYYVTVEAAPYWLHKPQSHLYGPGETARLDCQVQGRPQPEVTWRINGIPVEELAKDQKYRIQRGALILSNVQPSDTMVTQCEARNRHGLLLANAYIYVVQLPAKILTADNQTYMAVQGSTAYLLCKAFGAPVPSVQWLDEDGTTVLQDERFFPYANGTLGIRDLQANDTGRYFCLAANDQNNVTIMANLKVKDATQITQGPRSTIEKKGSRVTFTCQASFDPSLQPSITWRGDGRDLQELGDSDKYFIEDGRLVIHSLDYSDQGNYSCVASTELDVVESRAQLLVVGSPGPVPRLVLSDLHLLTQSQVRVSWSPAEDHNAPIEKYDIEFEDKEMAPEKWYSLGKVPGNQTSTTLKLSPYVHYTFRVTAINKYGPGEPSPVSETVVTPEAAPEKNPVDVKGEGNETTNMVITWKPLRWMDWNAPQVQYRVQWRPQGTRGPWQEQIVSDPFLVVSNTSTFVPYEIKVQAVNSQGKGPEPQVTIGYSGEDYPQAIPELEGIEILNSSAVLVKWRPVDLAQVKGHLRGYNVTYWREGSQRKHSKRHIHKDHVVVPANTTSVILSGLRPYSSYHLEVQAFNGRGSGPASEFTFSTPEGVPGHPEALHLECQSNTSLLLRWQPPLSHNGVLTGYVLSYHPLDEGGKGQLSFNLRDPELRTHNLTDLSPHLRYRFQLQATTKEGPGEAIVREGGTMALSGISDFGNISATAGENYSVVSWVPKEGQCNFRFHILFKALGEEKGGASLSPQYVSYNQSSYTQWDLQPDTDYEIHLFKERMFRHQMAVKTNGTGRVRLPPAGFATEGWFIGFVSAIILLLLVLLILCFIKRSKGGKYSVKDKEDTQVDSEARPMKDETFGEYRSLESDNEEKAFGSSQPSLNGDIKPLGSDDSLADYGGSVDVQFNEDGSFIGQYSGKKEKEAAGGNDSSGATSPINPAVALE

SEQ ID NO: 51023 - protein, 441 aa, Homo sapiens
MVPALRYLVGACGRARGLFAGGSPGACGFASGRPRPLCGGSRSASTSSFDIVIVGGGIVGLASARALILRHPSLSIGVLEKEKDLAVHQTGHNSGVIHSGIYYKPESLKAKLCVQGAALLYEYCQQKGISYKQCGKLIVAVEQEEIPRLQALYEKGLQNGVPGLRLIQQEDIKKKEPYCRGLMAIDCPHTGIVDYRQVALSFAQDFQEAGGSVLTNFEVKGIEMAKESPSRSIDGMQYPIVIKNTKGEEIRCQYVVTCAGLYSDRISELSGCTPDPRIVPFRGDYLLLKPEKCYLVKGNIYPVPDSRFPFLGVHFTPRMDGSIWLGPNAVLAFKREGYRPFDFSATDVMDIIINSGLIKLASQNFSYGVTEMYKACFLGATVKYLQKFIPEITISDILRQVAVRGPSWLWQQPMKVSDNNIYCFLWRCFALLLTGSACSFK

SEQ ID NO: 51024 - protein, 463 aa, Homo sapiens
MVPALRYLVGACGRARGLFAGGSPGACGFASGRPRPLCGGSRSASTSSFDIVIVGGGIVGLASARALILRHPSLSIGVLEKEKDLAVHQTGHNSGVIHSGIYYKPESLKAKLCVQGAALLYEYCQQKGISYKQCGKLIVAVEQEEIPRLQALYEKGLQNGVPGLRLIQQEDIKKKEPYCRGLMAIDCPHTGIVDYRQVALSFAQDFQEAGGSVLTNFEVKGIEMAKESPSRSIDGMQYPIVIKNTKGEEIRCQYVVTCAGLYSDRISELSGCTPDPRIVPFRGDYLLLKPEKCYLVKGNIYPVPDSRFPFLGVHFTPRMDGSIWLGPNAVLAFKREGYRPFDFSATDVMDIIINSGLIKLASQNFSYGVTEMYKACFLGATVKYLQKFIPEITISDILRGPAGVRAQALDRDGNLVEDFVFDAGVGDIGNRILHVRNAPSPAATSSIAISGMIADEVQQRFEL

SEQ ID NO: 51025 - protein, 463 aa, Homo sapiens; identical to SEQ ID NO: 51024

SEQ ID NO: 51026 - protein, 1019 aa, Homo sapiens
MLWRVLLSKRPPFPHPELDFQEAPIPSCPGRLPGRKNSVALAAAPRKEPTGDREKPLPFPVLAPFSNPEHSAPAKVVRAAVPKQRKGSKVGDFGDAINWPTPGEIAHKSVQPQSHKPQPTRKLPPKKDMKEQEKGEGSDSKESPKTKSDESGEEKNGDEDCQRGGQKKKGNKHKWVPLQIDMKPEVPREKLASRPTRPPEPRHIPANRGEIKGSESATYVPVAPPTPAWQPEIKPEPAWHDQDETSSVKSDGAGGARASFRGRGRGRGRGRGRGRGGTRTHFDYQFGYRKFDGVEGPRTPKYMNNITYYFDNVSSTELYSVDQELLKDYIKRQIEYYFSVDNLERDFFLRRKMDADGFLPITLIASFHRVQALTTDISLIFAALKDSKVVEIVDEKVRRREEPEKWPLPPIVDYSQTDFSQLLNCPEFVPRQHYQKETESAPGSPRAVTPVPTKTEEVSNLKTLPKGLSASLPDLDSENWIEVKKRPRPSPARPKKSEESRFSHLTSLPQQLPSQQLMSKDQDEQEELDFLFDEEMEQMDGRKNTFTAWSDEESDYEIDDRDVNKILIVTQTPHYMRRHPGGDRTGNHTSRAKMSAELAKVINDGLFYYEQDLWAEKFEPEYSQIKQEVENFKKVNMISREQFDTLTPEPPVDPNQEVPPGPPRFQQVPTDALANKLFGAPEPSTIARSLPTTVPESPNYRNTRTPRTPRTPQLKDSSQTSRFYPVVKEGRTLDAKMPRKRKTRHSSNPPLESHVGWVMDSREHRPRTASISSSPSEGTPTVGSYGCTPQSLPKFQHPSHELLKENGFTQHVYHKYRRRCLNERKRLGIGQSQEMNTLFRFWSFFLRDHFNKKMYEEFKQLALEDAKEGYRYGLECLFRYYSYGLEKKFRLDIFKDFQEETVKDYEAGQLYGLEKFWAFLKYSKAKNLDIDPKLQEYLGKFRRLEDFRVDPPMGEEGNHKRHSVVAGGGGGEGRKRCPSQSSSRPAAMISQPPTPPTGQPVREDAKWTSQHSNTQTLGK

SEQ ID NO: 51027 - protein, 816 aa, Homo sapiens
MATQVEPLLPGGATLLQAEEHGGLVRKKPPPAPEGKGEPGPNDVRGGEPDGSARRPRPPCAKPHKEGTGQQERESPRPLQLPGAEGPAISDGEEGGGEPGAGGGAAGAAGAGRRDFVEAPPPKVNPWTKNALPPVLTTVNGQSPPEHSAPAKVVRAAVPKQRKGSKVGDFGDAINWPTPGEIAHKSVQPQSHKPQPTRKLPPKKDMKEQEKGEGSDSKESPKTKSDESGEEKNGDEDCQRGGQKKKGNKHKWVPLQIDMKPEVPREKLASRPTRPPEPRHIPANRGEIKGSESATYVPVAPPTPAWQPEIKPEPAWHDQDETSSVKSDGAGGARASFRGRGRGRGRGRGRGRGGTRTHFDYQFGYRKFDGVEGPRTPKYMNNITYYFDNVSSTELYSVDQELLKDYIKRQIEYYFSVDNLERDFFLRRKMDADGFLPITLIASFHRVQALTTDISLIFAALKDSKVVEIVDEKVRRREEPEKWPLPPIVDYSQTDFSQLLNCPEFVPRQHYQKETESAPGSPRAVTPVPTKTEEVSNLKTLPKGLSASLPDLDSENWIEVKKRPRPSPARPKKSEESRFSHLTSLPQQLPSQQLMSKDQDEQEELDFLFDEEMEQMDGRKNTFTAWSDEESDYEIDDRDVNKILIVTQTPHYMRRHPGGDRTGNHTSRAKMSAELAKVINDGLFYYEQDLWAEKFEPEYSQIKQEVENFKKVNMISREQFDTLTPEPPVDPNQEVPPGPPRFQQVPTDALANKLFGAPEPSTIARSLPTTVPESPNYRNTRTPRTPRTPQLKDSSQTSRFYPVVKEGRTLDAKMPR

SEQ ID NO: 51028 - protein, 93 aa, Homo sapiens
MKEQEKGEGSDSKESPKTKSDESGEEKNGDEDCQRGGQKKKGNKHKWVPLQIDMKPEVPREKLASRPTRPPEPRHIPANRGEIKGSESATYVP

SEQ ID NO: 51029 - protein, 611 aa, Homo sapiens [sequence omitted]

SEQ ID NO: 51030 - protein, 582 aa, Homo sapiens
METESGNQEKVMEEESTEKKKEVEKKKRSRVKQVLADIAKQVDFWFGDANLHKDRFLREQIEKSRDGYVDISLLVSFNKMKKLTTDGKLIARALRSSAVVELDLEGTRIRRKKPLGERPKDEDERTVYVELLPKNVNHSWIERVFGKCGNVVYISIPHYKSTGDPKGFAFVEFETKEQAAKAIEFLNNPPEEAPRKPGIFPKTVKNKPIPALRVVEEKKKKKKKKGRMKKEDNIQAKEENMDTSNTSISKMKRSRPTSEGSDIESTEPQKQCSKKKKKRDRVEASSLPEVRTGKRKRSSSEDAESLAPRSKVKKIIQKDIIKEASEASKENRDIEISTEEEKDTGDLKDSSLLKTKRKHKKKHKERHKMGEEVIPLRVLSKSEWMDLKKEYLALQKASMASLKKTISQIKSESEMETDSGVPQNTGMKNEKTANREECRTQEKVNATGPQFVSGVIVKIISTEPLPGRKQVRDTLAAISEVLYVDLLEGDTECHARFKTPEDAQAVINAYTEINKKHCWKLEILSGDHEQRYWQKILVDRQAKLNQPREKKRGTEKLITKAEKIRLAKTQQASKHIRFSEYD

SEQ ID NO: 51031 - protein, 582 aa, Homo sapiens; identical to SEQ ID NO: 51030

SEQ ID NO: 51032 - protein, 299 aa, Homo sapiens
METESGNQEKVMEEESTEKKKEVEKKKRSRVKQVLADIAKQVDFWFGDANLHKDRFLREQIEKSRDGYVDISLLVSFNKMKKLTTDGKLIARALRSSAVVELDLEGTRIRRKKPLGERPKDEDERTVYVELLPKNVNHSWIERVFGKCGNVVYISIPHYKSTGDPKGFAFVEFETKEQAAKAIEFLNNPPEEAPRKPGIFPKTVKNKPIPALRVVEEKKKKKKKKGRMKKEDNIQAKEENMDTSNTSISKMKRSRPTSEGSDIESTEPQKQCSKKKKKRDRVEASSLPEVRTGKRKRSS

SEQ ID NO: 51033 - protein, 129 aa, Homo sapiens
METESGNQEKVMEEESTEKKKEVEKKKRSRVKQVLADIAKQVDFWFGDANLHKDRFLREQIEKSRDGYVDISLLVSFNKMKKLTTDGKLIARALRSSAVVELDLEGTRIRRKKPLGERPKDEDERTVYV

SEQ ID NO: 51034 - protein, 119 aa, Homo sapiens
METESGNQEKVMEEESTEKKKEVEKKKRSRVKQVLADIAKQVDFWFGDANLHKDRFLREQIEKSRDGYVDISLLVSFNKMKKLTTDGKLIARALRSSAVVELDLEGTRIRRKKPLGERP

SEQ ID NO: 51035 - protein, 589 aa, Homo sapiens
MIPNIEGMETESGNQEKVMEEESTEKKKEVEKKKRSRVKQVLADIAKQVDFWFGDANLHKDRFLREQIEKSRDGYVDISLLVSFNKMKKLTTDGKLIARALRSSAVVELDLEGTRIRRKKPLGERPKDEDERTVYVELLPKNVNHSWIERVFGKCGNVVYISIPHYKSTGDPKGFAFVEFETKEQAAKAIEFLNNPPEEAPRKPGIFPKTVKNKPIPALRVVEEKKKKKKKKGRMKKEDNIQAKEENMDTSNTSISKMKRSRPTSEGSDIESTEPQKQCSKKKKKRDRVEASSLPEVRTGKRKRSSSEDAESLAPRSKVKKIIQKDIIKEASEASKENRDIEISTEEEKDTGDLKDSSLLKTKRKHKKKHKERHKMGEEVIPLRVLSKSEWMDLKKEYLALQKASMASLKKTISQIKSESEMETDSGVPQNTGMKNEKTANREECRTQEKVNATGPQFVSGVIVKIISTEPLPGRKQVRDTLAAISEVLYVDLLEGDTECHARFKTPEDAQAVINAYTEINKKHCWKLEILSGDHEQRYWQKILVDRQAKLNQPREKKRGTEKLITKAEKIRLAKTQQASKHIRFSEYD

SEQ ID NO: 51036 - protein, 138 aa, Homo sapiens
MKFTTLLFLAAVAGALVYAEDASSDSTGADPAQEAGTSKPNEEISGPAEPASPPETTTTAQETSAAAVQGTAKVTSSRQELNPLKSIVEKSILLTEQALAKAGKGMHGGVPGGKQFIENGSEFAQKLLKKFSLLKPWA

SEQ ID NO: 51037 - protein, 142 aa, Homo sapiens
MRFFVPLFLVGILFPAILAKQFTKCELSQLLKDIDGYGGIALPELICTMFHTSGYDTQAIVENNESTEYGLFQISNKLWCKSSQVPQSRNICDISCDKFLDDDITDDIMCAKKILDIKGIDYWLAHKALCTEKLEQWLCEKL

SEQ ID NO: 51038 - protein, 547 aa, Homo sapiens
MYRLMSAVTARAAAPGGLASSCGRRGVHQRAGLPPLGHGWVGGLGLGLGLALGVKLAGGLRGAAPAQSPAAPDPEASPLAEPPQEQSLAPWSPQTPAPPCSRCFARAIESSRDLLHRIKDEVGAPGIVVGVSVDGKEVWSEGLGYADVENRVPCKPETVMRIASISKSLTMVALAKLWEAGKLDLDIPVQHYVPEFPEKEYEGEKVSVTTRLLISHLSGIRHYEKDIKKVKEEKAYKALKMMKENVAFEQEKEGKSNEKNDFTKFKTEQENEAKCRNSKPGKKKNDFEQGELYLREKFENSIESLRLFKNDPLFFKPGSQFLYSTFGYTLLAAIVERASGCKYLDYMQKIFHDLDMLTTVQEENEPVIYNRARFYVYNKKKRLVNTPYVDNSYKWAGGGFLSTVGDLLKFGNAMLYGYQVGLFKNSNENLLPGYLKPETMVMMWTPVPNTEMSWDKEGKYAMAWGVVERKQTYGSCRKQRHYASHTGGAVGASSVLLVLPEELDTETINNKVPPRGIIVSIICNMQSVGLNSTALKIALEFDKDRSD

SEQ ID NO: 51039 - protein, 373 aa, Homo sapiens
MYRLMSAVTARAAAPGGLASSCGRRGVHQRAGLPPLGHGWVGGLGLGLGLALGVKLAGGLRGAAPAQSPAAPDPEASPLAEPPQEQSLAPWSPQTPAPPCSRCFARAIESSRDLLHRIKDEVGAPGIVVGVSVDGKEVWSEGLGYADVENRVPCKPETVMRIASISKSLTMVALAKLWEAGKLDLDIPVQHYVPEFPEKEYEGEKVSVTTRLLISHLSGIRHYEKDIKKVKEEKAYKALKMMKENVAFEQEKEGKSNEKNDFTKFKTEQENEAKCRNSKPGKKKNDFEQGELYLREKFENSIESLRLFKNDPLFFKPGSQFLYSTFGYTLLAAIVERASGCKYLDYMQKIFHDLDMLTTVQEENEPVIYNRAR

SEQ ID NO: 51040 - protein, 1927 aa, Homo sapiens
MELSWHVVFIALLSFSCWGSDWESDRNFISTAGPLTNDLLHNLSGLLGDQSSNFVAGDKDMYVCHQPLPTFLPEYFSSLHASQITHYKVFLSWAQLLPAGSTQNPDEKTVQCYRRLLKALKTARLQPMVILHHQTLPASTLRRTEAFADLFADYATFAFHSFGDLVGIWFTFSDLEEVIKELPHQESRASQLQTLSDAHRKAYEIYHESYAFQGGKLSVVLRAEDIPELLLEPPISALAQDTVDFLSLDLSYECQNEASLRQKLSKLQTIEPKVKVFIFNLKLPDCPSTMKNPASLLFSLFEAINKDQVLTIGFDINEFLSCSSSSKKSMSCSLTGSLALQPDQQQDHETTDSSPASAYQRIWEAFANQSRAERDAFLQDTFPEGFLWGASTGAFNVEGGWAEGGRGVSIWDPRRPLNTTEGQATLEVASDSYHKVASDVALLCGLRAQVYKFSISWSRIFPMGHGSSPSLPGVAYYNKLIDRLQDAGIEPMATLFHWDLPQALQDHGGWQNESVVDAFLDYAAFCFSTFGDRVKLWVTFHEPWVMSYAGYGTGQHPPGISDPGVASFKVAHLVLKAHARTWHHYNSHHRPQQQGHVGIVLNSDWAEPLSPERPEDLRASERFLHFMLGWFAHPVFVDGDYPATLRTQIQQMNRQCSHPVAQLPEFTEAEKQLLKGSADFLGLSHYTSRLISNAPQNTCIPSYDTIGGFSQHVNHVWPQTSSSWIRVVPWGIRRLLQFVSLEYTRGKVPIYLAGNGMPIGESENLFDDSLRVDYFNQYINEVLKAIKEDSVDVRSYIARSLIDGFEGPSGYSQRFGLHHVNFSDSSKSRTPRKSAYFFTSIIEKNGFLTKGAKRLLPPNTVNLPSKVRAFTFPSEVPSKAKVVWEKFSSQPKFERDLFYHGTFRDDFLWGVSSSAYQIEGAWDADGKGPSIWDNFTHTPGSNVKDNATGDIACDSYHQLDADLNMLRALKVKAYRFSISWSRIFPTGRNSSINSHGVDYYNRLINGLVASNIFPMVTLFHWDLPQALQDIGGWENPALIDLFDSYADFCFQTFGDRVKFWMTFNEPMYLAWLGYGSGEFPPGVKDPGWAPYRIAHAVIKAHARVYHTYDEKYRQEQKGVISLSLSTHWAEPKSPGVPRDVEAADRMLQFSLGWFAHPIFRNGDYPDTMKWKVGNRSELQHLATSRLPSFTEEEKRFIRATADVFCLNTYYSRIVQHKTPRLNPPSYEDDQEMAEEEDPSWPSTAMNRAAPWGTRRLLNWIKEEYGDIPIYITENGVGLTNPNTEDTDRIFYHKTYINEALKAYRLDGIDLRGYVAWSLMDNFEWLNGYTVKFGLYHVDFNNTNRPRTARASARYYTEVITNNGMPLAREDEFLYGRFPEGFIWSAASAAYQIEGAWRADGKGLSIWDTFSHTPLRVENDAIGDVACDSYHKIAEDLVTLQNLGVSHYRFSISWSRILPDGTTRYINEAGLNYYVRLIDTLLAASIQPQVTIYHWDLPQTLQDVGGWENETIVQRFKEYADVLFQRLGDKVKFWITLNEPFVIAYQGYGYGTAAPGVSNRPGTAPYIVGHNLIKAHAEAWHLYNDVYRASQGGVISITISSDWAEPRDPSNQEDVEAARRYVQFMGGWFAHPIFKNGDYNEVMKTRIRDRSLAAGLNKSRLPEFTESEKRRINGTYDFFGFNHYTTVLAYNLNYATAISSFDADRGVASIADRSWPDSGSFWLKMTPFGFRRILNWLKEEYNDPPIYVTENGVSQREETDLNDTARIYYLRTYINEALKAVQDKVDLRGYTVWSAMDNFEWATGFSERFGLHFVNYSDPSLPRIPKASAKFYASVVRCNGFPDPATGPHACLHQPDAGPTISPVRQEEVQFLGLMLGTTEAQTALYVLFSLVLLGVCGLAFLSYKYCKRSKQGKTQRSQQELSPVSSF

SEQ ID NO: 51041 - protein, 1003 aa, Homo sapiens
KVAHLVLKAHARTWHHYNSHHRPQQQGHVGIVLNSDWAEPLSPERPEDLRASERFLHFMLGWFAHPVFVDGDYPATLRTQIQQMNRQCSHPVAQLPEFTEAEKQLLKGSADFLGLSHYTSRLISNAPQNTCIPSYDTIGGFSQHVNHVWPQTSSSWIRVVPWGIRRLLQFVSLEYTRGKVPIYLAGNGMPIGESENLFDDSLRVDYFNQYINEVLKAIKEDSVDVRSYIARSLIDGFEGPSGYSQRFGLHHVNFSDSSKSRTPRKSAYFFTSIIEKNGFLTKGAKRLLPPNTVNLPSKVRAFTFPSEVPSKAKVVWEKFSSQPKFERDLFYHGTFRDDFLWGVSSSAYQIEGAWDADGKGPSIWDNFTHTPGSNVKDNATGDIACDSYHQLDADLNMLRALKVKAYRFSISWSRIFPTGRNSSINSHGVDYYNRLINGLVASNIFPMVTLFHWDLPQALQDIGGWENPALIDLFDSYADFCFQTFGDRVKFWMTFNEPMYLAWLGYGSGEFPPGVKDPGWAPYRIAHAVIKAHARVYHTYDEKYRQEQKGVISLSLSTHWAEPKSPGVPRDVEAADRMLQFSLGWFAHPIFRNGDYPDTMKWKVGNRSELQHLATSRLPSFTEEEKRFIRATADVFCLNTYYSRIVQHKTPRLNPPSYEDDQEMAEEEDPSWPSTAMNRAAPWGTRRLLNWIKEEYGDIPIYITENGVGLTNPNTEDTDRIFYHKTYINEALKAYRLDGIDLRGYVAWSLMDNFEWLNGYTVKFGLYHVDFNNTNRPRTARASARYYTEVITNNGMPLAREDEFLYGRFPEGFIWSAASAAYQIEGAWRADGKGLSIWDTFSHTPLRVENDAIGDVACDSYHKIAEDLVTLQNLGVSHYRFSISWSRILPDGTTRYINEAGLNYYVRLIDTLLAASIQPQVTIYHWDLPQTLQDVGGWENETIVQRFKEYADVLFQRLGDKVKFWITLNEPFVIAYQGYGYGTAAPVHGRLVCTSYFQEWRLQ

SEQ ID NO: 51042 - protein, 334 aa, Homo sapiens
MATLKEKLIAPVAEEEATVPNNKITVVGVGQVGMACAISILGKSLADELALVDVLEDKLKGEMMDLQHGSLFLQTPKIVADKDYSVTANSKIVVVTAGVRQQEGESRLNLVQRNVNVFKFIIPQIVKYSPDCIIIVVSNPVDILTYVTWKLSGLPKHRVIGSGCNLDSARFRYLMAEKLGIHPSSCHGWILGEHGDSSVAVWSGVNVAGVSLQELNPEMGTDNDSENWKEVHKMVVESAYEVIKLKGYTNWAIGLSVADLIESMLKNLSRIHPVSTMVKGMYGIENEVFLSLPCILNARGLTSVINQKLKDDEVAQLKKSADTLWDIQKDLKDL

SEQ ID NO: 51043 - protein, 232 aa, Homo sapiens
MATLKEKLIAPVAEEEATVPNNKITVVGVGQVGMACAISILGKSLADELALVDVLEDKLKGEMMDLQHGSLFLQTPKIVADKDYSVTANSKIVVVTAGVRQQEGESRLNLVQRNVNVFKFIIPQIVKYSPDCIIIVVSNPVDILTYVTWKLSGLPKHRVIGSGCNLDSARFRYLMAEKLGIHPSSCHGWILGEHGDSSVAVWSGVNVAGVSLQELNPEMGTDNDSENWKEVH

SEQ ID NO: 51044 - protein, 334 aa, Homo sapiens; identical to SEQ ID NO: 51042

SEQ ID NO: 51045 - protein, 137 aa, Homo sapiens
MATLKEKLIAPVAEEEATVPNNKITVVGVGQVGMACAISILGKSLADELALVDVLEDKLKGEMMDLQHGSLFLQTPKIVADKDYSVTANSKIVVVTAGVRQQEGESRLNLVQRNVNVFKFIIPQIVKYSPDCIIIVV

SEQ ID NO: 51046 - protein, 102 aa, Homo sapiens
MATLKEKLIAPVAEEEATVPNNKITVVGVGQVGMACAISILGKSLADELALVDVLEDKLKGEMMDLQHGSLFLQTPKIVADKDYSVTANSKIVVVTAGVRQQ

SEQ ID NO: 51047 - protein, 332 aa, Homo sapiens
MSTVKEQLIEKLIEDDENSQCKITIVGTGAVGMACAISILLKDLADELALVDVALDKLKGEMMDLQHGSLFFSTSKITSGKDYSVSANSRIVIVTAGARQQEGETRLALVQRNVAIMKSIIPAIVHYSPDCKILVVSNPVDILTYIVWKISGLPVTRVIGSGCNLDSARFRYLIGEKLGVHPTSCHGWIIGEHGDSSVPLWSGVNVAGVALKTLDPKLGTDSDKEHWKNIHKQVIQSAYEIIKLKGYTSWAIGLSVMDLVGSILKNLRRVHPVSTMVKGLYGIKEELFLSIPCVLGRNGVSDVVKINLNSEEEALFKKSAETLWNIQKDLIF

SEQ ID NO: 51048 - protein, 332 aa, Homo sapiens; identical to SEQ ID NO: 51047

SEQ ID NO: 51049 - protein, 507 aa, Homo sapiens
MARLLRSATWELFPWRGYCSQKAKGELCRDFVEALKAVVGGSHVSTAAVVREQHGRDESVHRCEPPDAVVWPQNVEQVSRLAALCYRQGVPIIPFGTGTGLEGGVCAVQGGVCVNLTHMDRILELNQEDFSVVVEPGVTRKALNAHLRDSGLWFPVDPGADASLCGMAATGASGTNAVRYGTMRDNVLNLEVVLPDGRLLHTAGRGRHFRFGFWPEIPHHTAWYSPCVSLGRRKSAAGYNLTGLFVGSEGTLGLITATTLRLHPAPEATVAATCAFPSVQAAVDSTVHILQAAVPVARIEFLDEVMMDACNRYSKLNCLVAPTLFLEFHGSQQALEEQLQRTEEIVQQNGASDFSWAKEAEERSRLWTARHNAWYAALATRPGCKGYSTDVCVPISRLPEIVVQTKEDLNASGLTGSIVGHVGDGNFHCILLVNPDDAEELGRVKAFAEQLGRRALALHGTCTGEHGIGMGKRQLLQEEVGAVGVETMRQLKAVLDPQGLMNPGKVL

SEQ ID NO: 51050 - protein, 484 aa, Homo sapiens
MARLLRSATWELFPWRGYCSQKAKGELCRDFVEALKAVVGGSHVSTAAVVREQHGRDESVHRCEPPDAVVWPQNVEQVSRLAALCYRQGVPIIPFGTGTGLEGGVCAVQGGVCVNLTHMDRILELNQEDFSVVVEPGVTRKALNAHLRDSGLWFPVDPGADASLCGMAATGASGTNAVRYGTMRDNVLNLEVVLPDGRLLHTAGRGRHFRKSAAGYNLTGLFVGSEGTLGLITATTLRLHPAPEATVAATCAFPSVQAAVDSTVHILQAAVPVARIEFLDEVMMDACNRYSKLNCLVAPTLFLEFHGSQQALEEQLQRTEEIVQQNGASDFSWAKEAEERSRLWTARHNAWYAALATRPGCKGYSTDVCVPISRLPEIVVQTKEDLNASGLTGSIVGHVGDGNFHCILLVNPDDAEELGRVKAFAEQLGRRALALHGTCTGEHGIGMGKRQLLQEEVGAVGVETMRQLKAVLDPQGLMNPGKVL

SEQ ID NO: 51051 - protein, 712 aa, Homo sapiens
MRVLLHLPALLASLILLQAAASTTRAQTTRTSAISDTVSQAKVQVNKAFLDSRTRLKTAMSSETPTSRQLSEYLKHAKGRTRTAIRNGQVWEESLKRLRQKASLTNVTDPSLDLTSLSLEVGCGAPAPVVRCDPCSPYRTITGDCNNRRKPALGAANRALARWLPAEYEDGLSLPFGWTPGKTRNGFPLPLAREVSNKIVGYLNEEGVLDQNRSLLFMQWGQIVDHDLDFAPDTELGSSEYSKAQCDEYCIQGDNCFPIMFPPNDPKAGTQGKCMPFFRAGFVCPTPPYKSLAREQINALTSFLDASFVYSSEPSLASRLRNLSSPLGLMAVNQEVSDHGLPYLPYDSKKPSPCEFINTTARVPCFLAGDSRASEHILLATSHTLFLREHNRLARELKRLNPQWDGEKLYQEARKILGAFVQIITFRDYLPILLGDHMQKWIPPYQGYSESVDPRISNVFTFAFRFGHLEVPSSMFRLDENYQPWGPEPELPLHTLFFNTWRMVKDGGIDPLVRGLLAKKSKLMKQNKMMTGELRNKLFQPTHRIHGFDLAAINTQRCRDHGQPGYNSWRAFCDLSQPQTLEELNTVLKSKMLAKKLLGLYGTPDNIDIWIGAIAEPLVERGRVGPLLACLLGKQFQQIRDGDRFWWENPGVFTNEQKDSLQKMSFSRLVCDNTRITKVPRDPFWANSYPYDFVDCSAIDKLDLSPWASVKN

SEQ ID NO: 51052 - protein, 457 aa, Homo sapiens
CFPVQFPPNDPKAGTQGKCMPFFRAGFVCPTPPYKSLAREQINALTSFLDASFVYSSEPSLASRLRNLSSPLGLMAVNQEVSDHGLPYLPYDSKKPSPCEFINTTARVPCFLAGDSRASEHILLATSHTLFLREHNRLARELKRLNPQWDGEKLYQEARKILGAFVQIITFRDYLPILLGDHMQKWIPPYQGYSESVDPRISNVFTFAFRFGHLEVPSSMFRLDENYQPWGPEPELPLHTLFFNTWRMVKDGGIDPLVRGLLAKKSKLMKQNKMMTGELRNKLFQPTHRIHGFDLAAINTQRCRDHGQPGYNSWRAFCDLSQPQTLEELNTVLKSKMLAKKLLGLYGTPDNIDIWIGAIAEPLVERGRVGPLLACLLGKQFQQIRDGDRFWWENPGVFTNEQKDSLQKMSFSRLVCDNTRITKVPRDPFWANSYPYDFVDCSAIDKLDLSPWASVKN

SEQ ID NO: 51053 - protein, 629 aa, Homo sapiens
MRVLLHLPALLASLILLQAAASTTRDPSLDLTSLSLEVGCGAPAPVVRCDPCSPYRTITGDCNNRRKPALGAANRALARWLPAEYEDGLSLPFGWTPGKTRNGFPLPLAREVSNKIVGYLNEEGVLDQNRSLLFMQWGQIVDHDLDFAPDTELGSSEYSKAQCDEYCIQGDNCFPIMFPPNDPKAGTQGKCMPFFRAGFVCPTPPYKSLAREQINALTSFLDASFVYSSEPSLASRLRNLSSPLGLMAVNQEVSDHGLPYLPYDSKKPSPCEFINTTARVPCFLAGDSRASEHILLATSHTLFLREHNRLARELKRLNPQWDGEKLYQEARKILGAFVQIITFRDYLPILLGDHMQKWIPPYQGYSESVDPRISNVFTFAFRFGHLEVPSSMFRLDENYQPWGPEPELPLHTLFFNTWRMVKDGGIDPLVRGLLAKKSKLMKQNKMMTGELRNKLFQPTHRIHGFDLAAINTQRCRDHGQPGYNSWRAFCDLSQPQTLEELNTVLKSKMLAKKLLGLYGTPDNIDIWIGAIAEPLVERGRVGPLLACLLGKQFQQIRDGDRFWWENPGVFTNEQKDSLQKMSFSRLVCDNTRITKVPRDPFWANSYPYDFVDCSAIDKLDLSPWASVKN

SEQ ID NO: 51054 - protein, 653 aa, Homo sapiens
MSSETPTSRQLSEYLKHAKGRTRTAIRNGQVWEESLKRLRQKASLTNVTDPSLDLTSLSLEVGCGAPAPVVRCDPCSPYRTITGDCNNRRKPALGAANRALARWLPAEYEDGLSLPFGWTPGKTRNGFPLPLAREVSNKIVGYLNEEGVLDQNRSLLFMQWGQIVDHDLDFAPDTELGSSEYSKAQCDEYCIQGDNCFPIMFPPNDPKAGTQGKCMPFFRAGFVCPTPPYKSLAREQINALTSFLDASFVYSSEPSLASRLRNLSSPLGLMAVNQEVSDHGLPYLPYDSKKPSPCEFINTTARVPCFLAGDSRASEHILLATSHTLFLREHNRLARELKRLNPQWDGEKLYQEARKILGAFVQIITFRDYLPILLGDHMQKWIPPYQGYSESVDPRISNVFTFAFRFGHLEVPSSMFRLDENYQPWGPEPELPLHTLFFNTWRMVKDGGIDPLVRGLLAKKSKLMKQNKMMTGELRNKLFQPTHRIHGFDLAAINTQRCRDHGQPGYNSWRAFCDLSQPQTLEELNTVLKSKMLAKKLLGLYGTPDNIDIWIGAIAEPLVERGRVGPLLACLLGKQFQQIRDGDRFWWENPGVFTNEQKDSLQKMSFSRLVCDNTRITKVPRDPFWANSYPYDFVDCSAIDKLDLSPWASVKN

SEQ ID NO: 51055 - protein, 710 aa, Homo sapiens
MKLVFLVLLFLGALGLCLAGRRRSVQWCAVSQPEATKCFQWQRNMRKVRGPPVSCIKRDSPIQCIQAIAENRADAVTLDGGFIYEAGLAPYKLRPVAAEVYGTERQPRTHYYAVAVVKKGGSFQLNELQGLKSCHTGLRRTAGWNVPIGTLRPFLNWTGPPEPIEAAVARFFSASCVPGADKGQFPNLCRLCAGTGENKCAFSSQEPYFSYSGAFKCLRDGAGDVAFIRESTVFEDLSDEAERDEYELLCPDNTRKPVDKFKDCHLARVPSHAVVARSVNGKEDAIWNLLRQAQEKFGKDKSPKFQLFGSPSGQKDLLFKDSAIGFSRVPPRIDSGLYLGSGYFTAIQNLRKSEEEVAARRARVVWCAVGEQELRKCNQWSGLSEGSVTCSSASTTEDCIALVLKGEADAMSLDGGYVYTAGKCGLVPVLAENYKSQQSSDPDPNCVDRPVEGYLAVAVVRRSDTSLTWNSVKGKKSCHTAVDRTAGWNIPMGLLFNQTGSCKFDEYFSQSCAPGSDPRSNLCALCIGDEQGENKCVPNSNERYYGYTGAFRCLAENAGDVAFVKDVTVLQNTDGNNNEAWAKDLKLADFALLCLDGKRKPVTEARSCHLAMAPNHAVVSRMDKVERLKQVLLHQQAKFGRNGSDCPDKFCLFQSETKNLLFNDNTECLARLHGKTTYEKYLGPQYVAGITNLKKCSTSPLLEACEFLRK

SEQ ID NO: 51056 - protein, 666 aa, Homo sapiens
MRKVRGPPVSCIKRDSPIQCIQAIAENRADAVTLDGGFIYEAGLAPYKLRPVAAEVYGTERQPRTHYYAVAVVKKGGSFQLNELQGLKSCHTGLRRTAGWNVPIGTLRPFLNWTGPPEPIEAAVARFFSASCVPGADKGQFPNLCRLCAGTGENKCAFSSQEPYFSYSGAFKCLRDGAGDVAFIRESTVFEDLSDEAERDEYELLCPDNTRKPVDKFKDCHLARVPSHAVVARSVNGKEDAIWNLLRQAQEKFGKDKSPKFQLFGSPSGQKDLLFKDSAIGFSRVPPRIDSGLYLGSGYFTAIQNLRKSEEEVAARRARVVWCAVGEQELRKCNQWSGLSEGSVTCSSASTTEDCIALVLKGEADAMSLDGGYVYTAGKCGLVPVLAENYKSQQSSDPDPNCVDRPVEGYLAVAVVRRSDTSLTWNSVKGKKSCHTAVDRTAGWNIPMGLLFNQTGSCKFDEYFSQSCAPGSDPRSNLCALCIGDEQGENKCVPNSNERYYGYTGAFRCLAENAGDVAFVKDVTVLQNTDGNNNEAWAKDLKLADFALLCLDGKRKPVTEARSCHLAMAPNHAVVSRMDKVERLKQVLLHQQAKFGRNGSDCPDKFCLFQSETKNLLFNDNTECLARLHGKTTYEKYLGPQYVAGITNLKKCSTSPLLEACEFLRK

SEQ ID NO: 51057 - protein, 150 aa, Homo sapiens
MKLVFLVLLFLGALGLCLAGRRRSVQWCAVSQPEATKCFQWQRNMRKVRGPPVSCIKRDSPIQCIQAIAENRADAVTLDGGFIYEAGLAPYKLRPVAAEVYGTERQPAVFPVQIKDSSPTCVACVRGQGKTNVPSPPRNRTSATLVPSSV

SEQ ID NO: 51058 - protein, 281 aa, Homo sapiens
MTSKEDGKAAPGEERRRSPLDHLPPPANSNKPLTPFSIEDILNKPSVRRSYSLCGAAHLLAAADKHAQGGLPLAGRALLSQTSPLCALEELASKTFKGLEVSVLQAAEGRDGMTIFGQRQTPKKRRKSRTAFTNHQIYELEKRFLYQKYLSPADRDQIAQQLGLTNAQVITWFQNRRAKLKRDLEEMKADVESAKKLGPSGQMDIVALAELEQNSEATAGGGGGCGRAKSRPGSPVLPPGAPKAPGAGALQLSPASPLTDQPASSQDCSEDEEDEEIDVDD

SEQ ID NO: 51059 - protein, 198 aa, Homo sapiens
MNSGREPRTPRTLLSIADILAPRMVPRAPSAPQLPESGPGPTSPLCALEELTSKTFRGLDARALQPSEGRAGPDALGPGPFGRKRRKSRTAFTAQQVLELERRFVFQKYLAPSERDGLATRLGLANAQVVTWFQNRRAKLKRDVEEMRADVASLRALSPEVLCSLALPEGAPDPGLCLGPAGPDSRPHLSDEEIQVDD

SEQ ID NO: 51060 - protein, 194 aa, Homo sapiens
MGKRTSLEVSLGELGGEKCRGGRRSFPPLAASRPARPGGWRWARRDLCKTASRAENNSQACRPQRRAGPDALGPGPFGRKRRKSRTAFTAQQVLELERRFVFQKYLAPSERDGLATRLGLANAQVVTWFQNRRAKLKRDVEEMRADVASLRALSPEVLCSLALPEGAPDPGLCLGPAGPDSRPHLSDEEIQVDD

SEQ ID NO: 51061 - protein, 465 aa, Homo sapiens
METPSQRRATRSGAQASSTPLSPTRITRLQEKEDLQELNDRLAVYIDRVRSLETENAGLRLRITESEEVVSREVSGIKAAYEAELGDARKTLDSVAKERARLQLELSKVREEFKELKARNTKKEGDLIAAQARLKDLEALLNSKEAALSTALSEKRTLEGELHDLRGQVAKLEAALGEAKKQLQDEMLRRVDAENRLQTMKEELDFQKNIYSEELRETKRRHETRLVEIDNGKQREFESRLADALQELRAQHEDQVEQYKKELEKTYSAKLDNARQSAERNSNLVGAAHEELQQSRIRIDSLSAQLSQLQKQLAAKEAKLRDLEDSLARERDTSRRLLAEKEREMAEMRARMQQQLDEYQELLDIKLALDMEIHAYRKLLEGEEERLRLSPSPTSQRSRGRASSHSSQTQGGGSVTKKRKLESTESRSSFSQHARTSGRVAVEEVDEDEDGDDLLHHHHVSGSRR

SEQ ID NO: 51062 - protein, 634 aa, Homo sapiens
METPSQRRATRSGAQASSTPLSPTRITRLQEKEDLQELNDRLAVYIDRVRSLETENAGLRLRITESEEVVSREVSGIKAAYEAELGDARKTLDSVAKERARLQLELSKVREEFKELKARNTKKEGDLIAAQARLKDLEALLNSKEAALSTALSEKRTLEGELHDLRGQVAKLEAALGEAKKQLQDEMLRRVDAENRLQTMKEELDFQKNIYSEELRETKRRHETRLVEIDNGKQREFESRLADALQELRAQHEDQVEQYKKELEKTYSAKLDNARQSAERNSNLVGAAHEELQQSRIRIDSLSAQLSQLQKQLAAKEAKLRDLEDSLARERDTSRRLLAEKEREMAEMRARMQQQLDEYQELLDIKLALDMEIHAYRKLLEGEEERLRLSPSPTSQRSRGRASSHSSQTQGGGSVTKKRKLESTESRSSFSQHARTSGRVAVEEVDEEGKFVRLRNKSNEDQSMGNWQIKRQNGDDPLLTYRFPPKFTLKAGQVVTIWAAGAGATHSPPTDLVWKAQNTWGCGNSLRTALINSTGEGSHCSSSGDPAEYNLRSRTVLCGTCGQPADKASASGSGAQVGGPISSGSSASSVTVTRSYRSVGGSGGGSFGDNLVTRSYLLGNSSPRTQSPQNCSIM

SEQ ID NO: 51063 - protein, 572 aa, Homo sapiens
METPSQRRATRSGAQASSTPLSPTRITRLQEKEDLQELNDRLAVYIDRVRSLETENAGLRLRITESEEVVSREVSGIKAAYEAELGDARKTLDSVAKERARLQLELSKVREEFKELKARNTKKEGDLIAAQARLKDLEALLNSKEAALSTALSEKRTLEGELHDLRGQVAKLEAALGEAKKQLQDEMLRRVDAENRLQTMKEELDFQKNIYSEELRETKRRHETRLVEIDNGKQREFESRLADALQELRAQHEDQVEQYKKELEKTYSAKLDNARQSAERNSNLVGAAHEELQQSRIRIDSLSAQLSQLQKQLAAKEAKLRDLEDSLARERDTSRRLLAEKEREMAEMRARMQQQLDEYQELLDIKLALDMEIHAYRKLLEGEEERLRLSPSPTSQRSRGRASSHSSQTQGGGSVTKKRKLESTESRSSFSQHARTSGRVAVEEVDEEGKFVRLRNKSNEDQSMGNWQIKRQNGDDPLLTYRFPPKFTLKAGQVVTIWAAGAGATHSPPTDLVWKAQNTWGCGNSLRTALINSTGEEVAMRKLVRSVTVVEDDEDEDGDDLLHHHHVSGSRR

SEQ ID NO: 51064 - protein, 491 aa, Homo sapiens
MQPLLCLGNLEDARERTGTLLAQHPAWGRTRAKPGSPLNTKKEGDLIAAQARLKDLEALLNSKEAALSTALSEKRTLEGELHDLRGQVAKLEAALGEAKKQLQDEMLRRVDAENRLQTMKEELDFQKNIYSEELRETKRRHETRLVEIDNGKQREFESRLADALQELRAQHEDQVEQYKKELEKTYSAKLDNARQSAERNSNLVGAAHEELQQSRIRIDSLSAQLSQLQKQLAAKEAKLRDLEDSLARERDTSRRLLAEKEREMAEMRARMQQQLDEYQELLDIKLALDMEIHAYRKLLEGEEERLRLSPSPTSQRSRGRASSHSSQTQGGGSVTKKRKLESTESRSSFSQHARTSGRVAVEEVDEEGKFVRLRNKSNEDQSMGNWQIKRQNGDDPLLTYRFPPKFTLKAGQVVTIWAAGAGATHSPPTDLVWKAQNTWGCGNSLRTALINSTGEEVAMRKLVRSVTVVEDDEDEDGDDLLHHHHVSGSRR

SEQ ID NO: 51065 - protein, 614 aa, Homo sapiens
METPSQRRATRSGAQASSTPLSPTRITRLQEKEDLQELNDRLAVYIDRVRSLETENAGLRLRITESEEVVSREVSGIKAAYEAELGDARKTLDSVAKERARLQLELSKVREEFKELKARNTKKEGDLIAAQARLKDLEALLNSKEAALSTALSEKRTLEGELHDLRGQVAKLEAALGEAKKQLQDEMLRRVDAENRLQTMKEELDFQKNIYSEELRETKRRHETRLVEIDNGKQREFESRLADALQELRAQHEDQVEQYKKELEKTYSAKLDNARQSAERNSNLVGAAHEELQQSRIRIDSLSAQLSQLQKQLAAKEAKLRDLEDSLARERDTSRRLLAEKEREMAEMRARMQQQLDEYQELLDIKLALDMEIHAYRKLLEGEEERLRLSPSPTSQRSRGRASSHSSQTQGGGSVTKKRKLESTESRSSFSQHARTSGRVAVEEVDEEGKFVRLRNKSNEDQSMGNWQIKRQNGDDPLLTYRFPPKFTLKAGQVVTIWAAGAGATHSPPTDLVWKAQNTWGCGNSLRTALINSTGEEVAMRKLVRSVTVVEDDEDEDGDDLLHHHHGSHCSSSGDPAEYNLRSRTVLCGTCGQPADKASASGSGAQSPQNCSIM

SEQ ID NO: 51066 - protein, 664 aa, Homo sapiens
METPSQRRATRSGAQASSTPLSPTRITRLQEKEDLQELNDRLAVYIDRVRSLETENAGLRLRITESEEVVSREVSGIKAAYEAELGDARKTLDSVAKERARLQLELSKVREEFKELKARNTKKEGDLIAAQARLKDLEALLNSKEAALSTALSEKRTLEGELHDLRGQVAKLEAALGEAKKQLQDEMLRRVDAENRLQTMKEELDFQKNIYSEELRETKRRHETRLVEIDNGKQREFESRLADALQELRAQHEDQVEQYKKELEKTYSAKLDNARQSAERNSNLVGAAHEELQQSRIRIDSLSAQLSQLQKQLAAKEAKLRDLEDSLARERDTSRRLLAEKEREMAEMRARMQQQLDEYQELLDIKLALDMEIHAYRKLLEGEEERLRLSPSPTSQRSRGRASSHSSQTQGGGSVTKKRKLESTESRSSFSQHARTSGRVAVEEVDEEGKFVRLRNKSNEDQSMGNWQIKRQNGDDPLLTYRFPPKFTLKAGQVVTIWAAGAGATHSPPTDLVWKAQNTWGCGNSLRTALINSTGEEVAMRKLVRSVTVVEDDEDEDGDDLLHHHHGSHCSSSGDPAEYNLRSRTVLCGTCGQPADKASASGSGAQVGGPISSGSSASSVTVTRSYRSVGGSGGGSFGDNLVTRSYLLGNSSPRTQSPQNCSIM

SEQ ID NO: 51067 - protein, 572 aa, Homo sapiens; identical to SEQ ID NO: 51063

SEQ ID NO: 51068 - protein, 491 aa, Homo sapiens; identical to SEQ ID NO: 51064

SEQ ID NO: 51069 - protein, 487 aa, Homo sapiens
METPSQRRATRSGAQASSTPLSPTRITRLQEKEDLQELNDRLAVYIDRVRSLETENAGLRLRITESEEVVSREVSGIKAAYEAELGDARKTLDSVAKERARLQLELSKVREEFKELKARNTKKEGDLIAAQARLKDLEALLNSKEAALSTALSEKRTLEGELHDLRGQVAKLEAALGEAKKQLQDEMLRRVDAENRLQTMKEELDFQKNIYSEELRETKRRHETRLVEIDNGKQREFESRLADALQELRAQHEDQVEQYKKELEKTYSAKLDNARQSAERNSNLVGAAHEELQQSRIRIDSLSAQLSQLQKQLAAKEAKLRDLEDSLARERDTSRRLLAEKEREMAEMRARMQQQLDEYQELLDIKLALDMEIHAYRKLLEGEEERLRLSPSPTSQRSRGRASSHSSQTQGGGSVTKKRKLESTESRSSFSQHARTSGNSLRTALINSTGEEVAMRKLVRSVTVVEDDEDEDGDDLLHHHHVSGSRR

SEQ ID NO: 51070 - protein, 574 aa, Homo sapiens
MGNSEGCNTKKEGDLIAAQARLKDLEALLNSKEAALSTALSEKRTLEGELHDLRGQVAKLEAALGEAKKQLQDEMLRRVDAENRLQTMKEELDFQKNIYSEELRETKRRHETRLVEIDNGKQREFESRLADALQELRAQHEDQVEQYKKELEKTYSAKLDNARQSAERNSNLVGAAHEELQQSRIRIDSLSAQLSQLQKQLAAKEAKLRDLEDSLARERDTSRRLLAEKEREMAEMRARMQQQLDEYQELLDIKLALDMEIHAYRKLLEGEEERLRLSPSPTSQRSRGRASSHSSQTQGGGSVTKKRKLESTESRSSFSQHARTSGRVAVEEVDEEGKFVRLRNKSNEDQSMGNWQIKRQNGDDPLLTYRFPPKFTLKAGQVVTIWAAGAGATHSPPTDLVWKAQNTWGCGNSLRTALINSTGEEVAMRKLVRSVTVVEDDEDEDGDDLLHHHHGSHCSSSGDPAEYNLRSRTVLCGTCGQPADKASASGSGAQVGGPISSGSSASSVTVTRSYRSVGGSGGGSFGDNLVTRSYLLGNSSPRTQSPQNCSIIQEMGMRWEVEEGRRKVSLSCLP

SEQ ID NO: 51071 - protein, 615 aa, Homo sapiens
MPSRKFADGEVVRGRWPGSSLYYEVEILSHDSTSQLYTVKYKDGTELELKENDIKPLTSFRQRKGGSTSSSPSRRRGSRSRSRSRSPGRPPKSARRSASASHQADIKEARREVEVKLTPLILKPFGNSISRYNGEPEHIERNDAPHKNTQEKFSLSQESSYIATQYSLRPRREEVKLKEIDSKEEKYVAKELAVRTFEVTPIRAKDLEFGGVPGVFLIMFGLPVFLFLLLLMCKQKDPSLLNFPPPLPALYELWETRVFGVYLLWFLIQVLFYLLPIGKVVEGTPLIDGRRLKYRLNGFYAFILTSAVIGTSLFQGVEFHYVYSHFLQFALAATVFCVVLSVYLYMRSLKAPRNDLSPASSGNAVYDFFIGRELNPRIGTFDLKYFCELRPGLIGWVVINLVMLLAEMKIQDRAVPSLAMILVNSFQLLYVVDALWNEEALLTTMDIIHDGFGFMLAFGDLVWVPFIYSFQAFYLVSHPNEVSWPMASLIIVLKLCGYVIFRGANSQKNAFRKNPSDPKLAHLKTIHTSTGKNLLVSGWWGFVRHPNYLGDLIMALAWSLPCGFNHILPYFYIIYFTMLLVHREARDEYHCKKKYGVAWEKYCQRVPYRIFPYIY

SEQ ID NO: 51072 - protein, 615 aa, Homo sapiens; identical to SEQ ID NO: 51071

SEQ ID NO: 51073 - protein, 51 aa, Homo sapiens
MPSRKFADGEVVRGRWPGSSLYYEVEILSHDSTSQLYTVKYKDGTELELKE

SEQ ID NO: 51074 - protein, 128 aa, Homo sapiens
IGRELNPRIGTFDLKYFCELRPGLIGWVVINLVMLLAEMKIQDRAVPSLAMILVNSFQLLYVVDALWNEEALLTTMDIIHDGFGFMLAFGDLVWVPFIYSFQAFYLVSHPNEVSWPMASLIIVLKREY

SEQ ID NO: 51075 - protein, 213 aa, Homo sapiens
MPSRKFADGEVVRGRWPGSSLYYEVEILSHDSTSQLYTVKYKDGTELELKENDIKPLTSFRQRKGGSTSSSPSRRRGSRSRSRSRSPGRPPKSARRSASASHQADIKEARREVEVKLTPLILKPFGNSISRYNGEPEHIERNDAPHKNTQEKFSLSQESSYIATQYSLRPRREEVKLKEIDSKEEKYVAKELAVRTFEVTPIRAKDLEFGGVP

SEQ ID NO: 51076 - protein, 107 aa, Homo sapiens
  VARIANT 1: note = MOD_RES - Any amino acid
XSTSLKMYFYFYIDLKTIHTSTGKNLLVSGWWGFVRHPNYLGDLIMALAWSLPCGFNHILPYFYIIYFTMLLVHREARDEYHCKKKYGVAWEKYCQRVPYRIFPYIY

SEQ ID NO: 51077 - protein, 586 aa, Homo sapiens
MATATPVPPRMGSRAGGPTTPLSPTRLSRLQEKEELRELNDRLAVYIDKVRSLETENSALQLQVTEREEVRGRELTGLKALYETELADARRALDDTARERAKLQIELGKCKAEHDQLLLNYAKKESDLNGAQIKLREYEAALNSKDAALATALGDKKSLEGDLEDLKDQIAQLEASLAAAKKQLADETLLKVDLENRCQSLTEDLEFRKSMYEEEINETRRKHETRLVEVDSGRQIEYEYKLAQALHEMREQHDAQVRLYKEELEQTYHAKLENARLSSEMNTSTVNSAREELMESRMRIESLSSQLSNLQKESRACLERIQELEDLLAKEKDNSRRMLTDKEREMAEIRDQMQQQLNDYEQLLDVKLALDMEISAYRKLLEGEEERLKLSPSPSSRVTVSRASSSRSVRTTRGKRKRVDVEESEASSSVSISHSASATGNVCIEEIDVDGKFIRLKNTSEQDQPMGGWEMIRKIGDTSVSYKYTSRYVLKAGQTVTIWAANAGVTASPPTDLIWKNQNSWGTGEDVKVILKNSQGEEVAQRSTVFKTTIPEEEEEEEEAAGVVVEEELFHQQGTPRASNRSCAIM

SEQ ID NO: 51078 - protein, 600 aa, Homo sapiens
MATPLPGRAGGPATPLSPTRLSRLQEKEELRELNDRLAHYIDRVRALELENDRLLLKISEKEEVTTREVSGIKALYESELADARRVLDETARERARLQIEIGKLRAELDEVNKSAKKREGELTVAQGRVKDLESLFHRSEVELAAALSDKRGLESDVAELRAQLAKAEDGHAVAKKQLEKETLMRVDLENRCQSLQEELDFRKSVFEEEVRETRRRHERRLVEVDSSRQQEYDFKMAQALEELRSQHDEQVRLYKLELEQTYQAKLDSAKLSSDQNDKAASAAREELKEARMRLESLSYQLSGLQKQASAAEDRIRELEEAMAGERDKFRKMLDAKEQEMTEMRDVMQQQLAEYQELLDVKLALDMEINAYRKLLEGEEERLKLSPSPSSRVTVSRATSSSSGSLSATGRLGRSKRKRLEVEEPLGSGPSVLGTGTGGSGGFHLAQQASASGSVSIEEIDLEGKFVQLKNNSDKDQSLGNWRIKRQVLEGEEIAYKFTPKYILRAGQMVTVWAAGAGVAHSPPSTLVWKGQSSWGTGESFRTVLVNADGEEVAMRTVKKSSVMRENENGEEEEEEAEFGEEDLFHQQGDPRTTSRGCYVM

SEQ ID NO: 51079 - protein, 600 aa, Homo sapiens; identical to SEQ ID NO: 51078

SEQ ID NO: 51080 - protein, 216 aa, Homo sapiens
MLIGGNIEVHVNPGDGTGLRKALLHAPTGTCSDGQAHSISLVRNRRIITVQLDENNPVEMKLGTLVESRTINVSNLYVGGIPEGEGTSLLTMRRSFHGCIKNLIFNLELLDFNSAVMSKSTWTPAGCQKGLSWLPMQRTKLLPEPRAFPVGAASFTISQVQSAKEGLGQRELKWGLAVKVPAKAGAGAGAGAVLKIRAGTGRERVPQATQMTRPNP

SEQ ID NO: 51081 - protein, 3075 aa, Homo sapiens
MRGGVLLVLLLCVAAQCRQRGLFPAILNLASNAHISTNATCGEKGPEMFCKLVEHVPGRPVRNPQCRICDGNSANPRERHPISHAIDGTNNWWQSPSIQNGREYHWVTITLDLRQVFQVAYVIIKAANAPRPGNWILERSLDGTTFSPWQYYAVSDSECLSRYNITPRRGPPTYRADDEVICTSYYSRLVPLEHGEIHTSLINGRPSADDLSPKLLEFTSARYIRLRLQRIRTLNADLMTLSHREPKELDPIVTRRYYYSIKDISVGGMCICYGHASSCPWDETTKKLQCQCEHNTCGESCNRCCPGYHQQPWRPGTVSSGNTCEACNCHNKAKDCYYDESVAKQKKSLNTAGQFRGGGVCINCLQNTMGINCETCIDGYYRPHKVSPYEDEPCRPCNCDPVGSLSSVCIKDDLHSDLHNGKQPGQCPCKEGYTGEKCDRCQLGYKDYPTCVSCGCNPVGSASDEPCTGPCVCKENVEGKACDRCKPGFYNLKEKNPRGCSECFCFGVSDVCSSLSWPVGQVNSMSGWLVTDLISPRKIPSQQDALGGRHQVSINNTAVMQRLAPKYYWAAPEAYLGNKLTAFGGFLKYTVSYDIPVETVDSNLMSHADVIIKGNGLTLSTQAEGLSLQPYEEYLNVVRLVPENFQDFHSKRQIDRDQLMTVLANVTHLLIRANYNSAKMALYRLESVSLDIASSNAIDLVVAADVEHCECPQGYTGTSCESCLSGYYRVDGILFGGICQPCECHGHAAECNVHGVCIACAHNTTGVHCEQCLPGFYGEPSRGTPGDCQPCACPLTIASNNFSPTCHLNDGDEVVCDWCAPGYSGAWCERCADGYYGNPTVPGESCVPCDCSGNVDPSEAGHCDSVTGECLKCLGNTDGAHCERCADGFYGDAVTAKNCRACECHVKGSHSAVCHLETGLCDCKPNVTGQQCDQCLHGYYGLDSGHGCRPCNCSVAGSVSDGCTDEGQCHCVPGVAGKRCDRCAHGFYAYQDGSCTPCDCPHTQNTCDPETGECVCPPHTQGVKCEECEDGHWGYDAEVGCQACNCSLVGSTHHRCDVVTGHCQCKSKFGGRACDQCSLGYRDFPDCVPCDCDLRGTSGDACNLEQGLCGCVEETGACPCKENVFGPQCNECREGTFALRADNPLGCSPCFCSGLSHLCSELEDYVRTPVTLGSDQPLLRVVSQSNLRGTTEGVYYQAPDFLLDAATVRQHIRAEPFYWRLPQQFQGDQLMAYGGKLKYSVAFYSLDGVGTSNFEPQVLIKGGRIRKQVIYMDAPAPENGVRQEQEVAMRENFWKYFNSVSEKPVTREDFMSVLSDIEYILIKASYGQGLQQSRISDISMEVGRKAEKLHPEEEVASLLENCVCPPGTVGFSCQDCAPGYHRGKLPAGSDRGPRPLVAPCVPCSCNNHSDTCDPNTGKCLNCGDNTAGDHCDVCTSGYYGKVTGSASDCALCACPHSPPASFSPTCVLEGDHDFRCDACLLGYEGKHCERCSSSYYGNPQTPGGSCQKCDCNPHGSVHGDCDRTSGQCVCRLGASGLRCDECEPRHILMETDCVSCDDECVGVLLNDLDEIGDAVLSLNLTGIIPVPYGILSNLENTTKYLQESLLKENMQKDLGKIKLEGVAEETDNLQKKLTRMLASTQKVNRATERIFKESQDLAIAIERLQMSITEIMEKTTLNQTLDEDFLLPNSTLQNMQQNGTSLLEIMQIRDFTQLHQNATLELKAAEDLLSQIQENYQKPLEELEVLKEAASHVLSKHNNELKAAEALVREAEAKMQESNHLLLMVNANLREFSDKKLHVQEEQNLTSELIVQGRGLIDAAAAQTDAVQDALEHLEDHQDKLLLWSAKIRHHIDDLVMHMSQRNAVDLVYRAEDHAAEFQRLADVLYSGLENIRNVSLNATSAAYVHYNIQSLIEESEELARDAHRTVTETSLLSESLVSNGKAAVQRSSRFLKEGNNLSRKLPGIALELSELRNKTNRFQENAVEITRQTNESLLILRAIPKGIRDKGAKTKELATSASQSAVSTLRDVAGLSQELLNTSASLSRVNTTLRETHQLLQDSTMATLLAGRKVKDVEIQANLLFDRLKPLKMLEENLSRNLSEIKLLISQARKQAASIKVAVSADRDCIRAYQPQISSTNYNTLTLNVKTQEPDNLLFYLGSSTASDFLAVEMRRGRVAFLWDLGSGSTRLEFPDFPIDDNRWHSIHVARFGNIGSLSVKEMSSNQKSPTKTSKSPGTANVLDVNNSTLMFVGGLGGQIKKSPAVKVTHFKGCLGEAFLNGKSIGLWNYIEREGKCRGCFGSSQNEDPSFHFDGSGYSVVEKSLPATVTQIIMLFNTFSPNGLLLYLGSYGTKDFLSIELFRGRVKVMTDLGSGPITLLTDRRYNNGTWYKIAFQRNRKQGVLAVIDAYNTSNKETKQGETPGASSDLNRLDKDPIYVGGLPRSRVVRRGVTTKSFVGCIKNLEISRSTFDLLRNSYGVRKGCLLEPIRSVSFLKGGYIELPPKSLSPESEWLVTFATTNSSGIILAALGGDVEKRGDREEAHVPFFSVMLIGGNIEVHVNPGDGTGLRKALLHAPTGTCSDGQAHSISLVRNRRIITVQLDENNPVEMKLGTLVESRTINVSNLYVGGIPEGEGTSLLTMRRSFHGCIKNLIFNLELLDFNSAVGHEQVDLDTCWLSERPKLAPDAEDSKLLPEPRAFPEQCVVDAALEYVPGAHQFGLTQNSHFILPFNQSAVRKKLSVELSIRTFASSGLIYYMAHQNQADYAVLQLHGGRLHFMFDLGKGRTKVSHPALLSDGKWHTVKTDYVKRKGFITVDGRESPMVTVVGDGTMLDVEGLFYLGGLPSQYQARKIGNITHSIPACIGDVTVNSKQLDKDSPVSAFTVNRCYAVAQEGTYFDGSGYAALVKEGYKVQSDVNITLEFRTSSQNGVLLGISTAKVDAIGLELVDGKVLFHVNNGAGRITAAYEPKTATVLCDGKWHTLQANKSKHRITLIVDGNAVGAESPHTQSTSVDTNNPIYVGGYPAGVKQKCLRSQTSFRGCLRKLALIKSPQVQSFDFSRAFELHGVFLHSCPGTES

SEQ ID NO: 51082 - protein, 3121 aa, Homo sapiens
MPGAAGVLLLLLLSGGLGGVQAQRPQQQRQSQAHQQRGLFPAVLNLASNALITTNATCGEKGPEMYCKLVEHVPGQPVRNPQCRICNQNSSNPNQRHPITNAIDGKNTWWQSPSIKNGIEYHYVTITLDLQQVFQIAYVIVKAANSPRPGNWILERSLDDVEYKPWQYHAVTDTECLTLYNIYPRTGPPSYAKDDEVICTSFYSKIHPLENGEIHISLINGRPSADDPSPELLEFTSARYIRLRFQRIRTLNADLMMFAHKDPREIDPIVTRRYYYSVKDISVGGMCICYGHARACPLDPATNKSRCECEHNTCGDSCDQCCPGFHQKPWRAGTFLTKTECEACNCHGKAEECYYDENVARRNLSLNIRGKYIGGGVCINCTQNTAGINCETCTDGFFRPKGVSPNYPRPCQPCHCDPIGSLNEVCVKDEKHARRGLAPGSCHCKTGFGGVSCDRCARGYTGYPDCKACNCSGLGSKNEDPCFGPCICKENVEGGDCSRCKSGFFNLQEDNWKGCDECFCSGVSNRCQSSYWTYGKIQDMSGWYLTDLPGRIRVAPQQDDLDSPQQISISNAEARQALPHSYYWSAPAPYLGNKLPAVGGQLTFTISYDLEEEEEDTERVLQLMIILEGNDLSISTAQDEVYLHPSEEHTNVLLLKEESFTIHGTHFPVRRKEFMTVLANLKRVLLQITYSFGMDAIFRLSSVNLESAVSYPTDGSIAAAVEVCQCPPGYTGSSCESCWPRHRRVNGTIFGGICEPCQCFGHAESCDDVTGECLNCKDHTGGPYCDKCLPGFYGEPTKGTSEDCQPCACPLNIPSNNFSPTCHLDRSLGLICDGCPVGYTGPRCERCAEGYFGQPSVPGGSCQPCQCNDNLDFSIPGSCDSLSGSCLICKPGTTGRYCELCADGYFGDAVDAKNCQPCRCNAGGSFSEVCHSQTGQCECRANVQGQRCDKCKAGTFGLQSARGCVPCNCNSFGSKSFDCEESGQCWCQPGVTGKKCDRCAHGYFNFQEGGCTACECSHLGNNCDPKTGRCICPPNTIGEKCSKCAPNTWGHSITTGCKACNCSTVGSLDFQCNVNTGQCNCHPKFSGAKCTECSRGHWNYPRCNLCDCFLPGTDATTCDSETKKCSCSDQTGQCTCKVNVEGIHCDRCRPGKFGLDAKNPLGCSSCYCFGTTTQCSEAKGLIRTWVTLKAEQTILPLVDEALQHTTTKGIVFQHPEIVAHMDLMREDLHLEPFYWKLPEQFEGKKLMAYGGKLKYAIYFEAREETGFSTYNPQVIIRGGTPTHARIIVRHMAAPLIGQLTRHEIEMTEKEWKYYGDDPRVHRTVTREDFLDILYDIHYILIKATYGNFMRQSRISEISMEVAEQGRGTTMTPPADLIEKCDCPLGYSGLSCEACLPGFYRLRSQPGGRTPGPTLGTCVPCQCNGHSSLCDPETSICQNCQHHTAGDFCERCALGYYGIVKGLPNDCQQCACPLISSSNNFSPSCVAEGLDDYRCTACPRGYEGQYCERCAPGYTGSPGNPGGSCQECECDPYGSLPVPCDPVTGFCTCRPGATGRKCDGCKHWHAREGWECVFCGDECTGLLLGDLARLEQMVMSINLTGPLPAPYKMLYGLENMTQELKHLLSPQRAPERLIQLAEGNLNTLVTEMNELLTRATKVTADGEQTGQDAERTNTRAKSLGEFIKELARDAEAVNEKAIKLNETLGTRDEAFERNLEGLQKEIDQMIKELRRKNLETQKEIAEDELVAAEALLKKVKKLFGESRGENEEMEKDLREKLADYKNKVDDAWDLLREATDKIREANRLFAVNQKNMTALEKKKEAVESGKRQIENTLKEGNDILDEANRLADEINSIIDYVEDIQTKLPPMSEELNDKIDDLSQEIKDRKLAEKVSQAESHAAQLNDSSAVLDGILDEAKNISFNATAAFKAYSNIKDYIDEAEKVAKEAKDLAHEATKLATGPRGLLKEDAKGCLQKSFRILNEAKKLANDVKENEDHLNGLKTRIENADARNGDLLRTLNDTLGKLSAIPNDTAAKLQAVKDKARQANDTAKDVLAQITELHQNLDGLKKNYNKLADSVAKTNAVVKDPSKNTVADADATVKNLEQEADRLIDKLKPIKELEDNLKKNISEIKELINQARKQANSIKVSVSSGGDCIRTYKPEIKKGSYNNIVVNVKTAVADNLLFYLGSAKFIDFLAIEMRKGKVSFLWDVGSGVGRVEYPDLTIDDSYWYRIVASRTGRNGTISVRALDGPKASIVPSTHHSTSPPGYTILDVDANAMLFVGGLTGKLKKADAVRVITFTGCMGETYFDNKPIGLWNFREKEGDCKGCTVSPQVEDSEGTIQFDGEGYALVSRPIRWYPNISTVMFKFRTFSSSALLMYLATRDLRDFMSVELTDGHIKVSYDLGSGMASVVSNQNHNDGKWKSFTLSRIQKQANISIVDIDTNQEENIATSSSGNNFGLDLKADDKIYFGGLPTLRNLSMKARPEVNLKKYSGCLKDIEISRTPYNILSSPDYVGVTKGCSLENVYTVSFPKPGFVELSPVPIDVGTEINLSFSTKNESGIILLGSGGTPAPPRRKRRQTGQAYYAILLNRGRLEVHLSTGARTMRKIVIRPEPNLFHDGREHSVHVERTRGIFTVQVDENRRYMQNLTVEQPIEVKKLFVGGAPPEFQPSPLRNIPPFEGCIWNLVINSVPMDFARPVSFKNADIGRCAHQKLREDEDGAAPAEIVIQPEPVPTPAFPTPTPVLTHGPCAAESEPALLIGSKQFGLSRNSHIAIAFDDTKVKNRLTIELEVRTEAESGLLFYMARINHADFATVQLRNGLPYFSYDLGSGDTHTMIPTKINDGQWHKIKIMRSKQEGILYVDGASNRTISPKKADILDVVGMLYVGGLPINYTTRRIGPVTYSIDGCVRNLHMAEAPADLEQPTSSFHVGTCFANAQRGTYFDGTGFAKAVGGFKVGLDLLVEFEFRTTTTTGVLLGISSQKMDGMGIEMIDEKLMFHVDNGAGRFTAVYDAGVPGHLCDGQWHKVTANKIKHRIELTVDGNQVEAQSPNPASTSADTNDPVFVGGFPDDLKQFGLTTSIPFRGCIRSLKLTKGTGKPLEVNFAKALELRGVQPVSCPAN

SEQ ID NO: 51083 - protein, 3122 aa, Homo sapiens
MPGAAGVLLLLLLSGGLGGVQAQRPQQQRQSQAHQQRGLFPAVLNLASNALITTNATCGEKGPEMYCKLVEHVPGQPVRNPQCRICNQNSSNPNQRHPITNAIDGKNTWWQSPSIKNGIEYHYVTITLDLQQVFQIAYVIVKAANSPRPGNWILERSLDDVEYKPWQYHAVTDTECLTLYNIYPRTGPPSYAKDDEVICTSFYSKIHPLENGEIHISLINGRPSADDPSPELLEFTSARYIRLRFQRIRTLNADLMMFAHKDPREIDPIVTRRYYYSVKDISVGGMCICYGHARACPLDPATNKSRCECEHNTCGDSCDQCCPGFHQKPWRAGTFLTKTECEACNCHGKAEECYYDENVARRNLSLNIRGKYIGGGVCINCTQNTAGINCETCTDGFFRPKGVSPNYPRPCQPCHCDPIGSLNEVCVKDEKHARRGLAPGSCHCKTGFGGVSCDRCARGYTGYPDCKACNCSGLGSKNEDPCFGPCICKENVEGGDCSRCKSGFFNLQEDNWKGCDECFCSGVSNRCQSSYWTYGKIQDMSGWYLTDLPGRIRVAPQQDDLDSPQQISISNAEARQALPHSYYWSAPAPYLGNKLPAVGGQLTFTISYDLEEEEEDTERVLQLMIILEGNDLSISTAQDEVYLHPSEEHTNVLLLKEESFTIHGTHFPVRRKEFMTVLANLKRVLLQITYSFGMDAIFRLSSVNLESAVSYPTDGSIAAAVEVCQCPPGYTGSSCESCWPRHRRVNGTIFGGICEPCQCFGHAESCDDVTGECLNCKDHTGGPYCDKCLPGFYGEPTKGTSEDCQPCACPLNIPSNNFSPTCHLDRSLGLICDGCPVGYTGPRCERCAEGYFGQPSVPGGSCQPCQCNDNLDFSIPGSCDSLSGSCLICKPGTTGRYCELCADGYFGDAVDAKNCQPCRCNAGGSFSEVCHSQTGQCECRANVQGQRCDKCKAGTFGLQSARGCVPCNCNSFGSKSFDCEESGQCWCQPGVTGKKCDRCAHGYFNFQEGGCTACECSHLGNNCDPKTGRCICPPNTIGEKCSKCAPNTWGHSITTGCKACNCSTVGSLDFQCNVNTGQCNCHPKFSGAKCTECSRGHWNYPRCNLCDCFLPGTDATTCDSETKKCSCSDQTGQCTCKVNVEGIHCDRCRPGKFGLDAKNPLGCSSCYCFGTTTQCSEAKGLIRTWVTLKAEQTILPLVDEALQHTTTKGIVFQHPEIVAHMDLMREDLHLEPFYWKLPEQFEGKKLMAYGGKLKYAIYFEAREETGFSTYNPQVIIRGGTPTHARIIVRHMAAPLIGQLTRHEIEMTEKEWKYYGDDPRVHRTVTREDFLDILYDIHYILIKATYGNFMRQSRISEISMEVAEQGRGTTMTPPADLIEKCDCPLGYSGLSCEACLPGFYRLRSQPGGRTPGPTLGTCVPCQCNGHSSLCDPETSICQNCQHHTAGDFCERCALGYYGIVKGLPNDCQQCACPLISSSNNFSPSCVAEGLDDYRCTACPRGYEGQYCERCAPGYTGSPGNPGGSCQECECDPYGSLPVPCDPVTGFCTCRPGATGRKCDGCKHWHAREGWECVFCGDECTGLLLGDLARLEQMVMSINLTGPLPAPYKMLYGLENMTQELKHLLSPQRAPERLIQLAEGNLNTLVTEMNELLTRATKVTADGEQTGQDAERTNTRAKSLGEFIKELARDAEAVNEKAIKLNETLGTRDEAFERNLEGLQKEIDQMIKELRRKNLETQKEIAEDELVAAEALLKKVKKLFGESRGENEEMEKDLREKLADYKNKVDDAWDLLREATDKIREANRLFAVNQKNMTALEKKKEAVESGKRQIENTLKEGNDILDEANRLADEINSIIDYVEDIQTKLPPMSEELNDKIDDLSQEIKDRKLAEKVSQAESHAAQLNDSSAVLDGILDEAKNISFNATAAFKAYSNIKDYIDEAEKVAKEAKDLAHEATKLATGPRGLLKEDAKGCLQKSFRILNEAKKLANDVKENEDHLNGLKTRIENADARNGDLLRTLNDTLGKLSAIPNDTAAKLQAVKDKARQANDTAKDVLAQITELHQNLDGLKKNYNKLADSVAKTNAVVKDPSKNKIVADADATVKNLEQEADRLIDKLKPIKELEDNLKKNISEIKELINQARKQANSIKVSVSSGGDCIRTYKPEIKKGSYNNIVVNVKTAVADNLLFYLGSAKFIDFLAIEMRKGKVSFLWDVGSGVGRVEYPDLTIDDSYWYRIVASRTGRNGTISVRALDGPKASIVPSTHHSTSPPGYTILDVDANAMLFVGGLTGKLKKADAVRVITFTGCMGETYFDNKPIGLWNFREKEGDCKGCTVSPQVEDSEGTIQFDGEGYALVSRPIRWYPNISTVMFKFRTFSSSALLMYLATRDLRDFMSVELTDGHIKVSYDLGSGMASVVSNQNHNDGKWKSFTLSRIQKQANISIVDIDTNQEENIATSSSGNNFGLDLKADDKIYFGGLPTLRNLRLFNRPEVNLKKYSGCLKDIEISRTPYNILSSPDYVGVTKGCSLENVYTVSFPKPGFVELSPVPIDVGTEINLSFSTKNESGIILLGSGGTPAPPRRKRRQTGQAYYAILLNRGRLEVHLSTGARTMRKIVIRPEPNLFHDGREHSVHVERTRGIFTVQVDENRRYMQNLTVEQPIEVKKLFVGGAPPEFQPSPLRNIPPFEGCIWNLVINSVPMDFARPVSFKNADIGRCAHQKLREDEDGAAPAEIVIQPEPVPTPAFPTPTPVLTHGPCAAESEPALLIGSKQFGLSRNSHIAIAFDDTKVKNRLTIELEVRTEAESGLLFYMARINHADFATVQLRNGLPYFSYDLGSGDTHTMIPTKINDGQWHKIKIMRSKQEGILYVDGASNRTISPKKADILDVVGMLYVGGLPINYTTRRIGPVTYSIDGCVRNLHMAEAPADLEQPTSSFHVGTCFANAQRGTYFDGTGFAKAVGGFKVGLDLLVEFEFRTTTTTGVLLGISSQKMDGMGIEMIDEKLMFHVDNGAGRFTAVYDAGVPGHLCDGQWHKVTANKIKHRIELTVDGNQVEAQSPNPASTSADTNDPVFVGGFPDDLKQFGLTTSIPFRGCIRSLKLTKGTGKPLEVNFAKALELRGVQPVSCPAN

SEQ ID NO: 51084 - protein, 3122 aa, Homo sapiens
MPGAAGVLLLLLLSGGLGGVQAQRPQQQRQSQAHQQRGLFPAVLNLASNALITTNATCGEKGPEMYCKLVEHVPGQPVRNPQCRICNQNSSNPNQRHPITNAIDGKNTWWQSPSIKNGIEYHYVTITLDLQQVFQIAYVIVKAANSPRPGNWILERSLDDVEYKPWQYHAVTDTECLTLYNIYPRTGPPSYAKDDEVICTSFYSKIHPLENGEIHISLINGRPSADDPSPELLEFTSARYIRLRFQRIRTLNADLMMFAHKDPREIDPIVTRRYYYSVKDISVGGMCICYGHARACPLDPATNKSRCECEHNTCGDSCDQCCPGFHQKPWRAGTFLTKTECEACNCHGKAEECYYDENVARRNLSLNIRGKYIGGGVCINCTQNTAGINCETCTDGFFRPKGVSPNYPRPCQPCHCDPIGSLNEVCVKDEKHARRGLAPGSCHCKTGFGGVSCDRCARGYTGYPDCKACNCSGLGSKNEDPCFGPCICKENVEGGDCSRCKSGFFNLQEDNWKGCDECFCSGVSNRCQSSYWTYGKIQDMSGWYLTDLPGRIRVAPQQDDLDSPQQISISNAEARQALPHSYYWSAPAPYLGNKLPAVGGQLTFTISYDLEEEEEDTERVLQLMIILEGNDLSISTAQDEVYLHPSEEHTNVLLLKEESFTIHGTHFPVRRKEFMTVLANLKRVLLQITYSFGMDAIFRLSSVNLESAVSYPTDGSIAAAVEVCQCPPGYTGSSCESCWPRHRRVNGTIFGGICEPCQCFGHAESCDDVTGECLNCKDHTGGPYCDKCLPGFYGEPTKGTSEDCQPCACPLNIPSNNFSPTCHLDRSLGLICDGCPVGYTGPRCERCAEGYFGQPSVPGGSCQPCQCNDNLDFSIPGSCDSLSGSCLICKPGTTGRYCELCADGYFGDAVDAKNCQPCRCNAGGSFSEVCHSQTGQCECRANVQGQRCDKCKAGTFGLQSARGCVPCNCNSFGSKSFDCEESGQCWCQPGVTGKKCDRCAHGYFNFQEGGCTACECSHLGNNCDPKTGRCICPPNTIGEKCSKCAPNTWGHSITTGCKACNCSTVGSLDFQCNVNTGQCNCHPKFSGAKCTECSRGHWNYPRCNLCDCFLPGTDATTCDSETKKCSCSDQTGQCTCKVNVEGIHCDRCRPGKFGLDAKNPLGCSSCYCFGTTTQCSEAKGLIRTWVTLKAEQTILPLVDEALQHTTTKGIVFQHPEIVAHMDLMREDLHLEPFYWKLPEQFEGKKLMAYGGKLKYAIYFEAREETGFSTYNPQVIIRGGTPTHARIIVRHMAAPLIGQLTRHEIEMTEKEWKYYGDDPRVHRTVTREDFLDILYDIHYILIKATYGNFMRQSRISEISMEVAEQGRGTTMTPPADLIEKCDCPLGYSGLSCEACLPGFYRLRSQPGGRTPGPTLGTCVPCQCNGHSSLCDPETSICQNCQHHTAGDFCERCALGYYGIVKGLPNDCQQCACPLISSSNNFSPSCVAEGLDDYRCTACPRGYEGQYCERCAPGYTGSPGNPGGSCQECECDPYGSLPVPCDPVTGFCTCRPGATGRKCDGCKHWHAREGWECVFCGDECTGLLLGDLARLEQMVMSINLTGPLPAPYKMLYGLENMTQELKHLLSPQRAPERLIQLAEGNLNTLVTEMNELLTRATKVTADGEQTGQDAERTNTRAKSLGEFIKELARDAEAVNEKAIKLNETLGTRDEAFERNLEGLQKEIDQMIKELRRKNLETQKEIAEDELVAAEALLKKVKKLFGESRGENEEMEKDLREKLADYKNKVDDAWDLLREATDKIREANRLFAVNQKNMTALEKKKEAVESGKRQIENTLKEGNDILDEANRLADEINSIIDYVEDIQTKLPPMSEELNDKIDDLSQEIKDRKLAEKVSQAESHAAQLNDSSAVLDGILDEAKNISFNATAAFKAYSNIKDYIDEAEKVAKEAKDLAHEATKLATGPRGLLKEDAKGCLQKSFRILNEAKKLANDVKENEDHLNGLKTRIENADARNGDLLRTLNDTLGKLSAIPNDTAAKLQAVKDKARQANDTAKDVLAQITELHQNLDGLKKNYNKLADSVAKTNAVVKDPSKNKIIADADATVKNLEQEADRLIDKLKPIKELEDNLKKNISEIKELINQARKQANSIKVSVSSGGDCIRTYKPEIKKGSYNNIVVNVKTAVADNLLFYLGSAKFIDFLAIEMRKGKVSFLWDVGSGVGRVEYPDLTIDDSYWYRIVASRTGRNGTISVRALDGPKASIVPSTHHSTSPPGYTILDVDANAMLFVGGLTGKLKKADAVRVITFTGCMGETYFDNKPIGLWNFREKEGDCKGCTVSPQVEDSEGTIQFDGEGYALVSRPIRWYPNISTVMFKFRTFSSSALLMYLATRDLRDFMSVELTDGHIKVSYDLGSGMASVVSNQNHNDGKWKSFTLSRIQKQANISIVDIDTNQEENIATSSSGNNFGLDLKADDKIYFGGLPTLRNLSMKARPEVNLKKYSGCLKDIEISRTPYNILSSPDYVGVTKGCSLENVYTVSFPKPGFVELSPVPIDVGTEINLSFSTKNESGIILLGSGGTPAPPRRKRRQTGQAYYAILLNRGRLEVHLSTGARTMRKIVIRPEPNLFHDGREHSVHVERTRGIFTVQVDENRRYMQNLTVEQPIEVKKLFVGGAPPEFQPSPLRNIPPFEGCIWNLVINSVPMDFARPVSFKNADIGRCAHQKLREDEDGAAPAEIVIQPEPVPTPAFPTPTPVLTHGPCAAESEPALLIGSKQFGLSRNSHIAIAFDDTKVKNRLTIELEVRTEAESGLLFYMARINHADFATVQLRNGLPYFSYDLGSGDTHTMIPTKINDGQWHKIKIMRSKQEGILYVDGASNRTISPKKADILDVVGMLYVGGLPINYTTRRIGPVTYSIDGCVRNLHMAEAPADLEQPTSSFHVGTCFANAQRGTYFDGTGFAKAVGGFKVGLDLLVEFEFRTTTTTGVLLGISSQKMDGMGIEMIDEKLMFHVDNGAGRFTAVYDAGVPGHLCDGQWHKVTANKIKHRIELTVDGNQVEAQSPNPASTSADTNDPVFVGGFPDDLKQFGLTTSIPFRGCIRSLKLTKGTGKPLEVNFAKALELRGVQPVSCPAN

SEQ ID NO: 51085 - protein, 1128 aa, Homo sapiens
KKLANDVKENEDHLNGLKTRIENADARNGDLLRTLNDTLGKLSAIPNDTAAKLQAVKDKARQANDTAKDVLAQITELHQNLDGLKKNYNKLADSVAKTNAVVKDPSKNTVADADATVKNLEQEADRLIDKLKPIKELEDNLKKNISEIKELINQARKQANSIKVSVSSGGDCIRTYKPEIKKGSYNNIVVNVKTAVADNLLFYLGSAKFIDFLAIEMRKGKVSFLWDVGSGVGRVEYPDLTIDDSYWYRIVASRTGRNGTISVRALDGPKASIVPSTHHSTSPPGYTILDVDANAMLFVGGLTGKLKKADAVRVITFTGCMGETYFDNKPIGLWNFREKEGDCKGCTVSPQVEDSEGTIQFDGEGYALVSRPIRWYPNISTVMFKFRTFSSSALLMYLATRDLRDFMSVELTDGHIKVSYDLGSGMASVVSNQNHNDGKWKSFTLSRIQKQANISIVDIDTNQEENIATSSSGNNFGLDLKADDKIYFGGLPTLRNLSMKARPEVNLKKYSGCLKDIEISRTPYNILSSPDYVGVTKGCSLENVYTVSFPKPGFVELSPVPIDVGTEINLSFSTKNESGIILLGSGGTPAPPRRKRRQTGQAYYAILLNRGRLEVHLSTGARTMRKIVIRPEPNLFHDGREHSVHVERTRGIFTVQVDENRRYMQNLTVEQPIEVKKLFVGGAPPEFQPSPLRNIPPFEGCIWNLVINSVPMDFARPVSFKNADIGRCAHQKLREDEDGAAPAEIVIQPEPVPTPAFPTPTPVLTHGPCAAESEPALLIGSKQFGLSRNSHIAIAFDDTKVKNRLTIELEVRTEAESGLLFYMARINHADFATVQLRNGLPYFSYDLGSGDTHTMIPTKINDGQWHKIKIMRSKQEGILYVDGASNRTISPKKADILDVVGMLYVGGLPINYTTRRIGPVTYSIDGCVRNLHMAEAPADLEQPTSSFHVGTCFANAQRGTYFDGTGFAKAVGGFKVGLDLLVEFEFRTTTTTGVLLGISSQKMDGMGIEMIDEKLMFHVDNGAGRFTAVYDAGVPGHLCDGQWHKVTANKIKHRIELTVDGNQVEAQSPNPASTSADTNDPVFVGGFPDDLKQFGLTTSIPFRGCIRSLKLTKGTASHWRLILPRPWN

SEQ ID NO: 51086 - protein, 1724 aa, Homo sapiens
MPPAVRRSACSMGWLWIFGAALGQCLGYSSQQQRVPFLQPPGQSQLQASYVEFRPSQGCSPGYYRDHKGLYTGRCVPCNCNGHSNQCQDGSGICVNCQHNTAGEHCERCQEGYYGNAVHGSCRACPCPHTNSFATGCVVNGGDVRCSCKAGYTGTQCERCAPGYFGNPQKFGGSCQPCSCNSNGQLGSCHPLTGDCINQEPKDSSPAEECDDCDSCVMTLLNDLATMGEQLRLVKSQLQGLSASAGLLEQMRHMETQAKDLRNQLLNYRSAISNHGSKIEGLERELTDLNQEFETLQEKAQVNSRKAQTLNNNVNRATQSAKELDVKIKNVIRNVHILLKQISGTDGEGNNVPSGDFSREWAEAQRMMRELRNRNFGKHLREAEADKRESQLLLNRIRTWQKTHQGENNGLANSIRDSLNEYEAKLSDLRARLQEAAAQAKQANGLNQENERALGAIQRQVKEINSLQSDFTKYLTTADSSLLQTNIALQLMEKSQKEYEKLAASLNEARQELSDKVRELSRSAGKTSLVEEAEKHARSLQELAKQLEEIKRNASGDELVRCAVDAATAYENILNAIKAAEDAANRAASASESALQTVIKEDLPRKAKTLSSNSDKLLNEAKMTQKKLKQEVSPALNNLQQTLNIVTVQKEVIDTNLTTLRDGLHGIQRGDIDAMISSAKSMVRKANDITDEVLDGLNPIQTDVERIKDTYGRTQNEDFKKALTDADNSVNKLTNKLPDLWRKIESINQQLLPLGNISDNMDRIRELIQQARDAASKVAVPMRFNGKSGVEVRLPNDLEDLKGYTSLSLFLQRPNSRENGGTENMFVMYLGNKDASRDYIGMAVVDGQLTCVYNLGDREAELQVDQILTKSETKEAVMDRVKFQRIYQFARLNYTKGATSSKPETPGVYDMDGRNSNTLLNLDPENVVFYVGGYPPDFKLPSRLSFPPYKGCIELDDLNENVLSLYNFKKTFNLNTTEVEPCRRRKEESDKNYFEGTGYARVPTQPHAPIPTFGQTIQTTVDRGLLFFAENGDRFISLNIEDGKLMVRYKLNSELPKERGVGDAINNGRDHSIQIKIGKLQKRMWINVDVQNTIIDGEVFDFSTYYLGGIPIAIRERFNISTPAFRGCMKNLKKTSGVVRLNDTVGVTKKCSEDWKLVRSASFSRGGQLSFTDLGLPPTDHLQASFGFQTFQPSGILLDHQTWTRNLQVTLEDGYIELSTSDSGSPIFKSPQTYMDGLLHYVSVISDNSGLRLLIDDQLLRNSKRLKHISSSRQSLRLGGSNFEGCISNVFVQRLSLSPEVLDLTSNSLKRDVSLGGCSLNKPPFLMLLKGSTRFNKTKTFRINQLLQDTPVASPRSVKVWQDACSPLPKTQANHGALQFGDIPTSHLLFKLPQELLKPRSQFAVDMQTTSSRGLVFHTGTKNSFMALYLSKGRLVFALGTDGKKLRIKSKEKCNDGKWHTVVFGHDGEKGRLVVDGLRAREGSLPGNSTISIRAPVYLGSPPSGKPKSLPTNSFVGCLKNFQLDSKPLYTPSSSFGVSSCLGGPLEKGIYFSEEGGHVVLAHSVLLGPEFKLVFSIRPRSLTGILIHIGSQPGKHLCVYLEAGKVTASMDSGAGGTSTSVTPKQSLCDGQWHSVAVTIKQHILHLELDTDSSYTAGQIPFPPASTQEPLHLGGAPANLTTLRIPVWKSFFGCLRNIHVNHIPVPVTEALEVQGPVSLNGCPDQ

SEQ ID NO: 51087 - protein, 3333 aa, Homo sapiens
MAAAARPRGRALGPVLPPTPLLLLVLRVLPACGATARDPGAAAGLSLHPTYFNLAEAARIWATATCGERGPGEGRPQPELYCKLVGGPTAPGSGHTIQGQFCDYCNSEDPRKAHPVTNAIDGSERWWQSPPLSSGTQYNRVNLTLDLGQLFHVAYILIKFANSPRPDLWVLERSVDFGSTYSPWQYFAHSKVDCLKEFGREANMAVTRDDDVLCVTEYSRIVPLENGEVVVSLINGRPGAKNFTFSHTLREFTKATNIRLRFLRTNTLLGHLISKAQRDPTVTRRYYYSIKDISIGGQCVCNGHAEVCNINNPEKLFRCECQHHTCGETCDRCCTGYNQRRWRPAAWEQSHECEACNCHGHASNCYYDPDVERQQASLNTQGIYAGGGVCINCQHNTAGVNCEQCAKGYYRPYGVPVDAPDGCIPCSCDPEHADGCEQGSGRCHCKPNFHGDNCEKCAIGYYNFPFCLRIPIFPVSTPSSEDPVAGDIKGCDCNLEGVLPEICDAHGRCLCRPGVEGPRCDTCRSGFYSFPICQACWCSALGSYQMPCSSVTGQCECRPGVTGQRCDRCLSGAYDFPHCQGSSSACDPAGTINSNLGYCQCKLHVEGPTCSRCKLLYWNLDKENPSGCSECKCHKAGTVSGTGECRQGDGDCHCKSHVGGDSCDTCEDGYFALEKSNYFGCQGCQCDIGGALSSMCSGPSGVCQCREHVVGKVCQRPENNYYFPDLHHMKYEIEDGSTPNGRDLRFGFDPLAFPEFSWRGYAQMTSVQNDVRITLNVGKSSGSLFRVILRYVNPGTEAVSGHITIYPSWGAAQSKEIIFLPSKEPAFVTVPGNGFADPFSITPGIWVACIKAEGVLLDYLVLLPRDYYEASVLQLPVTEPCAYAGPPQENCLLYQHLPVTRFPCTLACEARHFLLDGEPRPVAVRQPTPAHPVMVDLSGREVELHLRLRIPQVGHYVVVVEYSTEAAQLFVVDVNVKSSGSVLAGQVNIYSCNYSVLCRSAVIDHMSRIAMYELLADADIQLKGHMARFLLHQVCIIPIEEFSAEYVRPQVHCIASYGRFVNQSATCVSLAHETPPTALILDVLSGRPFPHLPQQSSPSVDVLPGVTLKAPQNQVTLRGRVPHLGRYVFVIHFYQAAHPTFPAQVSVDGGWPRAGSFHASFCPHVLGCRDQVIAEGQIEFDISEPEVAATVKVPEGKSLVLVRVLVVPAENYDYQILHKKSMDKSLEFITNCGKNSFYLDPQTASRFCKNSARSLVAFYHKGALPCECHPTGATGPHCSPEGGQCPCQPNVIGRQCTRCATGHYGFPRCKPCSCGRRLCEEMTGQCRCPPRTVRPQCEVCETHSFSFHPMAGCEGCNCSRRGTIEAAMPECDRDSGQCRCKPRITGRQCDRCASGFYRFPECVPCNCNRDGTEPGVCDPGTGACLCKENVEGTECNVCREGSFHLDPANLKGCTSCFCFGVNNQCHSSHKRRTKFVDMLGWHLETADRVDIPVSFNPGSNSMVADLQELPATIHSASWVAPTSYLGDKVSSYGGYLTYQAKSFGLPGDMVLLEKKPDVQLTGQHMSIIYEETNTPRPDRLHHGRVHVVEGNFRHASSRAPVSREELMTVLSRLADVRIQGLYFTETQRLTLSEVGLEEASDTGSGRIALAVEICACPPAYAGDSCQGCSPGYYRDHKGLYTGRCVPCNCNGHSNQCQDGSGICVNCQHNTAGEHCERCQEGYYGNAVHGSCRACPCPHTNSFATGCVVNGGDVRCSCKAGYTGTQCERCAPGYFGNPQKFGGSCQPCSCNSNGQLGSCHPLTGDCINQEPKDSSPAEECDDCDSCVMTLLNDLATMGEQLRLVKSQLQGLSASAGLLEQMRHMETQAKDLRNQLLNYRSAISNHGSKIEGLERELTDLNQEFETLQEKAQVNSRKAQTLNNNVNRATQSAKELDVKIKNVIRNVHILLKQISGTDGEGNNVPSGDFSREWAEAQRMMRELRNRNFGKHLREAEADKRESQLLLNRIRTWQKTHQGENNGLANSIRDSLNEYEAKLSDLRARLQEAAAQAKQANGLNQENERALGAIQRQVKEINSLQSDFTKYLTTADSSLLQTNIALQLMEKSQKEYEKLAASLNEARQELSDKVRELSRSAGKTSLVEEAEKHARSLQELAKQLEEIKRNASGDELVRCAVDAATAYENILNAIKAAEDAANRAASASESALQTVIKEDLPRKAKTLSSNSDKLLNEAKMTQKKLKQEVSPALNNLQQTLNIVTVQKEVIDTNLTTLRDGLHGIQRGDIDAMISSAKSMVRKANDITDEVLDGLNPIQTDVERIKDTYGRTQNEDFKKALTDADNSVNKLTNKLPDLWRKIESINQQLLPLGNISDNMDRIRELIQQARDAASKVAVPMRFNGKSGVEVRLPNDLEDLKGYTSLSLFLQRPNSRENGGTENMFVMYLGNKDASRDYIGMAVVDGQLTCVYNLGDREAELQVDQILTKSETKEAVMDRVKFQRIYQFARLNYTKGATSSKPETPGVYDMDGRNSNTLLNLDPENVVFYVGGYPPDFKLPSRLSFPPYKGCIELDDLNENVLSLYNFKKTFNLNTTEVEPCRRRKEESDKNYFEGTGYARVPTQPHAPIPTFGQTIQTTVDRGLLFFAENGDRFISLNIEDGKLMVRYKLNSELPKERGVGDAINNGRDHSIQIKIGKLQKRMWINVDVQNTIIDGEVFDFSTYYLGGIPIAIRERFNISTPAFRGCMKNLKKTSGVVRLNDTVGVTKKCSEDWKLVRSASFSRGGQLSFTDLGLPPTDHLQASFGFQTFQPSGILLDHQTWTRNLQVTLEDGYIELSTSDSGSPIFKSPQTYMDGLLHYVSVISDNSGLRLLIDDQLLRNSKRLKHISSSRQSLRLGGSNFEGCISNVFVQRLSLSPEVLDLTSNSLKRDVSLGGCSLNKPPFLMLLKGSTRFNKTKTFRINQLLQDTPVASPRSVKVWQDACSPLPKTQANHGALQFGDIPTSHLLFKLPQELLKPRSQFAVDMQTTSSRGLVFHTGTKNSFMALYLSKGRLVFALGTDGKKLRIKSKEKCNDGKWHTVVFGHDGEKGRLVVDGLRAREGSLPGNSTISIRAPVYLGSPPSGKPKSLPTNSFVGCLKNFQLDSKPLYTPSSSFGVSSCLGGPLEKGIYFSEEGGHVVLAHSVLLGPEFKLVFSIRPRSLTGILIHIGSQPGKHLCVYLEAGKVTASMDSGAGGTSTSVTPKQSLCDGQWHSVAVTIKQHILHLELDTDSSYTAGQIPFPPASTQEPLHLGGAPANLTTLRIPVWKSFFGCLRNIHVNHIPVPVTEALEVQGPVSLNGCPDQ

SEQ ID NO: 51088 - protein, 3277 aa, Homo sapiens
MAAAARPRGRALGPVLPPTPLLLLVLRVLPACGATARDPGAAAGLSLHPTYFNLAEAARIWATATCGERGPGEGRPQPELYCKLVGGPTAPGSGHTIQGQFCDYCNSEDPRKAHPVTNAIDGSERWWQSPPLSSGTQYNRVNLTLDLGQLFHVAYILIKFANSPRPDLWVLERSVDFGSTYSPWQYFAHSKVDCLKEFGREANMAVTRDDDVLCVTEYSRIVPLENGEVVVSLINGRPGAKNFTFSHTLREFTKATNIRLRFLRTNTLLGHLISKAQRDPTVTRRYYYSIKDISIGGQCVCNGHAEVCNINNPEKLFRCECQHHTCGETCDRCCTGYNQRRWRPAAWEQSHECEACNCHGHASNCYYDPDVERQQASLNTQGIYAGGGVCINCQHNTAGVNCEQCAKGYYRPYGVPVDAPDGCIPCSCDPEHADGCEQGSGRCHCKPNFHGDNCEKCAIGYYNFPFCLRIPIFPVSTPSSEDPVAGDIKGCDCNLEGVLPEICDAHGRCLCRPGVEGPRCDTCRSGFYSFPICQACWCSALGSYQMPCSSVTGQCECRPGVTGQRCDRCLSGAYDFPHCQGSSSACDPAGTINSNLGYCQCKLHVEGPTCSRCKLLYWNLDKENPSGCSECKCHKAGTVSGTGECRQGDGDCHCKSHVGGDSCDTCEDGYFALEKSNYFGCQGCQCDIGGALSSMCSGPSGVCQCREHVVGKVCQRPENNYYFPDLHHMKYEIEDGSTPNGRDLRFGFDPLAFPEFSWRGYAQMTSVQNDVRITLNVGKSSGSLFRVILRYVNPGTEAVSGHITIYPSWGAAQSKEIIFLPSKEPAFVTVPGNGFADPFSITPGIWVACIKAEGVLLDYLVLLPRDYYEASVLQLPVTEPCAYAGPPQENCLLYQHLPVTRFPCTLACEARHFLLDGEPRPVAVRQPTPAHPVMVDLSGREVELHLRLRIPQVGHYVVVVEYSTEAAQLFVVDVNVKSSGSVLAGQVNIYSCNYSVLCRSAVIDHMSRIAMYELLADADIQLKGHMARFLLHQVCIIPIEEFSAEYVRPQVHCIASYGRFVNQSATCVSLAHETPPTALILDVLSGRPFPHLPQQSSPSVDVLPGVTLKAPQNQVTLRGRVPHLGRYVFVIHFYQAAHPTFPAQVSVDGGWPRAGSFHASFCPHVLGCRDQVIAEGQIEFDISEPEVAATVKVPEGKSLVLVRVLVVPAENYDYQILHKKSMDKSLEFITNCGKNSFYLDPQTASRFCKNSARSLVAFYHKGALPCECHPTGATGPHCSPEGGQCPCQPNVIGRQCTRCATGHYGFPRCKPCSCGRRLCEEMTGQCRCPPRTVRPQCEVCETHSFSFHPMAGCEGCNCSRRGTIEAAMPECDRDSGQCRCKPRITGRQCDRCASGFYRFPECVPCNCNRDGTEPGVCDPGTGACLCKENVEGTECNVCREGSFHLDPANLKGCTSCFCFGVNNQCHSSHKRRTKFVDMLGWHLETADRVDIPVSFNPGSNSMVADLQELPATIHSASWVAPTSYLGDKVSSYGGYLTYQAKSFGLPGDMVLLEKKPDVQLTGQHMSIIYEETNTPRPDRLHHGRVHVVEGNFRHASSRAPVSREELMTVLSRLADVRIQGLYFTETQRLTLSEVGLEEASDTGSGRIALAVEICACPPAYAGDSCQGCSPGYYRDHKGLYTGRCVPCNCNGHSNQCQDGSGICVNCQHNTAGEHCERCQEGYYGNAVHGSCRACPCPHTNSFATGCVVNGGDVRCSCKAGYTGTQCERCAPGYFGNPQKFGGSCQPCSCNSNGQLGSCHPLTGDCINQEPKDSSPAEECDDCDSCVMTLLNDLATMGEQLRLVKSQLQGLSASAGLLEQMRHMETQAKDLRNQLLNYRSAISNHGSKIEGLERELTDLNQEFETLQEKAQVNSRKAQTLNNNVNRATQSAKELDVKIKNVIRNVHMLNRIRTWQKTHQGENNGLANSIRDSLNEYEAKLSDLRARLQEAAAQAKQANGLNQENERALGAIQRQVKEINSLQSDFTKYLTTADSSLLQTNIALQLMEKSQKEYEKLAASLNEARQELSDKVRELSRSAGKTSLVEEAEKHARSLQELAKQLEEIKRNASGDELVRCAVDAATAYENILNAIKAAEDAANRAASASESALQTVIKEDLPRKAKTLSSNSDKLLNEAKMTQKKLKQEVSPALNNLQQTLNIVTVQKEVIDTNLTTLRDGLHGIQRGDIDAMISSAKSMVRKANDITDEVLDGLNPIQTDVERIKDTYGRTQNEDFKKALTDADNSVNKLTNKLPDLWRKIESINQQLLPLGNISDNMDRIRELIQQARDAASKVAVPMRFNGKSGVEVRLPNDLEDLKGYTSLSLFLQRPNSRENGGTENMFVMYLGNKDASRDYIGMAVVDGQLTCVYNLGDREAELQVDQILTKSETKEAVMDRVKFQRIYQFARLNYTKGATSSKPETPGVYDMDGRNSNTLLNLDPENVVFYVGGYPPDFKLPSRLSFPPYKGCIELDDLNENVLSLYNFKKTFNLNTTEVEPCRRRKEESDKNYFEGTGYARVPTQPHAPIPTFGQTIQTTVDRGLLFFAENGDRFISLNIEDGKLMVRYKLNSELPKERGVGDAINNGRDHSIQIKIGKLQKRMWINVDVQNTIIDGEVFDFSTYYLGGIPIAIRERFNISTPAFRGCMKNLKKTSGVVRLNDTVGVTKKCSEDWKLVRSASFSRGGQLSFTDLGLPPTDHLQASFGFQTFQPSGILLDHQTWTRNLQVTLEDGYIELSTSDSGSPIFKSPQTYMDGLLHYVSVISDNSGLRLLIDDQLLRNSKRLKHISSSRQSLRLGGSNFEGCISNVFVQRLSLSPEVLDLTSNSLKRDVSLGGCSLNKPPFLMLLKGSTRFNKTKTFRINQLLQDTPVASPRSVKVWQDACSPLPKTQANHGALQFGDIPTSHLLFKLPQELLKPRSQFAVDMQTTSSRGLVFHTGTKNSFMALYLSKGRLVFALGTDGKKLRIKSKEKCNDGKWHTVVFGHDGEKGRLVVDGLRAREGSLPGNSTISIRAPVYLGSPPSGKPKSLPTNSFVGCLKNFQLDSKPLYTPSSSFGVSSCLGGPLEKGIYFSEEGGHVVLAHSVLLGPEFKLVFSIRPRSLTGILIHIGSQPGKHLCVYLEAGKVTASMDSGAGGTSTSVTPKQSLCDGQWHSVAVTIKQHILHLELDTDSSYTAGQIPFPPASTQEPLHLGGAPANLTTLRIPVWKSFFGCLRNIHVNHIPVPVTEALEVQGPVSLNGCPDQ

SEQ ID NO: 51089 - protein, 1519 aa, Homo sapiens
MAAAARPRGRALGPVLPPTPLLLLVLRVLPACGATARDPGAAAGLSLHPTYFNLAEAARIWATATCGERGPGEGRPQPELYCKLVGGPTAPGSGHTIQGQFCDYCNSEDPRKAHPVTNAIDGSERWWQSPPLSSGTQYNRVNLTLDLGQLFHVAYILIKFANSPRPDLWVLERSVDFGSTYSPWQYFAHSKVDCLKEFGREANMAVTRDDDVLCVTEYSRIVPLENGEVVVSLINGRPGAKNFTFSHTLRVYQGNKHPLFLRTNTLLGHLISKAQRDPTVTRRYYYSIKDISIGGQCVCNGHAEVCNINNPEKLFRCECQHHTCGETCDRCCTGYNQRRWRPAAWEQSHECEACNCHGHASNCYYDPDVERQQASLNTQGIYAGGGVCINCQHNTAGVNCEQCAKGYYRPYGVPVDAPDGCIPCSCDPEHADGCEQGSGRCHCKPNFHGDNCEKCAIGYYNFPFCLRIPIFPVSTPSSEDPVAGDIKGCDCNLEGVLPEICDAHGRCLCRPGVEGPRCDTCRSGFYSFPICQACWCSALGSYQMPCSSVTGQCECRPGVTGQRCDRCLSGAYDFPHCQGSSSACDPAGTINSNLGYCQCKLHVEGPTCSRCKLLYWNLDKENPSGCSECKCHKAGTVSGTGECRQGDGDCHCKSHVGGDSCDTCEDGYFALEKSNYFGCQGCQCDIGGALSSMCSGPSGVCQCREHVVGKVCQRPENNYYFPDLHHMKYEIEDGSTPNGRDLRFGFDPLAFPEFSWRGYAQMTSVQNDVRITLNVGKSSGSLFRVILRYVNPGTEAVSGHITIYPSWGAAQSKEIIFLPSKEPAFVTVPGNGFADPFSITPGIWVACIKAEGVLLDYLVLLPRDYYEASVLQLPVTEPCAYAGPPQENCLLYQHLPVTRFPCTLACEARHFLLDGEPRPVAVRQPTPAHPVMVDLSGREVELHLRLRIPQVGHYVVVVEYSTEAAQLFVVDVNVKSSGSVLAGQVNIYSCNYSVLCRSAVIDHMSRIAMYELLADADIQLKGHMARFLLHQVCIIPIEEFSAEYVRPQVHCIASYGRFVNQSATCVSLAHETPPTALILDVLSGRPFPHLPQQSSPSVDVLPGVTLKAPQNQVTLRGRVPHLGRYVFVIHFYQAAHPTFPAQVSVDGGWPRAGSFHASFCPHVLGCRDQVIAEGQIEFDISEPEVAATVKVPEGKSLVLVRVLVVPAENYDYQILHKKSMDKSLEFITNCGKNSFYLDPQTASRFCKNSARSLVAFYHKGALPCECHPTGATGPHCSPEGGAHASPTSSGGSAPAVQQAYGFPRCKRKSCSCGRRLCEEMTGQCRCPPRTVRPQCEVCETHSFSFHPMAGCEGCNCSRRGTIEAAMPECDRDSGQCRCKPRITGRQCDRCASGFYRFPECVPCNCNRDGTEPGVCDPGTGACLCKENVEGTECNVCREGSFHLDPANLKGCTSCFCFGVNNQCHSSHKRRTKFVDMLGWHLETADRVDIPVSFNPGSNSMVADLQELPATIHSASWVAP

SEQ ID NO: 51090 - protein, 580 aa, Homo sapiens
MAAAARPRGRALGPVLPPTPLLLLVLRVLPACGATARDPGAAAGLSLHPTYFNLAEAARIWATATCGERGPGEGRPQPELYCKLVGGPTAPGSGHTIQGQFCDYCNSEDPRKAHPVTNAIDGSERWWQSPPLSSGTQYNRVNLTLDLGQLFHVAYILIKFANSPRPDLWVLERSVDFGSTYSPWQYFAHSKVDCLKEFGREANMAVTRDDDVLCVTEYSRIVPLENGEVVVSLINGRPGAKNFTFSHTLREFTKATNIRLRFLRTNTLLGHLISKAQRDPTVTRRYYYSIKDISIGGQCVCNGHAEVCNINNPEKLFRCECQHHTCGETCDRCCTGYNQRRWRPAAWEQSHECEACNCHGHASNCYYDPDVERQQASLNTQGIYAGGGVCINCQHNTAGVNCEQCAKGYYRPYGVPVDAPDGCIPCSCDPEHADGCEQGSGRCHCKPNFHGDNCEKCAIGYYNFPFCLRIPIFPVSTPSSEDPVAGDIKGNWCDCNLEGVLPEICDAHGRCLCRPGVEGPRCDTCRSGFYSFPICQGPSEKVAIYKPESRPSAETEPASTWILDFPASRTGEINFYCLSP

SEQ ID NO: 51091 - protein, 1668 aa, Homo sapiens
MPPAVRRSACSMGWLWIFGAALGQCLGYSSQQQRVPFLQPPGQSQLQASYVEFRPSQGCSPGYYRDHKGLYTGRCVPCNCNGHSNQCQDGSGICVNCQHNTAGEHCERCQEGYYGNAVHGSCRACPCPHTNSFATGCVVNGGDVRCSCKAGYTGTQCERCAPGYFGNPQKFGGSCQPCSCNSNGQLGSCHPLTGDCINQEPKDSSPAEECDDCDSCVMTLLNDLATMGEQLRLVKSQLQGLSASAGLLEQMRHMETQAKDLRNQLLNYRSAISNHGSKIEGLERELTDLNQEFETLQEKAQVNSRKAQTLNNNVNRATQSAKELDVKIKNVIRNVHMLNRIRTWQKTHQGENNGLANSIRDSLNEYEAKLSDLRARLQEAAAQAKQANGLNQENERALGAIQRQVKEINSLQSDFTKYLTTADSSLLQTNIALQLMEKSQKEYEKLAASLNEARQELSDKVRELSRSAGKTSLVEEAEKHARSLQELAKQLEEIKRNASGDELVRCAVDAATAYENILNAIKAAEDAANRAASASESALQTVIKEDLPRKAKTLSSNSDKLLNEAKMTQKKLKQEVSPALNNLQQTLNIVTVQKEVIDTNLTTLRDGLHGIQRGDIDAMISSAKSMVRKANDITDEVLDGLNPIQTDVERIKDTYGRTQNEDFKKALTDADNSVNKLTNKLPDLWRKIESINQQLLPLGNISDNMDRIRELIQQARDAASKVAVPMRFNGKSGVEVRLPNDLEDLKGYTSLSLFLQRPNSRENGGTENMFVMYLGNKDASRDYIGMAVVDGQLTCVYNLGDREAELQVDQILTKSETKEAVMDRVKFQRIYQFARLNYTKGATSSKPETPGVYDMDGRNSNTLLNLDPENVVFYVGGYPPDFKLPSRLSFPPYKGCIELDDLNENVLSLYNFKKTFNLNTTEVEPCRRRKEESDKNYFEGTGYARVPTQPHAPIPTFGQTIQTTVDRGLLFFAENGDRFISLNIEDGKLMVRYKLNSELPKERGVGDAINNGRDHSIQIKIGKLQKRMWINVDVQNTIIDGEVFDFSTYYLGGIPIAIRERFNISTPAFRGCMKNLKKTSGVVRLNDTVGVTKKCSEDWKLVRSASFSRGGQLSFTDLGLPPTDHLQASFGFQTFQPSGILLDHQTWTRNLQVTLEDGYIELSTSDSGSPIFKSPQTYMDGLLHYVSVISDNSGLRLLIDDQLLRNSKRLKHISSSRQSLRLGGSNFEGCISNVFVQRLSLSPEVLDLTSNSLKRDVSLGGCSLNKPPFLMLLKGSTRFNKTKTFRINQLLQDTPVASPRSVKVWQDACSPLPKTQANHGALQFGDIPTSHLLFKLPQELLKPRSQFAVDMQTTSSRGLVFHTGTKNSFMALYLSKGRLVFALGTDGKKLRIKSKEKCNDGKWHTVVFGHDGEKGRLVVDGLRAREGSLPGNSTISIRAPVYLGSPPSGKPKSLPTNSFVGCLKNFQLDSKPLYTPSSSFGVSSCLGGPLEKGIYFSEEGGHVVLAHSVLLGPEFKLVFSIRPRSLTGILIHIGSQPGKHLCVYLEAGKVTASMDSGAGGTSTSVTPKQSLCDGQWHSVAVTIKQHILHLELDTDSSYTAGQIPFPPASTQEPLHLGGAPANLTTLRIPVWKSFFGCLRNIHVNHIPVPVTEALEVQGPVSLNGCPDQ

SEQ ID NO: 51092 - protein, 1823 aa, Homo sapiens
MALSSAWRSVLPLWLLWSAACSRAASGDDNAFPFDIEGSSAVGRQDPPETSEPRVALGRLPPAAEKCNAGFFHTLSGECVPCDCNGNSNECLDGSGYCVHCQRNTTGEHCEKCLDGYIGDSIRGAPQFCQPCPCPLPHLANFAESCYRKNGAVRCICNENYAGPNCERCAPGYYGNPLLIGSTCKKCDCSGNSDPNLIFEDCDEVTGQCRNCLRNTTGFKCERCAPGYYGDARIAKNCAVCNCGGGPCDSVTGECLEEGFEPPTGMDCPTISCDKCVWDLTDALRLAALSIEEGKSGVLSVSSGAAAHRHVNEINATIYLLKTKLSERENQYALRKIQINNAENTMKSLLSDVEELVEKENQASRKGQLVQKESMDTINHASQLVEQAHDMRDKIQEINNKMLYYGEEHELSPKEISEKLVLAQKMLEEIRSRQPFFTQRELVDEEADEAYELLSQAESWQRLHNETRTLFPVVLEQLDDYNAKLSDLQEALDQALNYVRDAEDMNRATAARQRDHEKQQERVREQMEVVNMSLSTSADSLTTPRLTLSELDDIIKNASGIYAEIDGAKSELQVKLSNLSNLSHDLVQEAIDHAQDLQQEANELSRKLHSSDMNGLVQKALDASNVYENIVNYVSEANETAEFALNTTDRIYDAVSGIDTQIIYHKDESENLLNQARELQAKAESSSDEAVADTSRRVGGALARKSALKTRLSDAVKQLQAAERGDAQQRLGQSRLITEEANRTTMEVQQATAPMANNLTNWSQNLQHFDSSAYNTAVNSARDAVRNLTEVVPQLLDQLRTVEQKRPASNVSASIQRIRELIAQTRSVASKIQVSMMFDGQSAVEVHSRTSMDDLKAFTSLSLYMKPPVKRPELTETADQFILYLGSKNAKKEYMGLAIKNDNLVYVYNLGTKDVEIPLDSKPVSSWPAYFSIVKIERVGKHGKVFLTVPSLSSTAEEKFIKKGEFSGDDSLLDLDPEDTVFYVGGVPSNFKLPTSLNLPGFVGCLELATLNNDVISLYNFKHIYNMDPSTSVPCARDKLAFTQSRAASYFFDGSGYAVVRDITRRGKFGQVTRFDIEVRTPADNGLILLMVNGSMFFRLEMRNGYLHVFYDFGFSGGPVHLEDTLKKAQINDAKYHEISIIYHNDKKMILVVDRRHVKSMDNEKMKIPFTDIYIGGAPPEILQSRALRAHLPLDINFRGCMKGFQFQKKDFNLLEQTETLGVGYGCPEDSLISRRAYFNGQSFIASIQKISFFDGFEGGFNFRTLQPNGLLFYYASGSDVFSISLDNGTVIMDVKGIKVQSVDKQYNDGLSHFVISSVSPTRYELIVDKSRVGSKNPTKGKIEQTQASEKKFYFGGSPISAQYANFTGCISNAYFTRVDRDVEVEDFQRYTEKVHTSLYECPIESSPLFLLHKKGKNLSKPKASQNKKGGKSKDAPSWDPVALKLPERNTPRNSHCHLSNSPRAIEHAYQYGGTANSRQEFEHLKGDFGAKSQFSIRLRTRSSHGMIFYVSDQEENDFMTLFLAHGRLVYMFNVGHKKLKIRSQEKYNDGLWHDVIFIRERSSGRLVIDGLRVLEESLPPTEATWKIKGPIYLGGVAPGKAVKNVQINSIYSFSGCLSNLQLNGASITSASQTFSVTPCFEGPMETGTYFSTEGGYVVLDESFNIGLKFEIAFEVRPRSSSGTLVHGHSVNGEYLNVHMKNGQVIVKVNNGIRDFSTSVTPKQSLCDGRWHRITVIRDSNVVQLDVDSEVNHVVGPLNPKPIDHREPVFVGGVPESLLTPRLAPSKPFTGCIRHFVIDGHPVSFSKAALVSGAVSINSCPAA

SEQ ID NO: 51093 - protein, 88 aa, Homo sapiens
MALSSAWRSVLPLWLLWSAACSRAASGDDNAFPFDIEGSSAVGRQDPPETSEPRVALGRLPPAAEKCNAGFFHTLSGECVPCDCNGNS

SEQ ID NO: 51094 - protein, 120 aa, Homo sapiens
MALSSAWRSVLPLWLLWSAACSRAASGDDNAFPFDIEGSSAVGRQDPPETSEPRVALGRLPPAAEVQCPCHCHPAGAPAPPRAVPHSSFSLSPPLSSPQCLESFTWARSVRKLEIKSFPL

SEQ ID NO: 51095 - protein, 182 aa, Homo sapiens
MALSSAWRSVLPLWLLWSAACSRAASGDDNAFPFDIEGSSAVGRQDPPETSEPRVALGRLPPAAEKCNAGFFHTLSGECVPCDCNGNSNECLDGSGYCVHCQRNTTGEHCEKCLDGYIGDSIRGAPQFCQPCPCPLPHLANFAESCYRKNGAVRCICNENYAGPNCERPSPQSTRGFPLNDS

SEQ ID NO: 51096 - protein, 178 aa, Homo sapiens
  VARIANT 1: note = MOD_RES - Any amino acid
XIFEDCDEVTGQCRNCLRNTTGFKCERCAPGYYGDARIAKNCAVCNCGGGPCDSVTGECLEEGFEPPTGMDCPTISCDKCVWDLTDALRLAALSIEEGKSGVLSVSSGAAAHRHVNEINATIYLLKTKLSERENQYALRKIQINNAENTMKSLLSDVEELVEKHWNKPRRRLELQEGV

SEQ ID NO: 51097 - protein, 1816 aa, Homo sapiens
MALSSAWRSVLPLWLLWSAACSRAASGDDNAFPFDIEGSSAVGRQDPPETSEPRVALGRLPPAAEKCNAGFFHTLSGECVPCDCNGNSNECLDGSGYCVHCQRNTTGEHCEKCLDGYIGDSIRGAPQFCQPCPCPLPHLANFAESCYRKNGAVRCICNENYAGPNCERCAPGYYGNPLLIGSTCKKCDCSGNSDPNLIFEDCDEVTGQCRNCLRNTTGFKCERCAPGYYGDARIAKNCAVCNCGGGPCDSVTGECLEEGFEPPTGCDKCVWDLTDALRLAALSIEEGKSGVLSVSSGAAAHRHVNEINATIYLLKTKLSERENQYALRKIQINNAENTMKSLLSDVEELVEKENQASRKGQLVQKESMDTINHASQLVEQAHDMRDKIQEINNKMLYYGEEHELSPKEISEKLVLAQKMLEEIRSRQPFFTQRELVDEEADEAYELLSQAESWQRLHNETRTLFPVVLEQLDDYNAKLSDLQEALDQALNYVRDAEDMNRATAARQRDHEKQQERVREQMEVVNMSLSTSADSLTTPRLTLSELDDIIKNASGIYAEIDGAKSELQVKLSNLSNLSHDLVQEAIDHAQDLQQEANELSRKLHSSDMNGLVQKALDASNVYENIVNYVSEANETAEFALNTTDRIYDAVSGIDTQIIYHKDESENLLNQARELQAKAESSSDEAVADTSRRVGGALARKSALKTRLSDAVKQLQAAERGDAQQRLGQSRLITEEANRTTMEVQQATAPMANNLTNWSQNLQHFDSSAYNTAVNSARDAVRNLTEVVPQLLDQLRTVEQKRPASNVSASIQRIRELIAQTRSVASKIQVSMMFDGQSAVEVHSRTSMDDLKAFTSLSLYMKPPVKRPELTETADQFILYLGSKNAKKEYMGLAIKNDNLVYVYNLGTKDVEIPLDSKPVSSWPAYFSIVKIERVGKHGKVFLTVPSLSSTAEEKFIKKGEFSGDDSLLDLDPEDTVFYVGGVPSNFKLPTSLNLPGFVGCLELATLNNDVISLYNFKHIYNMDPSTSVPCARDKLAFTQSRAASYFFDGSGYAVVRDITRRGKFGQVTRFDIEVRTPADNGLILLMVNGSMFFRLEMRNGYLHVFYDFGFSGGPVHLEDTLKKAQINDAKYHEISIIYHNDKKMILVVDRRHVKSMDNEKMKIPFTDIYIGGAPPEILQSRALRAHLPLDINFRGCMKGFQFQKKDFNLLEQTETLGVGYGCPEDSLISRRAYFNGQSFIASIQKISFFDGFEGGFNFRTLQPNGLLFYYASGSDVFSISLDNGTVIMDVKGIKVQSVDKQYNDGLSHFVISSVSPTRYELIVDKSRVGSKNPTKGKIEQTQASEKKFYFGGSPISAQYANFTGCISNAYFTRVDRDVEVEDFQRYTEKVHTSLYECPIESSPLFLLHKKGKNLSKPKASQNKKGGKSKDAPSWDPVALKLPERNTPRNSHCHLSNSPRAIEHAYQYGGTANSRQEFEHLKGDFGAKSQFSIRLRTRSSHGMIFYVSDQEENDFMTLFLAHGRLVYMFNVGHKKLKIRSQEKYNDGLWHDVIFIRERSSGRLVIDGLRVLEESLPPTEATWKIKGPIYLGGVAPGKAVKNVQINSIYSFSGCLSNLQLNGASITSASQTFSVTPCFEGPMETGTYFSTEGGYVVLDESFNIGLKFEIAFEVRPRSSSGTLVHGHSVNGEYLNVHMKNGQVIVKVNNGIRDFSTSVTPKQSLCDGRWHRITVIRDSNVVQLDVDSEVNHVVGPLNPKPIDHREPVFVGGVPESLLTPRLAPSKPFTGCIRHFVIDGHPVSFSKAALVSGAVSINSCPAA

SEQ ID NO: 51098 - protein, 1816 aa, Homo sapiens; identical to SEQ ID NO: 51097

SEQ ID NO: 51099 - protein, 129 aa, Homo sapiens
MALSSAWRSVLPLWLLWSAACSRAASGDDNAFPFDIEGSSAVGRQDPPETSEPRVALGRLPPAAEKCNAGFFHTLSGECVPCDCNGNSNECLDGSGYCVTTDGEDPGFSASALSFILSSQGAREARAPT

SEQ ID NO: 51100 - protein, 120 aa, Homo sapiens; identical to SEQ ID NO: 51094

SEQ ID NO: 51101 - protein, 374 aa, Homo sapiens
MALSSAWRSVLPLWLLWSAACSRAASGDDNAFPFDIEGSSAVGRQDPPETSEPRVALGRLPPAAEKCNAGFFHTLSGECVPCDCNGNSNECLDGSGYCVHCQRNTTGEHCEKCLDGYIGDSIRGAPQFCQPCPCPLPHLANFAESCYRKNGAVRCICNENYAGPNCERCAPGYYGNPLLIGSTCKKCDCSGNSDPNLIFEDCDEVTGQCRNCLRNTTGFKCERCAPGYYGDARIAKNCAVCNCGGGPCDSVTGECLEEGFEPPTGMDCPTISCDKCVWDLTDALRLAALSIEEGKSGVLSVSSGAAAHRHVNEINATIYLLKTKLSERENQYALRKIQINNAENTMKSLLSDVEELVEKHWNKPRRRLELQEGV

SEQ ID NO: 51102 - protein, 120 aa, Homo sapiens; identical to SEQ ID NO: 51094

SEQ ID NO: 51103 - protein, 107 aa, Homo sapiens
MALSSAWRSVLPLWLLWSAACSRAASGDDNAFPFDIEGSSAVGRQDPPETSEPRVALGRLPPAAEKCNAGFFHTLSGECVPCDCNGNSNECLDGSGYCVHCQRNTTG

SEQ ID NO: 51104 - protein, 331 aa, Homo sapiens
MALSSAWRSVLPLWLLWSAACSRAASGDDNAFPFDIEGSSAVGRQDPPETSEPRVALGRLPPAAEKCNAGFFHTLSGECVPCDCNGNSNECLDGSGYCVHCQRNTTGEHCEKCLDGYIGDSIRGAPQFCQPCPCPLPHLANFAESCYRKNGAVRCICNENYAGPNCERCAPGYYGNPLLIGSTCKKCDCSGNSDPNLIFEDCDEVTGQCRNCLRNTTGFKCERCAPGYYGDARIAKNCAVCNCGGGPCDSVTGECLEEGFEPPTGMDCPTISCDKCVWDLTDALRLAALSIEEGKSGVLSVSSGAAAHRHVNEINATIYLLKTKLSERENQ

SEQ ID NO: 51105 - protein, 81 aa, Homo sapiens
MALSSAWRSVLPLWLLWSAACSRAASGDDNAFPFDIEGSSAVGRQDPPETSEPRVALGRLPPAAEKCNAGFFHTLSGECVP

SEQ ID NO: 51106 - protein, 1816 aa, Homo sapiens; identical to SEQ ID NO: 51097

SEQ ID NO: 51107 - protein, 324 aa, Homo sapiens
MALSSAWRSVLPLWLLWSAACSRAASGDDNAFPFDIEGSSAVGRQDPPETSEPRVALGRLPPAAEKCNAGFFHTLSGECVPCDCNGNSNECLDGSGYCVHCQRNTTGEHCEKCLDGYIGDSIRGAPQFCQPCPCPLPHLANFAESCYRKNGAVRCICNENYAGPNCERCAPGYYGNPLLIGSTCKKCDCSGNSDPNLIFEDCDEVTGQCRNCLRNTTGFKCERCAPGYYGDARIAKNCAVCNCGGGPCDSVTGECLEEGFEPPTGCDKCVWDLTDALRLAALSIEEGKSGVLSVSSGAAAHRHVNEINATIYLLKKTKQKNNKK

SEQ ID NO: 51108 - protein, 3695 aa, Homo sapiens
MAKRLCAGSALCVRGPRGPAPLLLVGLALLGAARAREEAGGGFSLHPPYFNLAEGARIAASATCGEEAPARGSPRPTEDLYCKLVGGPVAGGDPNQTIRGQYCDICTAANSNKAHPASNAIDGTERWWQSPPLSRGLEYNEVNVTLDLGQVFHVAYVLIKFANSPRPDLWVLERSMDFGRTYQPWQFFASSKRDCLERFGPQTLERITRDDAAICTTEYSRIVPLENGEIVVSLVNGRPGAMNFSYSPLLREFTKATNVRLRFLRTNTLLGHLMGKALRDPTVTRRYYYSIKDISIGGRCVCHGHADACDAKDPTDPFRLQCTCQHNTCGGTCDRCCPGFNQQPWKPATANSANECQSCNCYGHATDCYYDPEVDRRRASQSLDGTYQGGGVCIDCQHHTTGVNCERCLPGFYRSPNHPLDSPHVCRRCNCESDFTDGTCEDLTGRCYCRPNFSGERCDVCAEGFTGFPSCYPTPSSSNDTREQVLPAGQIVNCDCSAAGTQGNACRKDPRVGRCLCKPNFQGTHCELCAPGFYGPGCQPCQCSSPGVADDRCDPDTGQCRCRVGFEGATCDRCAPGYFHFPLCQLCGCSPAGTLPEGCDEAGRCLCQPEFAGPHCDRCRPGYHGFPNCQACTCDPRGALDQLCGAGGLCRCRPGYTGTACQECSPGFHGFPSCVPCHCSAEGSLHAACDPRSGQCSCRPRVTGLRCDTCVPGAYNFPYCEAGSCHPAGLAPVDPALPEAQVPCMCRAHVEGPSCDRCKPGFWGLSPSNPEGCTRCSCDLRGTLGGVAECQPGTGQCFCKPHVCGQACASCKDGFFGLDQADYFGCRSCRCDIGGALGQSCEPRTGVCRCRPNTQGPTCSEPARDHYLPDLHHLRLELEEAATPEGHAVRFGFNPLEFENFSWRGYAQMAPVQPRIVARLNLTSPDLFWLVFRYVNRGAMSVSGRVSVREEGRSATCANCTAQSQPVAFPPSTEPAFITVPQRGFGEPFVLNPGTWALRVEAEGVLLDYVVLLPSAYYEAALLQLRVTEACTYRPSAQQSGDNCLLYTHLPLDGFPSAAGLEALCRQDNSLPRPCPTEQLSPSHPPLITCTGSDVDVQLQVAVPQPGRYALVVEYANEDARQEVGVAVHTPQRAPQQGLLSLHPCLYSTLCRGTARDTQDHLAVFHLDSEASVRLTAEQARFFLHGVTLVPIEEFSPEFVEPRVSCISSHGAFGPNSAACLPSRFPKPPQPIILRDCQVIPLPPGLPLTHAQDLTPAMSPAGPRPRPPTAVDPDAEPTLLREPQATVVFTTHVPTLGRYAFLLHGYQPAHPTFPVEVLINAGRVWQGHANASFCPHGYGCRTLVVCEGQALLDVTHSELTVTVRVPKGRWLWLDYVLVVPENVYSFGYLREEPLDKSYDFISHCAAQGYHISPSSSSLFCRNAAASLSLFYNNGARPCGCHEVGATGPTCEPFGGQCPCHAHVIGRDCSRCATGYWGFPNCRPCDCGARLCDELTGQCICPPRTIPPDCLLCQPQTFGCHPLVGCEECNCSGPGIQELTDPTCDTDSGQCKCRPNVTGRRCDTCSPGFHGYPRCRPCDCHEAGTAPGVCDPLTGQCYCKENVQGPKCDQCSLGTFSLDAANPKGCTRCFCFGATERCRSSSYTRQEFVDMEGWVLLSTDRQVVPHERQPGTEMLRADLRHVPEAVPEAFPELYWQAPPSYLGDRVSSYGGTLRYELHSETQRGDVFVPMESRPDVVLQGNQMSITFLEPAYPTPGHVHRGQLQLVEGNFRHTETRNTVSREELMMVLASLEQLQIRALFSQISSAVFLRRVALEVASPAGQGALASNVELCLCPASYRGDSCQECAPGFYRDVKGLFLGRCVPCQCHGHSDRCLPGSGVCVDCQHNTEGAHCERCQAGFVSSRDDPSAPCVSCPCPLSVPSNNFAEGCVLRGGRTQCLCKPGYAGASCERCAPGFFGNPLVLGSSCQPCDCSGNGDPNLLFSDCDPLTGACRGCLRHTTGPRCEICAPGFYGNALLPGNCTRCDCTPCGTEACDPHSGHCLCKAGVTGRRCDRCQEGHFGFDGCGGCRPCACGPAAEGSECHPQSGQCHCRPGTMGPQCRECAPGYWGLPEQGCRRCQCPGGRCDPHTGRCNCPPGLSGERCDTCSQQHQVPVPGGPVGHSIHCEVCDHCVVLLLDDLERAGALLPAIHEQLRGINASSMAWARLHRLNASIADLQSQLRSPLGPRHETAQQLEVLEQQSTSLGQDARRLGGQAVGTRDQASQLLAGTEATLGHAKTLLAAIRAVDRTLSELMSQTGHLGLANASAPSGEQLLRTLAEVERLLWEMRARDLGAPQAAAEAELAAAQRLLARVQEQLSSLWEENQALATQTRDRLAQHEAGLMDLREALNRAVDATREAQELNSRNQERLEEALQRKQELSRDNATLQATLHAARDTLASVFRLLHSLDQAKEELERLAASLDGARTPLLQRMQTFSPAGSKLRLVEAAEAHAQQLGQLALNLSSIILDVNQDRLTQRAIEASNAYSRILQAVQAAEDAAGQALQQADHTWATVVRQGLVDRAQQLLANSTALEEAMLQEQQRLGLVWAALQGARTQLRDVRAKKDQLEAHIQAAQAMLAMDTDETSKKIAHAKAVAAEAQDTATRVQSQLQAMQENVERWQGQYEGLRGQDLGQAVLDAGHSVSTLEKTLPQLLAKLSILENRGVHNASLALSASIGRVRELIAQARGAASKVKVPMKFNGRSGVQLRTPRDLADLAAYTALKFYLQGPEPEPGQGTEDRFVMYMGSRQATGDYMGVSLRDKKVHWVYQLGEAGPAVLSIDEDIGEQFAAVSLDRTLQFGHMSVTVERQMIQETKGDTVAPGAEGLLNLRPDDFVFYVGGYPSTFTPPPLLRFPGYRGCIEMDTLNEEVVSLYNFERTFQLDTAVDRPCARSKSTGDPWLTDGSYLDGTGFARISFDSQISTTKRFEQELRLVSYSGVLFFLKQQSQFLCLAVQEGSLVLLYDFGAGLKKAVPLQPPPPLTSASKAIQVFLLGGSRKRVLVRVERATVYSVEQDNDLELADAYYLGGVPPDQLPPSLRRLFPTGGSVRGCVKGIKALGKYVDLKRLNTTGVSAGCTADLLVGRAMTFHGHGFLRLALSNVAPLTGNVYSGFGFHSAQDSALLYYRASPDGLCQVSLQQGRVSLQLLRTEVKTQAGFADGAPHYVAFYSNATGVWLYVDDQLQQMKPHRGPPPELQPQPEGPPRLLLGGLPESGTIYNFSGCISNVFVQRLLGPQRVFDLQQNLGSVNVSTGCAPALQAQTPGLGPRGLQATARKASRRSRQPARHPACMLPPHLRTTRDSYQFGGSLSSHLEFVGILARHRNWPSLSMHVLPRSSRGLLLFTARLRPGSPSLALFLSNGHFVAQMEGLGTRLRAQSRQRSRPGRWHKVSVRWEKNRILLVTDGARAWSQEGPHRQHQGAEHPQPHTLFVGGLPASSHSSKLPVTVGFSGCVKRLRLHGRPLGAPTRMAGVTPCILGPLEAGLFFPGSGGVITLDLPGATLPDVGLELEVRPLAVTGLIFHLGQARTPPYLQLQVTEKQVLLRADDGAGEFSTSVTRPSVLCDGQWHRLAVMKSGNVLRLEVDAQSNHTVGPLLAAAAGAPAPLYLGGLPEPMAVQPWPPAYCGCMRRLAVNRSPVAMTRSVEVHGAVGASGCPAA

SEQ ID NO: 51109 - protein, 500 aa, Homo sapiens
MAKRLCAGSALCVRGPRGPAPLLLVGLALLGAARAREEAGGGFSLHPPYFNLAEGARIAASATCGEEAPARGSPRPTEDLYCKLVGGPVAGGDPNQTIRGQYCDICTAANSNKAHPASNAIDGTERWWQSPPLSRGLEYNEVNVTLDLGQVFHVAYVLIKFANSPRPDLWVLERSMDFGRTYQPWQFFASSKRDCLERFGPQTLERITRDDAAICTTEYSRIVPLENGEIVVSLVNGRPGAMNFSYSPLLREFTKATNVRLRFLRTNTLLGHLMGKALRDPTVTRRYYYSIKDISIGGRCVCHGHADACDAKDPTDPFRLQCTCQHNTCGGTCDRCCPGFNQQPWKPATANSANECQSCNCYGHATDCYYDPEVDRRRASQSLDGTYQGGGVCIDCQHHTTGVNCERCLPGFYRSPNHPLDSPHVCRRCNCESDFTDGTCEDLTGRCYCRPNFSGERCDVCAEGFTGFPSCYPTPSSSNDTREQVLPAGQIVTNTKISWV

SEQ ID NO: 51110 - protein, 528 aa, Homo sapiens
MAKRLCAGSALCVRGPRGPAPLLLVGLALLGAARAREEAGGGFSLHPPYFNLAEGARIAASATCGEEAPARGSPRPTEDLYCKLVGGPVAGGDPNQTIRGQYCDICTAANSNKAHPASNAIDGTERWWQSPPLSRGLEYNEVNVTLDLGQVFHVAYVLIKFANSPRPDLWVLERSMDFGRTYQPWQFFASSKRDCLERFGPQTLERITRDDAAICTTEYSRIVPLENGEIVVSLVNGRPGAMNFSYSPLLREFTKATNVRLRFLRTNTLLGHLMGKALRDPTVTRRYYYSIKDISIGGRCVCHGHADACDAKDPTDPFRLQCTCQHNTCGGTCDRCCPGFNQQPWKPATANSANECQSCNCYGHATDCYYDPEVDRRRASQSLDGTYQGGGVCIDCQHHTTGVNCERCLPGFYRSPNHPLDSPHVCRRCNCESDFTDGTCEDLTGRCYCRPNFSGERCDVCAEGFTGFPSCYPTPSSSNDTREQVLPAGQIVNGVSLCRPGWSAVARSRLTSTSASWVQAILLPQSPE

SEQ ID NO: 51111 - protein, 1786 aa, Homo sapiens
MGLLQLLAFSFLALCRARVRAQEPEFSYGCAEGSCYPATGDLLIGRAQKLSVTSTCGLHKPEPYCIVSHLQEDKKCFICNSQDPYHETLNPDSHLIENVVTTFAPNRLKIWWQSENGVENVTIQLDLEAEFHFTHLIMTFKTFRPAAMLIERSSDFGKTWGVYRYFAYDCEASFPGISTGPMKKVDDIICDSRYSDIEPSTEGEVIFRALDPAFKIEDPYSPRIQNLLKITNLRIKFVKLHTLGDNLLDSRMEIREKYYYAVYDMVVRGNCFCYGHASECAPVDGFNEEVEGMVHGHCMCRHNTKGLNCELCMDFYHDLPWRPAEGRNSNACKKCNCNEHSISCHFDMAVYLATGNVSGGVCDDCQHNTMGRNCEQCKPFYYQHPERDIRDPNFCERCTCDPAGSQNEGICDSYTDFSTGLIAGQCRCKLNVEGEHCDVCKEGFYDLSSEDPFGCKSCACNPLGTIPGGNPCDSETGHCYCKRLVTGQHCDQCLPEHWGLSNDLDGCRPCDCDLGGALNNSCFAESGQCSCRPHMIGRQCNEVEPGYYFATLDHYLYEAEEANLGPGVSIVERQYIQDRIPSWTGAGFVRVPEGAYLEFFIDNIPYSMEYDILIRYEPQLPDHWEKAVITVQRPGRIPTSSRCGNTIPDDDNQVVSLSPGSRYVVLPRPVCFEKGTNYTVRLELPQYTSSDSDVESPYTLIDSLVLMPYCKSLDIFTVGGSGDGVVTNSAWETFQRYRCLENSRSVVKTPMTDVCRNIIFSISALLHQTGLACECDPQGSLSSVCDPNGGQCQCRPNVVGRTCNRCAPGTFGFGPSGCKPCECHLQGSVNAFCNPVTGQCHCFQGVYARQCDRCLPGHWGFPSCQPCQCNGHADDCDPVTGECLNCQDYTMGHNCERCLAGYYGDPIIGSGDHCRPCPCPDGPDSGRQFARSCYQDPVTLQLACVCDPGYIGSRCDDCASGYFGNPSEVGGSCQPCQCHNNIDTTDPEACDKETGRCLKCLYHTEGEHCQFCRFGYYGDALQQDCRKCVCNYLGTVQEHCNGSDCQCDKATGQCLCLPNVIGQNCDRCAPNTWQLASGTGCDPCNCNAAHSFGPSCNEFTGQCQCMPGFGGRTCSECQELFWGDPDVECRACDCDPRGIETPQCDQSTGQCVCVEGVEGPRCDKCTRGYSGVFPDCTPCHQCFALWDVIIAELTNRTHRFLEKAKALKISGVIGPYRETVDSVERKVSEIKDILAQSPAAEPLKNIGNLFEEAEKLIKDVTEMMAQVEVKLSDTTSQSNSTAKELDSLQTEAESLDNTVKELAEQLEFIKNSDIRGALDSITKYFQMSLEAEERVNASTTEPNSTVEQSALMRDRVEDVMMERESQFKEKQEEQARLLDELAGKLQSLDLSAAAEMTCGTPPGASCSETECGGPNCRTDEGERKCGGPGCGGLVTVAHNAWQKAMDLDQDVLSALAEVEQLSKMVSEAKLRADEAKQSAEDILLKTNATKEKMDKSNEELRNLIKQIRNFLTQDSADLDSIEAVANEVLKMEMPSTPQQLQNLTEDIRERVESLSQVEVILQHSAADIARAEMLLEEAKRASKSATDVKVTADMVKEALEEAEKAQVAAEKAIKQADEDIQGTQNLLTSIESETAASEETLFNASQRISELERNVEELKRKAAQNSGEAEYIEKVVYTVKQSAEDVKKTLDGELDEKYKKVENLIAKKTEESADARRKAEMLQNEAKTLLAQANSKLQLLKDLERKYEDNQRYLEDKAQELARLEGEVRSLLKDISQKVAVYSTCL

SEQ ID NO: 51112 - protein, 91 aa, Homo sapiens
MGLLQLLAFSFLALCRARVRAQEPEFSYGCAEGSCYPATGDLLIGRAQKLSVTSTCGLHKPEPYCIVSHLQEDKKCFICNSQDPYHETLNP

SEQ ID NO: 51113 - protein, 850 aa, Homo sapiens
MGLLQLLAFSFLALCRARVRAQEPEFSYGCAEGSCYPATGDLLIGRAQKLSVTSTCGLHKPEPYCIVSHLQEDKKCFICNSQDPYHETLNPDSHLIENVVTTFAPNRLKIWWQSENGVENVTIQLDLEAEFHFTHLIMTFKTFRPAAMLIERSSDFGKTWGVYRYFAYDCEASFPGISTGPMKKVDDIICDSRYSDIEPSTEGEVIFRALDPAFKIEDPYSPRIQNLLKITNLRIKFVKLHTLGDNLLDSRMEIREKYYYAVYDMVVRGNCFCYGHASECAPVDGFNEEVEGMVHGHCMCRHNTKGLNCELCMDFYHDLPWRPAEGRNSNACKKCNCNEHSISCHFDMAVYLATGNVSGGVCDDCQHNTMGRNCEQCKPFYYQHPERDIRDPNFCERCTCDPAGSQNEGICDSYTDFSTGLIAGQCRCKLNVEGEHCDVCKEGFYDLSSEDPFGCKSCACNPLGTIPGGNPCDSETGHCYCKRLVTGQHCDQCLPEHWGLSNDLDGCRPCDCDLGGALNNSCFAESGQCSCRPHMIGRQCNEVEPGYYFATLDHYLYEAEEANLGPGVSIVERQYIQDRIPSWTGAGFVRVPEGAYLEFFIDNIPYSMEYDILIRYEPQLPDHWEKAVITVQRPGRIPTSSRCGNTIPDDDNQVVSLSPGSRYVVLPRPVCFEKGTNYTVRLELPQYTSSDSDVESPYTLIDSLVLMPYCKSLDIFTVGGSGDGVVTNSAWETFQRYRCLENSRSVVKTPMTDVCRNIIFSISALLHQTGLACECDPQGSLSSVCDPNGGQCQCRPNVVGRTCNRCAPGTFGFGPSGCKRRFLKSIVMHSFRLTQPLWQGSIAAEPMLPS

SEQ ID NO: 51114 - protein, 1798 aa, Homo sapiens
MELTSRERGRGQPLPWELRLGLLLSVLAATLAQAPAPDVPGCSRGSCYPATGDLLVGRADRLTASSTCGLNGPQPYCIVSHLQDEKKCFLCDSRRPFSARDNPHSHRIQNVVTSFAPQRRAAWWQSENGIPAVTIQLDLEAEFHFTHLIMTFKTFRPAAMLVERSADFGRTWHVYRYFSYDCGADFPGVPLAPPRHWDDVVCESRYSEIEPSTEGEVIYRVLDPAIPIPDPYSSRIQNLLKITNLRVNLTRLHTLGDNLLDPRREIREKYYYALYELVVRGNCFCYGHASECAPAPGAPAHAEGMVHGACICKHNTRGLNCEQCQDFYRDLPWRPAEDGHSHACRKCECHGHTHSCHFDMAVYLASGNVSGGVCDGCQHNTAGRHCELCRPFFYRDPTKDLRDPAVCRSCDCDPMGSQDGGRCDSHDDPALGLVSGQCRCKEHVVGTRCQQCRDGFFGLSISDRLGCRRCQCNARGTVPGSTPCDPNSGSCYCKRLVTGRGCDRCLPGHWGLSHDLLGCRPCDCDVGGALDPQCDEGTGQCHCRQHMVGRRCEQVQPGYFRPFLDHLIWEAEDTRGQVLDVVERLVTPGETPSWTGSGFVRLQEGQTLEFLVASVPKAMDYDLLLRLEPQVPEQWAELELIVQRPGPVPAHSLCGHLVPKDDRIQGTLQPHARYLIFPNPVCLEPGISYKLHLKLVRTGGSAQPETPYSGPGLLIDSLVLLPRVLVLEMFSGGDAAALERQATFERYQCHEEGLVPSKTSPSEACAPLLISLSTLIYNGALPCQCNPQGSLSSECNPHGGQCLCKPGVVGRRCDLCAPGYYGFGPTGCQACQCSHEGALSSLCEKTSGQCLCRTGAFGLRCDRCQRGQWGFPSCRPCVCNGHADECNTHTGACLGCRDHTGGEHCERCIAGFHGDPRLPYGGQCRPCPCPEGPGSQRHFATSCHQDEYSQQIVCHCRAGYTGLRCEACAPGHFGDPSRPGGRCQLCECSGNIDPMDPDACDPHTGQCLRCLHHTEGPHCAHCKPGFHGQAARQSCHRCTCNLLGTNPQQCPSPDQCHCDPSSGQCPCLPNVQGPSCDRCAPNFWNLTSGHGCQPCACHPSRARGPTCNEFTGQCHCRAGFGGRTCSECQELHWGDPGLQCHACDCDSRGIDTPQCHRFTGHCSCRPGVSGVRCDQCARGFSGIFPACHPCHACFGDWDRVVQDLAARTQRLEQRAQELQQTGVLGAFESSFWHMQEKLGIVQGIVGARNTSAASTAQLVEATEELRREIGEATEHLTQLEADLTDVQDENFNANHALSGLERDRLALNLTLRQLDQHLDLLKHSNFLGAYDSIRHAHSQSAEAERRANTSALAVPSPVSNSASARHRTEALMDAQKEDFNSKHMANQRALGKLSAHTHTLSLTDINELVCGAPGDAPCATSPCGGAGCRDEDGQPRCGGLSCNGAAATADLALGRARHTQAELQRALAEGGSILSRVAETRRQASEAQQRAQAALDKANASRGQVEQANQELQELIQSVKDFLNQEGADPDSIEMVATRVLELSIPASAEQIQHLAGAIAERVRSLADVDAILARTVGDVRRAEQLLQDARRARSWAEDEKQKAETVQAALEEAQRAQGIAQGAIRGAVADTRDTEQTLYQVQERMAGAERALSSAGERARQLDALLEALKLKRAGNSLAASTAEETAGSAQGRAQEAEQLLRGPLGDQYQTVKALAERKAQGVLAAQARAEQLRDEARDLLQAAQDKLQRLQELEGTYEENERALESKAAQLDGLEARMRSVLQAINLQVQIYNTCQ

SEQ ID NO: 51115 - protein, 380 aa, Homo sapiens
MQEKLGIVQGIVGARNTSAASTAQLVEATEELRREIGEATEHLTQLEADLTDVQDENFNANHALSGLERDRLALNLTLRQLDQHLDLLKHSNFLGAYDSIRHAHSQSAEAERRANTSALAVPSPVSNSASARHRTEALMDAQKEDFNSKHMANQRALGKLSAHTHTLSLTDINELVCGAPGDAPCATSPCGGAGCRDEDGQPRCGGLSCNGAAATADLALGRARHTQAELQRALAEGGSILSRVAETRRQASEAQQRAQAALDKANASRGQVEQANQELQELIQSVKDFLNQEGADPDSIEMVATRVLELSIPASAEQIQHLAGAIAERVRSLADVDAILAQGIAQGAIRGAVADTRDTEQPVPGTGEDGRCRAGTELCR

SEQ ID NO: 51116 - protein, 1798 aa, Homo sapiens; identical to SEQ ID NO: 51114

SEQ ID NO: 51117 - protein, 1172 aa, Homo sapiens [sequence omitted]

SEQ ID NO: 51118 - protein, 1172 aa, Homo sapiens [sequence omitted]

SEQ ID NO: 51119 - protein, 1172 aa, Homo sapiens [sequence omitted]

SEQ ID NO: 51120 - protein, 188 aa, Homo sapiens
MRPFFLLCFALPGLLHAQQACSRGACYPPVGDLLVGRTRFLRASSTCGLTKPETYCTQYGEWQMKCCKCDSRQPHNYYSHRVENVASSSGPMRWWQSQNDVNPVSLQLDLDRRFQLQEVMMEFQGPMPAGMLIERSSDFGKTWRVYQYLAADCTSTFPRVRQGRPQSWQDVRCQSLPQRPNARLNGGK

SEQ ID NO: 51121 - protein, 160 aa, Homo sapiens
MNEIQAIAARLPNVDLVLSQTKQDIARARRLQAEAEEARSRAHAVEGQVEDVVGNLRQGTVALQEAQDTMQGTSRSLRLIQDRVAEVQQVLRPAEKLVTSMTKQLGDFWTRMEELRHQARQQGAEAVQAQQLAEGASEQALSAQEGFERIKQKYAELKDR

SEQ ID NO: 51122 - protein, 1609 aa, Homo sapiens
MRGSHRAAPALRPRGRLWPVLAVLAAAAAAGCAQAAMDECTDEGGRPQRCMPEFVNAAFNVTVVATNTCGTPPEEYCVQTGVTGVTKSCHLCDAGQPHLQHGAAFLTDYNNQADTTWWQSQTMLAGVQYPSSINLTLHLGKAFDITYVRLKFHTSRPESFAIYKRTREDGPWIPYQYYSGSCENTYSKANRGFIRTGGDEQQALCTDEFSDISPLTGGNVAFSTLEGRPSAYNFDNSPVLQEWVTATDIRVTLNRLNTFGDEVFNDPKVLKSYYYAISDFAVGGRCKCNGHASECMKNEFDKLVCNCKHNTYGVDCEKCLPFFNDRPWRRATAESASECLPCDCNGRSQECYFDPELYRSTGHGGHCTNCQDNTDGAHCERCRENFFRLGNNEACSSCHCSPVGSLSTQCDSYGRCSCKPGVMGDKCDRCQPGFHSLTEAGCRPCSCDPSGSIDECNIETGRCVCKDNVEGFNCERCKPGFFNLESSNPRGCTPCFCFGHSSVCTNAVGYSVYSISSTFQIDEDGWRAEQRDGSEASLEWSSERQDIAVISDSYFPRYFIAPAKFLGKQVLSYGQNLSFSFRVDRRDTRLSAEDLVLEGAGLRVSVPLIAQGNSYPSETTVKYVFRLHEATDYPWRPALTPFEFQKLLNNLTSIKIRGTYSERSAGYLDDVTLASARPGPGVPATWVESCTCPVGYGGQFCEMCLSGYRRETPNLGPYSPCVLCACNGHSETCDPETGVCNCRDNTAGPHCEKCSDGYYGDSTAGTSSDCQPCPCPGGSSCAVVPKTKEVVCTNCPTGTTGKRCELCDDGYFGDPLGRNGPVRLCRLCQCSDNIDPNAVGNCNRLTGECLKCIYNTAGFYCDRCKDGFFGNPLAPNPADKCKACNCNLYGTMKQQSSCNPVTGQCECLPHVTGQDCGACDPGFYNLQSGQGCERCDCHALGSTNGQCDIRTGQCECQPGITGQHCERCEVNHFGFGPEGCKPCDCHPEGSLSLQCKDDGRCECREGFVGNRCDQCEENYFYNRSWPGCQECPACYRLVKDKVADHRVKLQELESLIANLGTGDEMVTDQAFEDRLKEAEREVMDLLREAQDVKDVDQNLMDRLQRVNNTLSSQISRLQNIRNTIEETGNLAEQARAHVENTERLIEIASRELEKAKVAAANVSVTQPESTGDPNNMTLLAEEARKLAERHKQEADDIVRVAKTANDTSTEAYNLLLRTLAGENQTAFEIEELNRKYEQAKNISQDLEKQAARVHEEAKRAGDKAVEIYASVAQLSPLDSETLENEANNIKMEAENLEQLIDQKLKDYEDLREDMRGKELEVKNLLEKGKTEQQTADQLLARADAAKALAEEAAKKGRDTLQEANDILNNLKDFDRRVNDNKTAAEEALRKIPAINQTITEANEKTREAQQALGSAAADATEAKNKAHEAERIASAVQKNATSTKAEAERTFAEVTDLDNEVNNMLKQLQEAEKELKRKQDDADQDMMMAGMASQAAQEAEINARKAKNSVTSLLSIINDLLEQLGQLDTVDLNKLNEIEGTLNKAKDEMKVSDLDRKVSDLENEAKKQEAAIMDYNRDIEEIMKDIRNLEDIRKTLPSGCFNTPSIEKP

SEQ ID NO: 51123 - protein, 1193 aa, Homo sapiens
MPALWLGCCLCFSLLLPAARATSRREVCDCNGKSRQCIFDRELHRQTGNGFRCLNCNDNTDGIHCEKCKNGFYRHRERDRCLPCNCNSKGSLSARCDNSGRCSCKPGVTGARCDRCLPGFHMLTDAGCTQDQRLLDSKCDCDPAGIAGPCDAGRCVCKPAVTGERCDRCRSGYYNLDGGNPEGCTQCFCYGHSASCRSSAEYSVHKITSTFHQDVDGWKAVQRNGSPAKLQWSQRHQDVFSSAQRLDPVYFVAPAKFLGNQQVSYGQSLSFDYRVDRGGRHPSAHDVILEGAGLRITAPLMPLGKTLPCGLTKTYTFRLNEHPSNNWSPQLSYFEYRRLLRNLTALRIRATYGEYSTGYIDNVTLISARPVSGAPAPWVEQCICPVGYKGQFCQDCASGYKRDSARLGPFGTCIPCNCQGGGACDPDTGDCYSGDENPDIECADCPIGFYNDPHDPRSCKPCPCHNGFSCSVMPETEEVVCNNCPPGVTGARCELCADGYFGDPFGEHGPVRPCQPCQCNNNVDPSASGNCDRLTGRCLKCIHNTAGIYCDQCKAGYFGDPLAPNPADKCRACNCNPMGSEPVGCRSDGTCVCKPGFGGPNCEHGAFSCPACYNQVKIQMDQFMQQLQRMEALISKAQGGDGVVPDTELEGRMQQAEQALQDILRDAQISEGASRSLGLQLAKVRSQENSYQSRLDDLKMTVERVRALGSQYQNRVRDTHRLITQMQLSLAESEASLGNTNIPASDHYVGPNGFKSLAQEATRLAESHVESASNMEQLTRETEDYSKQALSLVRKALHEGVGSGSGSPDGAVVQGLVEKLEKTKSLAQQLTREATQAEIEADRSYQHSLRLLDSVSRLQGVSDQSFQVEEAKRIKQKADSLSSLVTRHMDEFKRTQKNLGNWKEEAQQLLQNGKSGREKSDQLLSRANLAKSRAQEALSMGNATFYEVESILKNLREFDLQVDNRKAEAEEAMKRLSYISQKVSDASDKTQQAERALGSAAADAQRAKNGAGEALEISSEIEQEIGSLNLEANVTADGALAMEKGLASLKSEMREVEGELERKELEFDTNMDAVQMVITEAQKVDTRAKNAGVTIQDTLNTLDGLLHLMDQPLSVDEEGLVLLEQKLSRAKTQINSQLRPMMSELEERARQQRGHLHLLETSIDGILADVKNLENIRDNLPPGCYNTQALEQQ

SEQ ID NO: 51124 - protein, 1111 aa, Homo sapiens
MPALWLGCCLCFSLLLPAARATSRREVCDCNGKSRQCIFDRELHRQTGNGFRCLNCNDNTDGIHCEKCKNGFYRHRERDRCLPCNCNSKGSLSARCDNSGRCSCKPGVTGARCDRCLPGFHMLTDAGCTQDQRLLDSKCDCDPAGIAGPCDAGRCVCKPAVTGERCDRCRSGYYNLDGGNPEGCTQCFCYGHSASCRSSAEYSVHKITSTFHQDVDGWKAVQRNGSPAKLQWSQRHQDVFSSAQRLDPVYFVAPAKFLGNQQVSYGQSLSFDYRVDRGGRHPSAHDVILEGAGLRITAPLMPLGKTLPCGLTKTYTFRLNEHPSNNWSPQLSYFEYRRLLRNLTALRIRATYGEYSTGYIDNVTLISARPVSGAPAPWVEQCICPVGYKGQFCQDCASGYKRDSARLGPFGTCIPCNCQGGGACDPDTGDCYSGDENPDIECADCPIGFYNDPHDPRSCKPCPCHNGFSCSVMPETEEVVCNNCPPGVTGARCELCADGYFGDPFGEHGPVRPCQPCQCNNNVDPSASGNCDRLTGRCLKCIHNTAGIYCDQCKAGYFGDPLAPNPADKCRACNCNPMGSEPVGCRSDGTCVCKPGFGGPNCEHGAFSCPACYNQVKIQMDQFMQQLQRMEALISKAQGGDGVVPDTELEGRMQQAEQALQDILRDAQISEGASRSLGLQLAKVRSQENSYQSRLDDLKMTVERVRALGSQYQNRVRDTHRLITQMQLSLAESEASLGNTNIPASDHYVGPNGFKSLAQEATRLAESHVESASNMEQLTRETEDYSKQALSLVRKALHEGVGSGSGSPDGAVVQGLVEKLEKTKSLAQQLTREATQAEIEADRSYQHSLRLLDSVSRLQGVSDQSFQVEEAKRIKQKADSLSSLVTRHMDEFKRTQKNLGNWKEEAQQLLQNGKSGREKSDQLLSRANLAKSRAQEALSMGNATFYEVESILKNLREFDLQVDNRKAEAEEAMKRLSYISQKVSDASDKTQQAERALGSAAADAQRAKNGAGEALEISSEIEQEIGSLNLEANVTADGALAMEKGLASLKSEMREVEGELERKELEFDTNMDAVQMVITEAQKVDTRAKNAGVTIQDTLNTLDGLLHLMGM

SEQ ID NO: 51125 - protein, 1010 aa, Homo sapiens
MPALWLGCCLCFSLLLPAARATSRREVCDCNGKSRQCIFDRELHRQTGNGFRCLNCNDNTDGIHCEKCKNGFYRHRERDRCLPCNCNSKGSLSARCDNSGRCSCKPGVTGARCDRCLPGFHMLTDAGCTQDQRLLDSKCDCDPAGIAGPCDAGRCVCKPAVTGERCDRCRSGYYNLDGGNPEGCTQCFCYGHSASCRSSAEYSVHKITSTFHQDVDGWKAVQRNGSPAKLQWSQRHQDVFSSAQRLDPVYFVAPAKFLGNQQVSYGQSLSFDYRVDRGGRHPSAHDVILEGAGLRITAPLMPLGKTLPCGLTKTYTFRLNEHPSNNWSPQLSYFEYRRLLRNLTALRIRATYGEYSTGYIDNVTLISARPVSGAPAPWVEQCICPVGYKGQFCQDCASGYKRDSARLGPFGTCIPCNCQGGGACDPDTGDCYSGDENPDIECADCPIGFYNDPHDPRSCKPCPCHNGFSCSVMPETEEVVCNNCPPGVTGARCELCADGYFGDPFGEHGPVRPCQPCQCNNNVDPSASGNCDRLTGRCLKCIHNTAGIYCDQCKAGYFGDPLAPNPADKCRACNCNPMGSEPVGCRSDGTCVCKPGFGGPNCEHGAFSCPACYNQVKIQMDQFMQQLQRMEALISKAQGGDGVVPDTELEGRMQQAEQALQDILRDAQISEGASRSLGLQLAKVRSQENSYQSRLDDLKMTVERVRALGSQYQNRVRDTHRLITQMQLSLAESEASLGNTNIPASDHYVGPNGFKSLAQEATRLAESHVESASNMEQLTRETEDYSKQALSLVRKALHEGVGSGSGSPDGAVVQGLVEKLEKTKSLAQQLTREATQAEIEADRSYQHSLRLLDSVSRLQGVSDQSFQVEEAKRIKQKADSLSSLVTRHMDEFKRTQKNLGNWKEEAQQLLQNGKSGREKSDQLLSRANLAKSRAQEALSMGNATFYEVESILKNLREFDLQVDNRKAEAFPSQDPDQQPTAAHDVRAGREGTSAEGPPPFAGDKHRWDSG

SEQ ID NO: 51126 - protein, 529 aa, Homo sapiens
MAAAALLLGLALLAPRAAGAGMGACYDGAGRPQRCLPVFENAAFGRLAQASHTCGSPPEDFCPHVGAAGAGAHCQRCDAADPQRHHNASYLTDFHSQDESTWWQSPSMAFGVQYPTSVNITLRLGKAYEITYVRLKFHTSRPESFAIYKRSRADGPWEPYQFYSASCQKTYGRPEGQYLRPGEDERVAFCTSEFSDISPLSGGNVAFSTLEGRPSAYNFEESPGLQEWVTSTELLISLDRLNTFGDDIFKDPKVLQSYYYAVSDFSVGGRCKCNGHASECGPDVAGQLACRCQHNTTGTDCERCLPFFQDRPWARGTAEAAHECLPCNCSGRSEECTFDRELFRSTGHGGRCHHCRDHTAGPHCERCQENFYHWDPRMPCQPCDCQSAGSLHLQCDDTGTCACKPTVTGWKCDRCLPGFHSLSEGGCRPCTCNPAGSLDTCDPRSGRCPCKENVEGNLCDRCRPGTFNLQPHNPAGRSCRSRASRVTSPRSAPTNRTWRPFCTACPRTVPAGSEGCPDPRHTLPHLLFT

SEQ ID NO: 51127 - protein, 1575 aa, Homo sapiens
MAAAALLLGLALLAPRAAGAGMGACYDGAGRPQRCLPVFENAAFGRLAQASHTCGSPPEDFCPHVGAAGAGAHCQRCDAADPQRHHNASYLTDFHSQDESTWWQSPSMAFGVQYPTSVNITLRLGKAYEITYVRLKFHTSRPESFAIYKRSRADGPWEPYQFYSASCQKTYGRPEGQYLRPGEDERVAFCTSEFSDISPLSGGNVAFSTLEGRPSAYNFEESPGLQEWVTSTELLISLDRLNTFGDDIFKDPKVLQSYYYAVSDFSVGGRCKCNGHASECGPDVAGQLACRCQHNTTGTDCERCLPFFQDRPWARGTAEAAHECLPCNCSGRSEECTFDRELFRSTGHGGRCHHCRDHTAGPHCERCQENFYHWDPRMPCQPCDCQSAGSLHLQCDDTGTCACKPTVTGWKCDRCLPGFHSLSEGGCRPCTCNPAGSLDTCDPRSGRCPCKENVEGNLCDRCRPGTFNLQPHNPAGCSSCFCYGHSKVCASTAQFQVHHILSDFHQGAEGWWARSVGGSEHPPQWSPNGVLLSPEDEEELTAPEKFLGDQRFSYGQPLILTFRVPPGDSPLPVQLRLEGTGLALSLRHSSLSGPQDAGHPREVELRFHLQETSEDVAPPLPPFHFQRLLANLTSLRLRVSPGPSPAGPVFLTEVRLTSARPGLSPPASWVEICSCPTGYTGQFCESCAPGYKREMPQGGPYASCVPCTCNQHGTCDPNTGICVCSHHTEGPSCERCLPGFYGNPFAGQADDCQPCPCPGQSACTTIPESREVVCTHCPPGQRGRRCEVCDDGFFGDPLGLFGHPQPCHQCQCSGNVDPNAVGNCDPLSGHCLRCLHNTTGDHCEHCQEGFYGSALAPRPADKCMPCSCHPQGSVSEQMPCDPVTGQCSCLPHVTARDCSRCYPGFFDLQPGRGCRSCKCHPLGSQEDQCHPKTGQCTCRPGVTGQACDRCQLGFFGFSIKGCRACRCSPLGAASAQCHENGTCVCRPGFEGYKCDRCHDNFFLTADGTHCQQCPSCYALVKEEAAKLKARLTLTEGWLQGSDCGSPWGPLDILLGEAPRGDVYQGHHLLPGAREAFLEQMMSLEGAVKAAREQLQRLNKGARCAQAGSQKTCTQLADLEAVLESSEEEILHAAAILASLEIPQEGPSQPTKWSHLATEARALARSHRDTATKIAATAWRALLASNTSYALLWNLLEGRVALETQRDLEDRYQEVQAAQKALRTAVAEVLPEAESVLATVQQVGADTAPYLALLASPGALPQKSRAEDLGLKAKALEKTVASWQHMATEAARTLQTAAQATLRQTEPLTKLHQEARAALTQASSSVQAATVTVMGARTLLADLEGMKLQFPRPKDQAALQRKADSVSDRLLADTRKKTKQAERMLGNAAPLSSSAKKKGREAEVLAKDSAKLAKALLRERKQAHRRASRLTSQTQATLQQASQQVLASEARRQELEEAERVGAGLSEMEQQIRESRISLEKDIETLSELLARLGSLDTHQAPAQALNETQWALERLRLQLGSPGSLQRKLSLLEQESQQQELQIQGFESDLAEIRADKQNLEAILHSLPENCASWQ

SEQ ID NO: 51128 - protein, 399 aa, Homo sapiens
MAQRAFPNPYADYNKSLAEGYFDAAGRLTPEFSQRLTNKIRELLQQMERGLKSADPRDGTGYTGWAGIAVLYLHLYDVFGDPAYLQLAHGYVKQSLNCLTKRSITFLCGDAGPLAVAAVLYHKMNNEKQAEDCITRLIHLNKIDPHAPNEMLYGRIGYIYALLFVNKNFGVEKIPQSHIQQICETILTSGENLARKRNFTAKSPLMYEWYQEYYVGAAHGLAGIYYYLMQPSLQVSQGKLHSLVKPSVDYVCQLKFPSGNYPPCIGDNRDLLVHWCHGAPGVIYMLIQAYKVFREEKYLCDAYQCADVIWQYGLLKKGYGLCHGSAGNAYAFLTLYNLTQDMKYLYRACKFAEWCLEYGEHGCRTPDTPFSLFEGMAGTIYFLADLLVPTKARFPAFEL

SEQ ID NO: 51129 - protein, 399 aa, Homo sapiens; identical to SEQ ID NO: 51128

SEQ ID NO: 51130 - protein, 399 aa, Homo sapiens; identical to SEQ ID NO: 51128

SEQ ID NO: 51131 - protein, 399 aa, Homo sapiens; identical to SEQ ID NO: 51128

SEQ ID NO: 51132 - protein, 196 aa, Homo sapiens
MAQRAFPNPYADYNKSLAEGYFDAAGRLTPEFSQRLTNKIRELLQQMERGLKSADPRDGTGYTGWAGIAVLYLHLYDVFGDPAYLQLAHGYVKQSLNCLTKRSITFLCGDAGPLAVAAVLYHKMNNEKQAEDCITRLIHLNKIDPHAPNEMLYGRIGYIYALLFVNKNFGVEKIPQSHIQQICETILTSGENLARK

SEQ ID NO: 51133 - protein, 399 aa, Homo sapiens; identical to SEQ ID NO: 51128

SEQ ID NO: 51134 - protein, 450 aa, Homo sapiens
MGETMSKRLKLHLGGEAEMEERAFVNPFPDYEAAAGALLASGAAEETGCVRPPATTDEPGLPFHQDGKIIHNFIRRIQTKIKDLLQQMEEGLKTADPHDCSAYTGWTGIALLYLQLYRVTCDQTYLLRSLDYVKRTLRNLNGRRVTFLCGDAGPLAVGAVIYHKLRSDCESQECVTKLLQLQRSVVCQESDLPDELLYGRAGYLYALLYLNTEIGPGTVCESAIKEVVNAIIESGKTLSREERKTERCPLLYQWHRKQYVGAAHGMAGIYYMLMQPAAKVDQETLTEMVKPSIDYVRHKKFRSGNYPSSLSNETDRLVHWCHGAPGVIHMLMQAYKVFKEEKYLKEAMECSDVIWQRGLLRKGYGICHGTAGNGYSFLSLYRLTQDKKYLYRACKFAEWCLDYGAHGCRIPDRPYSLFEGMAGAIHFLSDVLGPETSRFPAFELDSSKRD

SEQ ID NO: 51135 - protein, 732 aa, Homo sapiens
MTEGTCLRRRGGPYKTEPATDLGRWRLNCERGRQTWTYLQDERAGREQTGLEAYALGLDTKNYFKDLPKAHTAFEGALNGMTFYVGLQAEDGHWTGDYGGPLFLLPGLLITCHVARIPLPAGYREEIVRYLRSVQLPDGGWGLHIEDKSTVFGTALNYVSLRILGVGPDDPDLVRARNILHKKGGAVAIPSWGKFWLAVLNVYSWEGLNTLFPEMWLFPDWAPAHPSTLWCHCRQVYLPMSYCYAVRLSAAEDPLVQSLRQELYVEDFASIDWLAQRNNVAPDELYTPHSWLLRVVYALLNLYEHHHSAHLRQRAVQKLYEHIVADDRFTKSISIGPISKTINMLVRWYVDGPASTAFQEHVSRIPDYLWMGLDGMKMQGTNGSQIWDTAFAIQALLEAGGHHRPEFSSCLQKAHEFLRLSQVPDNPPDYQKYYRQMRKGGFSFSTLDCGWIVSDCTAEALKAVLLLQEKCPHVTEHIPRERLCDAVAVLLNMRNPDGGFATYETKRGGHLLELLNPSEVFGDIMIDYTYVECTSAVMQALKYFHKRFPEHRAAEIRETLTQGLEFCRRQQRADGSWEGSWGVCFTYGTWFGLEAFACMGQTYRDGTACAEVSRACDFLLSRQMADGGWGEDFESCEERRYLQSAQSQIHNTCWAMMGLMAVRHPDIEAQERGVRCLLEKQLPNGDWPQENIAGVFNKSCAISYTSYRNIFPIWALGRFSQLYPERALAGHP

SEQ ID NO: 51136 - protein, 732 aa, Homo sapiens; identical to SEQ ID NO: 51135

SEQ ID NO: 51137 - protein, 652 aa, Homo sapiens
MTFYVGLQAEDGHWTGDYGGPLFLLPGLLITCHVARIPLPAGYREEIVRYLRSVQLPDGGWGLHIEDKSTVFGTALNYVSLRILGVGPDDPDLVRARNILHKKGGAVAIPSWGKFWLAVLNVYSWEGLNTLFPEMWLFPDWAPAHPSTLWCHCRQVYLPMSYCYAVRLSAAEDPLVQSLRQELYVEDFASIDWLAQRNNVAPDELYTPHSWLLRVVYALLNLYEHHHSAHLRQRAVQKLYEHIVADDRFTKSISIGPISKTINMLVRWYVDGPASTAFQEHVSRIPDYLWMGLDGMKMQGTNGSQIWDTAFAIQALLEAGGHHRPEFSSCLQKAHEFLRLSQVPDNPPDYQKYYRQMRKGGFSFSTLDCGWIVSDCTAEALKAVLLLQEKCPHVTEHIPRERLCDAVAVLLNMRNPDGGFATYETKRGGHLLELLNPSEVFGDIMIDYTYVECTSAVMQALKYFHKRFPEHRAAEIRETLTQGLEFCRRQQRADGSWEGSWGVCFTYGTWFGLEAFACMGQTYRDGTACAEVSRACDFLLSRQMADGGWGEDFESCEERRYLQSAQSQIHNTCWAMMGLMAVRHPDIEAQERGVRCLLEKQLPNGDWPQENIAGVFNKSCAISYTSYRNIFPIWALGRFSQLYPERALAGHP

SEQ ID NO: 51138 - protein, 721 aa, Homo sapiens
MTEGTCLRRRGGPYKTEPATDLGRWRLNCERGRQTWTYLQDERAGREQTGLEAYALGLDTKNYFKDLPKAHTAFEGALNGMTFYVGLQAEDGHWTGDYGGPLFLLPGLLITCHVARIPLPAGYREEIVRYLRHIEDKSTVFGTALNYVSLRILGVGPDDPDLVRARNILHKKGGAVAIPSWGKFWLAVLNVYSWEGLNTLFPEMWLFPDWAPAHPSTLWCHCRQVYLPMSYCYAVRLSAAEDPLVQSLRQELYVEDFASIDWLAQRNNVAPDELYTPHSWLLRVVYALLNLYEHHHSAHLRQRAVQKLYEHIVADDRFTKSISIGPISKTINMLVRWYVDGPASTAFQEHVSRIPDYLWMGLDGMKMQGTNGSQIWDTAFAIQALLEAGGHHRPEFSSCLQKAHEFLRLSQVPDNPPDYQKYYRQMRKGGFSFSTLDCGWIVSDCTAEALKAVLLLQEKCPHVTEHIPRERLCDAVAVLLNMRNPDGGFATYETKRGGHLLELLNPSEVFGDIMIDYTYVECTSAVMQALKYFHKRFPEHRAAEIRETLTQGLEFCRRQQRADGSWEGSWGVCFTYGTWFGLEAFACMGQTYRDGTACAEVSRACDFLLSRQMADGGWGEDFESCEERRYLQSAQSQIHNTCWAMMGLMAVRHPDIEAQERGVRCLLEKQLPNGDWPQENIAGVFNKSCAISYTSYRNIFPIWALGRFSQLYPERALAGHP

SEQ ID NO: 51139 - protein, 658 aa, Homo sapiens
MGRRRAPAGGSLGRALMRHQTQRSRSHRHTDSWLHTSELNDGYDWGRLNLQSVTEQSSLDDFLATAELAGTEFVAEKLNIKFVPAEARTGLLSFEESQRIKKLHEENKQFLCIPRRPNWNQNTTPEELKQAEKDNFLEWRRQLVRLEEEQKLILTPFERNLDFWRQLWRVIERSDIVVQIVDARNPLLFRCEDLECYVKEMDANKENVILINKADLLTAEQRSAWAMYFEKEDVKVIFWSALAGAIPLNGDSEEEANRDDRQSNTTKFGHSSFDQAEISHSESEHLPARDSPSLSENPTTDEDDSEYEDCPEEEEDDWQTCSEEDGPKEEDCSQDWKESSTADSEARSRKTPQKRQIHNFSHLVSKQELLELFKELHTGRKVKDGQLTVGLVGYPNVGKSSTINTIMGNKKVSVSATPGHTKHFQTLYVEPGLCLCDCPGLVMPSFVSTKAEMTCSGILPIDQMRDHVPPVSLVCQNIPRHVLEATYGINIITPREDEDPHRPPTSEELLTAYGYMRGFMTAHGQPDQPRSARYILKDYVSGKLLYCHPPPGRDPVTFQHQHQRLLENKMNSDEIKMQLGRNKKAKQIENIVDKTFFHQENVRALTKGVQAVMGYKPGSGVVTASTASSENGAGKPWKKHGNRNKKEKSRRLYKHLDM

SEQ ID NO: 51140 - protein, 110 aa, Homo sapiens
MSCQQSQQQCQPPPKCTPKCPPKCPTPKCPPKCPPKCPPVSSCCSVSSGGCCGSSSGGGCSSGGGGCCLSHHRRHRSHRHRLQSSGCCSQPSGGSSCCGGDSGQHSGGCC

SEQ ID NO: 51141 - protein, 110 aa, Homo sapiens; identical to SEQ ID NO: 51140

SEQ ID NO: 51142 - protein, 118 aa, Homo sapiens
MSCQQNQQQCQPPPKCIPKCPPKCLTPRCPPKCPPKCPPVSSCCSVSSGGCCGSSSGGSCGSSSGGCCSSGGGGCCLSHHRRRRSHCHRPQSSGCCSQPSGGSSCCGGGSGQHSGGCC

SEQ ID NO: 51143 - protein, 110 aa, Homo sapiens
MSCQQNQQQCQPPPKCIPKCPPKCLTPRCPPKCPPKCPPVSSCCSVSSGGCCGSSSGGCCSSGGGGCCLSHHRRRRSHCHRPQSSGCCSQPSGGSSCCGGGSGQHSGGCC

SEQ ID NO: 51144 - protein, 118 aa, Homo sapiens
MSCQQSQQQCQPPPKCTPKCPPKCPTPKCPPKCPPKCPPVSSCCSVSSGGCCGSSSGGSCGSSSGGCCSSGGGGCCLSHHRRRRSHCHRPQSSGCCSQPSGGSSCCGGGSGQHSGGCC

SEQ ID NO: 51145 - protein, 114 aa, Homo sapiens
MSCQQSQQQCQPPPKCTPKCTPKCPAPKCPPKCPPVSSCCSVSSGGCCGSSSGGGCGSNSGGCCSSGGGGCCLSHHRRHRSHRRRPQSSDCCSQPSGGSSCCGGGSSQHSGGCC

SEQ ID NO: 51146 - protein, 118 aa, Homo sapiens
MSCQQSQQQCQPPPKCTPKCPPKCPTPKCPPKCPPKCPPVSSCCSVSSGGCCGSSSGGSCGSSSGGCCSSGGGGCCLSHHRHHRSHRHRPQSSDCCSQPSGGSSCCGGGSGQHSGGCC

SEQ ID NO: 51147 - protein, 118 aa, Homo sapiens; identical to SEQ ID NO: 51146

SEQ ID NO: 51148 - protein, 118 aa, Homo sapiens
MSCQQSQQQCQPPPKCTPKCPPKCPTPKCPPKCPPKCPPVSSCCSVSSGGCCGSSSGGCCSSGGGGCCSSGGGGCCLSHHRRRRSHRHRPQSSDCCSQPSAGSSCCGGGSGQHSGGCC

SEQ ID NO: 51149 - protein, 106 aa, Homo sapiens
MSCQQNQQQCQPPPKCPPKCPPKCPPKCRPQCPAPCPPPVSSCCGPSSGGCCGSSSGGCCSSGGGGCCLSHHRPRLFHRHRHQSPDCCECEPSGGSGCCHSSGDCC

SEQ ID NO: 51150 - protein, 110 aa, Homo sapiens
MSCQQNQQQCQPPPKCPPKCTPKCPPKCPPKCLPQCPAPCSPAVSSCCGPISGGCCGPSSGGCCNSGAGGCCLSHHRPRLFHRRRHQSPDCCESEPSGGSGCCHSSGGCC

SEQ ID NO: 51151 - protein, 110 aa, Homo sapiens; identical to SEQ ID NO: 51150

SEQ ID NO: 51152 - protein, 110 aa, Homo sapiens
MSCQQNQQQCQPPPKCPPKCTPKCPPKCPPKCPPQCPAPCFPAVSSCCGPSSGSCCGPSSGGCCSSGAGGCSLSHHRPRLFHRRRHQSPDCCESEPSGGSGCCHSSGGCC

SEQ ID NO: 51153 - protein, 110 aa, Homo sapiens
MSCQQNQQQCQPPPKCPPKCTPKCPPKCPPKCPPQCPAPCSPAVSSCCGPSSGSCCGPSSGGCCSSGGGGCCLSHHRPRLFHRRRHQSPDCCESEPSGASGCCHSSGGCC

SEQ ID NO: 51154 - protein, 89 aa, Homo sapiens
MSCQQNQQQCQPPPKCPAKSPAQCLPPASSSCAPSSGGCGPSSERSCCLSHHRCRRSHRCRCQSSNSCDRGSGQQGGSSSCGHSSAGCC

SEQ ID NO: 51155 - protein, 95 aa, Homo sapiens
MSCQQNQQQCQPLPKCPSPKCPPKSSAQCLPPASSCCAPRPGCCGGPSSEGGCCLSHHRCCRSHRCRRQSSNSCDRGSGQQDGASDCGYGSGGCC

SEQ ID NO: 51156 - protein, 94 aa, Homo sapiens
MSCQQNQQQCQPPPSCPSPKCPPKSPAQCLPPPSSDCALSSGGCGPSSESGCCLSHHRHFRSHQCRRQRSNSCDRGSGQQGGGSCRGHGSGGCC

SEQ ID NO: 51157 - protein, 92 aa, Homo sapiens
MSCQQNQQQCQPPPKCPSPKCPPKSPVQCLPPASSGCAPSSGGCGPSSEGGCFLNHHRRHHRCRRQRPNSCDRGSGQQGGGSGCGHGSGGCC

SEQ ID NO: 51158 - protein, 92 aa, Homo sapiens
MSCQQNQKQCQPPPKCPSPKCPPKNPVQCLPPASSGCAPSSGGCGPSSEGGCFLNHHRRHHRCRRQRSNSCDRGSGQQGGGSGCCHGSGGCC

SEQ ID NO: 51159 - protein, 99 aa, Homo sapiens
MSCQQNQQQCQPPPKCPIPKYPPKCPSKCASSCPPPISSCCGSSSGGCGCCSSEGGGCCLSHHRHHRSHCHRPKSSNCYGSGSGQQSGGSGCCSGGGCC

SEQ ID NO: 51160 - protein, 99 aa, Homo sapiens; identical to SEQ ID NO: 51159

SEQ ID NO: 51161 - protein, 118 aa, Homo sapiens
MSCQQSQQQCQPPPKCTPKCPPKCTPKCPPKCPPKCPPQCSAPCPPPVSSCCGSSSGGCCSSEGGGCCLSHHRPRQSLRRRPQSSSCCGSGSGQQSGGSSCCHSSGGSGCCHSSGGCC

SEQ ID NO: 51162 - protein, 98 aa, Homo sapiens
MSSDDKSKSNDPKTEPKNCDPKCEQKCESKCQPSCLKKLLQRCFEKCPWEKCPAPPKCLPCPSQSPSSCPPQPCTKPCPPKCPSSCPHACPPPCPPPE

SEQ ID NO: 51163 - protein, 619 aa, Homo sapiens
MCSCHKGYTRTPDHKHCRDIDECQQGNLCVNGQCKNTEGSFRCTCGQGYQLSAAKDQCEDIDECQHRHLCAHGQCRNTEGSFQCVCDQGYRASGLGDHCEDINECLEDKSVCQRGDCINTAGSYDCTCPDGFQLDDNKTCQDINECEHPGLCGPQGECLNTEGSFHCVCQQGFSISADGRTCEDVNECELLSGVCGEAFCENVEGSFLCVCADENQEYSPMTGQCRSRTSTDLDVDVDQPKEEKKECYYNLNDASLCDNVLAPNVTKQECCCTSGVGWGDNCEIFPCPVLGTAEFTEMCPKGKGFVPAGESSSEAGGENYKDADECLLFGQEICKNGFCLNTRPGYECYCKQGTYYDPVKLQCFDMDECQDPSSCIDGQCVNTEGSYNCFCTHPMVLDASEKRCIRPAESNEQIEETDVYQDLCWEHLSDEYVCSRPLVGKQTTYTECCCLYGEAWGMQCALCPLKDSDDYAQLCNIPVTGRRQPYGRDALVDFSEQYTPEADPYFIQDRFLNSFEELQAEECGILNGCENGRCVRVQEGYTCDCFDGYHLDTAKMTCVDVNECDELNNRMSLCKNAKCINTDGSYKCLCLPGYVPSDKPNYCTPLNTALNLEKDSDLE

SEQ ID NO: 51164 - protein, 1722 aa, Homo sapiens
MAGAWLRWGLLLWAGLLASSAHGRLRRITYVVHPGPGLAAGALPLSGPPRSRTFNVALNARYSRSSAAAGAPSRASPGVPSERTRRTSKPGGAALQGLRPPPPPPPEPARPAVPGGQLHPNPGGHPAAAPFTKQGRQVVRSKVPQETQSGGGSRLQVHQKQQLQGVNVCGGRCCHGWSKAPGSQRCTKPSCVPPCQNGGMCLRPQLCVCKPGTKGKACETIAAQDTSSPVFGGQSPGAASSWGPPEQAAKHTSSKKADTLPRVSPVAQMTLTLKPKPSVGLPQQIHSQVTPLSSQSVVIHHGQTQEYVLKPKYFPAQKGISGEQSTEGSFPLRYVQDQVAAPFQLSNHTGRIKVVFTPSICKVTCTKGSCQNSCEKGNTTTLISENGHAADTLTATNFRVVICHLPCMNGGQCSSRDKCQCPPNFTGKLCQIPVHGASVPKLYQHSQQPGKALGTHVIHSTHTLPLTVTSQQGVKVKFPPNIVNIHVKHPPEASVQIHQVSRIDGPTGQKTKEAQPGQSQVSYQGLPVQKTQTIHSTYSHQQVIPHVYPVAAKTQLGRCFQETIGSQCGKALPGLSKQEDCCGTVGTSWGFNKCQKCPKKPSYHGYNQMMECLPGYKRVNNTFCQDINECQLQGVCPNGECLNTMGSYRCTCKIGFGPDPTFSSCVPDPPVISEEKGPCYRLVSSGRQCMHPLSVHLTKQLCCCSVGKAWGPHCEKCPLPGTAAFKEICPGGMGYTVSGVHRRRPIHHHVGKGPVFVKPKNTQPVAKSTHPPPLPAKEEPVEALTFSREHGPGVAEPEVATAPPEKEIPSLDQEKTKLEPGQPQLSPGISTIHLHPQFPGIVIEKTSPPVPVEVAPEASTSSASQVIAPTQVTEINECTVNPDICGAGHCINLPVRYTCICYEGYRFSEQQRKCVDIDECTQVQHLCSQGRCENTEGSFLCICPAGFMASEEGTNCIDVDECLRPDVCGEGHCVNTVGAFRCEYCDSGYRMTQRGRCEDIDECLNPSTCPDEQCVNSPGSYQCVPCTEGFRGWNGQCLDVDECLEPNVCANGDCSNLEGSYMCSCHKGYTRTPDHKHCRDIDECQQGNLCVNGQCKNTEGSFRCTCGQGYQLSAAKDQCEDIDECQHRHLCAHGQCRNTEGSFQCVCDQGYRASGLGDHCEDINECLEDKSVCQRGDCINTAGSYDCTCPDGFQLDDNKTCQDINECEHPGLCGPQGECLNTEGSFHCVCQQGFSISADGRTCEDIDECVNNTVCDSHGFCDNTAGSFRCLCYQGFQAPQDGQGCVDVNECELLSGVCGEAFCENVEGSFLCVCADENQEYSPMTGQCRSRTSTDLDVDVDQPKEEKKECYYNLNDASLCDNVLAPNVTKQECCCTSGVGWGDNCEIFPCPVLGTAEFTEMCPKGKGFVPAGESSSEAGGENYKDADECLLFGQEICKNGFCLNTRPGYECYCKQGTYYDPVKLQCFDMDECQDPSSCIDGQCVNTEGSYNCFCTHPMVLDASEKRCIRPAESNEQIEETDVYQDLCWEHLSDEYVCSRPLVGKQTTYTECCCLYGEAWGMQCALCPLKDSDDYAQLCNIPVTGRRQPYGRDALVDFSEQYTPEADPYFIQDRFLNSFEELQAEECGILNGCENGRCVRVQEGYTCDCFDGYHLDTAKMTCVDVNECDELNNRMSLCKNAKCINTDGSYKCLCLPGYVPSDKPNYCTPLNTALNLEKDSDLE

SEQ ID NO: 51165 - protein, 1396 aa, Homo sapiens
MDTKLMCLLFFFSLPPLLVSNHTGRIKVVFTPSICKVTCTKGSCQNSCEKGNTTTLISENGHAADTLTATNFRVVICHLPCMNGGQCSSRDKCQCPPNFTGKLCQIPVHGASVPKLYQHSQQPGKALGTHVIHSTHTLPLTVTSQQGVKVKFPPNIVNIHVKHPPEASVQIHQVSRIDGPTGQKTKEAQPGQSQVSYQGLPVQKTQTIHSTYSHQQVIPHVYPVAAKTQLGRCFQETIGSQCGKALPGLSKQEDCCGTVGTSWGFNKCQKCPKKPSYHGYNQMMECLPGYKRVNNTFCQDINECQLQGVCPNGECLNTMGSYRCTCKIGFGPDPTFSSCVPDPPVISEEKGPCYRLVSSGRQCMHPLSVHLTKQLCCCSVGKAWGPHCEKCPLPGTAAFKEICPGGMGYTVSGVHRRRPIHHHVGKGPVFVKPKNTQPVAKSTHPPPLPAKEEPVEALTFSREHGPGVAEPEVATAPPEKEIPSLDQEKTKLEPGQPQLSPGISTIHLHPQFPGIVIEKTSPPVPVEVAPEASTSSASQVIAPTQVTEINECTVNPDICGAGHCINLPVRYTCICYEGYRFSEQQRKCVDIDECTQVQHLCSQGRCENTEGSFLCICPAGFMASEEGTNCIDVDECLRPDVCGEGHCVNTVGAFRCEYCDSGYRMTQRGRCEDIDECLNPSTCPDEQCVNSPGSYQCVPCTEGFRGWNGQCLDVDECLEPNVCANGDCSNLEGSYMCSCHKGYTRTPDHKHCRDIDECQQGNLCVNGQCKNTEGSFRCTCGQGYQLSAAKDQCEDIDECQHRHLCAHGQCRNTEGSFQCVCDQGYRASGLGDHCEDINECLEDKSVCQRGDCINTAGSYDCTCPDGFQLDDNKTCQDINECEHPGLCGPQGECLNTEGSFHCVCQQGFSISADGRTCEDIDECVNNTVCDSHGFCDNTAGSFRCLCYQGFQAPQDGQGCVDVNECELLSGVCGEAFCENVEGSFLCVCADENQEYSPMTGQCRSRTSTDLDVDVDQPKEEKKECYYNLNDASLCDNVLAPNVTKQECCCTSGVGWGDNCEIFPCPVLGTAEFTEMCPKGKGFVPAGESSSEAGGENYKDADECLLFGQEICKNGFCLNTRPGYECYCKQGTYYDPVKLQCFDMDECQDPSSCIDGQCVNTEGSYNCFCTHPMVLDASEKRCIRPAESNEQIEETDVYQDLCWEHLSDEYVCSRPLVGKQTTYTECCCLYGEAWGMQCALCPLKDSDDYAQLCNIPVTGRRQPYGRDALVDFSEQYTPEADPYFIQDRFLNSFEELQAEECGILNGCENGRCVRVQEGYTCDCFDGYHLDTAKMTCVDVNECDELNNRMSLCKNAKCINTDGSYKCLCLPGYVPSDKPNYCTPLNTALNLEKDSDLE

SEQ ID NO: 51166 - protein, 1721 aa, Homo sapiens
MAGAWLRWGLLLWAGLLASSAHGRLRRITYVVHPGPGLAAGALPLSGPPRSRTFNVALNARYSRSSAAAGAPSRASPGVPSERTRRTSKPGGAALQGLRPPPPPPPEPARPAVPGGQLHPNPGGHPAAAPFTKQGRQVVRSKVPQETQSGGGSRLQVHQKQQLQGVNVCGGRCCHGWSKAPGSQRCTKPSCVPPCQNGGMCLRPQLCVCKPGTKGKACETIAAQDTSSPVFGGQSPGAASSWGPPEQAAKHTSSKKADTLPRVSPVAQMTLTLKPKPSVGLPQQIHSQVTPLSSQSVVIHHGQTQEYVLKPKYFPAQKGISGEQSTEGSFPLRYVQDQVAAPFQLSNHTGRIKVVFTPSICKVTCTKGSCQNSCEKGNTTTLISENGHAADTLTATNFRVVICHLPCMNGGQCSSRDKCQCPPNFTGKLCQIPVHGASVPKLYQHSQQPGKALGTHVIHSTHTLPLTVTSQQGVKVKFPPNIVNIHVKHPPEASVQIHQVSRIDGPTGQKTKEAQPGQSQVSYQGLPVQKTQTIHSTYSHQQVIPHVYPVAAKTQLGRCFQETIGSQCGKALPGLSKQEDCCGTVGTSWGFNKCQKCPKKPSYHGYNQMMECLPGYKRVNNTFCQDINECQLQGVCPNGECLNTMGSYRCTCKIGFGPDPTFSSCVPDPPVISEEKGPCYRLVSSGRQCMHPLSVHLTKQLCCCSVGKAWGPHCEKCPLPGTAAFKEICPGGMGYTVSGVHRRRPIHHHVGKGPVFVKPKNTQPVAKSTHPPPLPAKEEPVEALTFSREHGPGVAEPEVATAPPEKEIPSLDQEKTKLEPGQPQLSPGISTIHLHPQFPVVIEKTSPPVPVEVAPEASTSSASQVIAPTQVTEINECTVNPDICGAGHCINLPVRYTCICYEGYRFSEQQRKCVDIDECTQVQHLCSQGRCENTEGSFLCICPAGFMASEEGTNCIDVDECLRPDVCGEGHCVNTVGAFRCEYCDSGYRMTQRGRCEDIDECLNPSTCPDEQCVNSPGSYQCVPCTEGFRGWNGQCLDVDECLEPNVCANGDCSNLEGSYMCSCHKGYTRTPDHKHCRDIDECQQGNLCVNGQCKNTEGSFRCTCGQGYQLSAAKDQCEDIDECQHRHLCAHGQCRNTEGSFQCVCDQGYRASGLGDHCEDINECLEDKSVCQRGDCINTAGSYDCTCPDGFQLDDNKTCQDINECEHPGLCGPQGECLNTEGSFHCVCQQGFSISADGRTCEDIDECVNNTVCDSHGFCDNTAGSFRCLCYQGFQAPQDGQGCVDVNECELLSGVCGEAFCENVEGSFLCVCADENQEYSPMTGQCRSRTSTDLDVDVDQPKEEKKECYYNLNDASLCDNVLAPNVTKQECCCTSGVGWGDNCEIFPCPVLGTAEFTEMCPKGKGFVPAGESSSEAGGENYKDADECLLFGQEICKNGFCLNTRPGYECYCKQGTYYDPVKLQCFDMDECQDPSSCIDGQCVNTEGSYNCFCTHPMVLDASEKRCIRPAESNEQIEETDVYQDLCWEHLSDEYVCSRPLVGKQTTYTECCCLYGEAWGMQCALCPLKDSDDYAQLCNIPVTGRRQPYGRDALVDFSEQYTPEADPYFIQDRFLNSFEELQAEECGILNGCENGRCVRVQEGYTCDCFDGYHLDTAKMTCVDVNECDELNNRMSLCKNAKCINTDGSYKCLCLPGYVPSDKPNYCTPLNTALNLEKDSDLE

SEQ ID NO: 51167 - protein, 1395 aa, Homo sapiens
MDTKLMCLLFFFSLPPLLVSNHTGRIKVVFTPSICKVTCTKGSCQNSCEKGNTTTLISENGHAADTLTATNFRVVICHLPCMNGGQCSSRDKCQCPPNFTGKLCQIPVHGASVPKLYQHSQQPGKALGTHVIHSTHTLPLTVTSQQGVKVKFPPNIVNIHVKHPPEASVQIHQVSRIDGPTGQKTKEAQPGQSQVSYQGLPVQKTQTIHSTYSHQQVIPHVYPVAAKTQLGRCFQETIGSQCGKALPGLSKQEDCCGTVGTSWGFNKCQKCPKKPSYHGYNQMMECLPGYKRVNNTFCQDINECQLQGVCPNGECLNTMGSYRCTCKIGFGPDPTFSSCVPDPPVISEEKGPCYRLVSSGRQCMHPLSVHLTKQLCCCSVGKAWGPHCEKCPLPGTAAFKEICPGGMGYTVSGVHRRRPIHHHVGKGPVFVKPKNTQPVAKSTHPPPLPAKEEPVEALTFSREHGPGVAEPEVATAPPEKEIPSLDQEKTKLEPGQPQLSPGISTIHLHPQFPVVIEKTSPPVPVEVAPEASTSSASQVIAPTQVTEINECTVNPDICGAGHCINLPVRYTCICYEGYRFSEQQRKCVDIDECTQVQHLCSQGRCENTEGSFLCICPAGFMASEEGTNCIDVDECLRPDVCGEGHCVNTVGAFRCEYCDSGYRMTQRGRCEDIDECLNPSTCPDEQCVNSPGSYQCVPCTEGFRGWNGQCLDVDECLEPNVCANGDCSNLEGSYMCSCHKGYTRTPDHKHCRDIDECQQGNLCVNGQCKNTEGSFRCTCGQGYQLSAAKDQCEDIDECQHRHLCAHGQCRNTEGSFQCVCDQGYRASGLGDHCEDINECLEDKSVCQRGDCINTAGSYDCTCPDGFQLDDNKTCQDINECEHPGLCGPQGECLNTEGSFHCVCQQGFSISADGRTCEDIDECVNNTVCDSHGFCDNTAGSFRCLCYQGFQAPQDGQGCVDVNECELLSGVCGEAFCENVEGSFLCVCADENQEYSPMTGQCRSRTSTDLDVDVDQPKEEKKECYYNLNDASLCDNVLAPNVTKQECCCTSGVGWGDNCEIFPCPVLGTAEFTEMCPKGKGFVPAGESSSEAGGENYKDADECLLFGQEICKNGFCLNTRPGYECYCKQGTYYDPVKLQCFDMDECQDPSSCIDGQCVNTEGSYNCFCTHPMVLDASEKRCIRPAESNEQIEETDVYQDLCWEHLSDEYVCSRPLVGKQTTYTECCCLYGEAWGMQCALCPLKDSDDYAQLCNIPVTGRRQPYGRDALVDFSEQYTPEADPYFIQDRFLNSFEELQAEECGILNGCENGRCVRVQEGYTCDCFDGYHLDTAKMTCVDVNECDELNNRMSLCKNAKCINTDGSYKCLCLPGYVPSDKPNYCTPLNTALNLEKDSDLE

SEQ ID NO: 51168 - protein, 1353 aa, Homo sapiens
MDTKLMCLLFFFSLPPLLVSNHTGRIKVVFTPSICKVTCTKGSCQNSCEKGNTTTLISENGHAADTLTATNFRVVICHLPCMNGGQCSSRDKCQCPPNFTGKLCQIPVHGASVPKLYQHSQQPGKALGTHVIHSTHTLPLTVTSQQGVKVKFPPNIVNIHVKHPPEASVQIHQVSRIDGPTGQKTKEAQPGQSQVSYQGLPVQKTQTIHSTYSHQQVIPHVYPVAAKTQLGRCFQETIGSQCGKALPGLSKQEDCCGTVGTSWGFNKCQKCPKKPSYHGYNQMMECLPGYKRVNNTFCQDINECQLQGVCPNGECLNTMGSYRCTCKIGFGPDPTFSSCVPDPPVISEEKGPCYRLVSSGRQCMHPLSVHLTKQLCCCSVGKAWGPHCEKCPLPGTAAFKEICPGGMGYTVSGVHRRRPIHHHVGKGPVFVKPKNTQPVAKSTHPPPLPAKEEPVEALTFSREHGPGVAEPEVATAPPEKEIPSLDQEKTKLEPGQPQLSPGISTIHLHPQFPVVIEKTSPPVPVEVAPEASTSSASQVIAPTQVTEINECTVNPDICGAGHCINLPVRYTCICYEGYRFSEQQRKCVDIDECTQVQHLCSQGRCENTEGSFLCICPAGFMASEEGTNCIDVDECLRPDVCGEGHCVNTVGAFRCEYCDSGYRMTQRGRCEDIDECLNPSTCPDEQCVNSPGSYQCVPCTEGFRGWNGQCLDVDECLEPNVCANGDCSNLEGSYMCSCHKGYTRTPDHKHCRDIDECQQGNLCVNGQCKNTEGSFRCTCGQGYQLSAAKDQCEDIDECQHRHLCAHGQCRNTEGSFQCVCDQGYRASGLGDHCEDINECLEDKSVCQRGDCINTAGSYDCTCPDGFQLDDNKTCQDINECEHPGLCGPQGECLNTEGSFHCVCQQGFSISADGRTCEDVNECELLSGVCGEAFCENVEGSFLCVCADENQEYSPMTGQCRSRTSTDLDVDVDQPKEEKKECYYNLNDASLCDNVLAPNVTKQECCCTSGVGWGDNCEIFPCPVLGTAEFTEMCPKGKGFVPAGESSSEAGGENYKDADECLLFGQEICKNGFCLNTRPGYECYCKQGTYYDPVKLQCFDMDECQDPSSCIDGQCVNTEGSYNCFCTHPMVLDASEKRCIRPAESNEQIEETDVYQDLCWEHLSDEYVCSRPLVGKQTTYTECCCLYGEAWGMQCALCPLKDSDDYAQLCNIPVTGRRQPYGRDALVDFSEQYTPEADPYFIQDRFLNSFEELQAEECGILNGCENGRCVRVQEGYTCDCFDGYHLDTAKMTCVDVNECDELNNRMSLCKNAKCINTDGSYKCLCLPGYVPSDKPNYCTPLNTALNLEKDSDLE

SEQ ID NO: 51169 - protein, 1342 aa, Homo sapiens
MDTKLMCLLFFFSLPPLLVSNHTGRIKVVFTPSICKVTCTKGSCQNSCEKGNTTTLISENGHAADTLTATNFRVVICHLPCMNGGQCSSRDKCQCPPNFTGKLCQIPVHGASVPKLYQHSQQPGKALGTHVIHSTHTLPLTVTSQQGVKVKFPPNIVNIHVKHPPEASVQIHQVSRIDGPTGQKTKEAQPGQSQVSYQGLPVQKTQTIHSTYSHQQVIPHVYPVAAKTQLGRCFQETIGSQCGKALPGLSKQEDCCGTVGTSWGFNKCQKCPKKPSYHGYNQMMECLPGYKRVNNTFCQDINECQLQGVCPNGECLNTMGSYRCTCKIGFGPDPTFSSCVPDPPVISEEKGPCYRLVSSGRQCMHPLSVHLTKQLCCCSVGKAWGPHCEKCPLPGTAKEEPVEALTFSREHGPGVAEPEVATAPPEKEIPSLDQEKTKLEPGQPQLSPGISTIHLHPQFPVVIEKTSPPVPVEVAPEASTSSASQVIAPTQVTEINECTVNPDICGAGHCINLPVRYTCICYEGYRFSEQQRKCVDIDECTQVQHLCSQGRCENTEGSFLCICPAGFMASEEGTNCIDVDECLRPDVCGEGHCVNTVGAFRCEYCDSGYRMTQRGRCEDIDECLNPSTCPDEQCVNSPGSYQCVPCTEGFRGWNGQCLDVDECLEPNVCANGDCSNLEGSYMCSCHKGYTRTPDHKHCRDIDECQQGNLCVNGQCKNTEGSFRCTCGQGYQLSAAKDQCEDIDECQHRHLCAHGQCRNTEGSFQCVCDQGYRASGLGDHCEDINECLEDKSVCQRGDCINTAGSYDCTCPDGFQLDDNKTCQDINECEHPGLCGPQGECLNTEGSFHCVCQQGFSISADGRTCEDIDECVNNTVCDSHGFCDNTAGSFRCLCYQGFQAPQDGQGCVDVNECELLSGVCGEAFCENVEGSFLCVCADENQEYSPMTGQCRSRTSTDLDVDVDQPKEEKKECYYNLNDASLCDNVLAPNVTKQECCCTSGVGWGDNCEIFPCPVLGTAEFTEMCPKGKGFVPAGESSSEAGGENYKDADECLLFGQEICKNGFCLNTRPGYECYCKQGTYYDPVKLQCFDMDECQDPSSCIDGQCVNTEGSYNCFCTHPMVLDASEKRCIRPAESNEQIEETDVYQDLCWEHLSDEYVCSRPLVGKQTTYTECCCLYGEAWGMQCALCPLKDSDDYAQLCNIPVTGRRQPYGRDALVDFSEQYTPEADPYFIQDRFLNSFEELQAEECGILNGCENGRCVRVQEGYTCDCFDGYHLDTAKMTCVDVNECDELNNRMSLCKNAKCINTDGSYKCLCLPGYVPSDKPNYCTPLNTALNLEKDSDLE

SEQ ID NO: 51170 - protein, 1821 aa, Homo sapiens
MRPRTKARSPGRALRNPWRGFLPLTLALFVGAGHAQRDPVGRYEPAGGDANRLRRPGGSYPAAAAAKVYSLFREQDAPVAGLQPVERAQPGWGSPRRPTEAEARRPSRAQQSRRVQPPAQTRRSTPLGQQQPAPRTRAAPALPRLGTPQRSGAAPPTPPRGRLTGRNVCGGQCCPGWTTANSTNHCIKPVCEPPCQNRGSCSRPQLCVCRSGFRGARCEEVIPDEEFDPQNSRLAPRRWAERSPNLRRSSAAGEGTLARAQPPAPQSPPAPQSPPAGTLSGLSQTHPSQQHVGLSRTVRLHPTATASSQLSSNALPPGPGLEQRDGTQQAVPLEHPSSPWGLNLTEKIKKIKIVFTPTICKQTCARGHCANSCERGDTTTLYSQGGHGHDPKSGFRIYFCQIPCLNGGRCIGRDECWCPANSTGKFCHLPIPQPDREPPGRGSRPRALLEAPLKQSTFTLPLSNQLASVNPSLVKVHIHHPPEASVQIHQVAQVRGGVEEALVENSVETRPPPWLPASPGHSLWDSNNIPARSGEPPRPLPPAAPRPRGLLGRCYLNTVNGQCANPLLELTTQEDCCGSVGAFWGVTLCAPCPPRPASPVIENGQLECPQGYKRLNLTHCQDINECLTLGLCKDAECVNTRGSYLCTCRPGLMLDPSRSRCVSDKAISMLQGLCYRSLGPGTCTLPLAQRITKQICCCSRVGKAWGSECEKCPLPGTEAFREICPAGHGYTYASSDIRLSMRKAEEEELARPPREQGQRSSGALPGPAERQPLRVVTDTWLEAGTIPDKGDSQAGQVTTSVTHAPAWVTGNATTPPMPEQGIAEIQEEQVTPSTDVLVTLSTPGIDRCAAGATNVCGPGTCVNLPDGYRCVCSPGYQLHPSQAYCTDDNECLRDPCKGKGRCINRVGSYSCFCYPGYTLATSGATQECQDINECEQPGVCSGGQCTNTEGSYHCECDQGYIMVRKGHCQDINECRHPGTCPDGRCVNSPGSYTCLACEEGYRGQSGSCVDVNECLTPGVCAHGKCTNLEGSFRCSCEQGYEVTSDEKGCQDVDECASRASCPTGLCLNTEGSFACSACENGYWVNEDGTACEDLDECAFPGVCPSGVCTNTAGSFSCKDCDGGYRPSPLGDSCEDVDECEDPQSSCLGGECKNTVGSYQCLCPQGFQLANGTVCEDVNECMGEEHCAPHGECLNSHGSFFCLCAPGFVSAEGGTSCQDVDECATTDPCVGGHCVNTEGSFNCLCETGFQPSPESGECVDIDECEDYGDPVCGTWKCENSPGSYRCVLGCQPGFHMAPNGDCIDIDECANDTMCGSHGFCDNTDGSFRCLCDQGFEISPSGWDCVDVNECELMLAVCGAALCENVEGSFLCLCASDLEEYDAQEGHCRPRGAGGQSMSEAPTGDHAPAPTRMDCYSGQKGHAPCSSVLGRNTTQAECCCTQGASWGDACDLCPSEDSAEFSEICPSGKGYIPVEGAWTFGQTMYTDADECVIFGPGLCPNGRCLNTVPGYVCLCNPGFHYDASHKKCEDHDECQDLACENGECVNTEGSFHCFCSPPLTLDLSQQRCMNSTSSTEDLPDHDIHMDICWKKVTNDVCSEPLRGHRTTYTECCCQDGEAWSQQCALCPPRSSEVYAQLCNVARIEAEREAGVHFRPGYEYGPGPDDLHYSIYGPDGAPFYNYLGPEDTVPEPAFPNTAGHSADRTPILESPLQPSELQPHYVASHPEPPAGFEGLQAEECGILNGCENGRCVRVREGYTCDCFEGFQLDAAHMACVDVNECDDLNGPAVLCVHGYCENTEGSYRCHCSPGYVAEAGPPHCTAKE

SEQ ID NO: 51171 - protein, 1303 aa, Homo sapiens
MPGPRGAAGGLAPEMRGAGAAGLLALLLLLLLLLLGLGGRVEGGPAGERGAGGGGALARERFKVVFAPVICKRTCLKGQCRDSCQQGSNMTLIGENGHSTDTLTGSGFRVVVCPLPCMNGGQCSSRNQCLCPPDFTGRFCQVPAGGAGGGTGGSGPGLSRTGALSTGALPPLAPEGDSVASKHAIYAVQVIADPPGPGEGPPAQHAAFLVPLGPGQISAEVQAPPPVVNVRVHHPPEASVQVHRIESSNAESAAPSQHLLPHPKPSHPRPPTQKPLGRCFQDTLPKQPCGSNPLPGLTKQEDCCGSIGTAWGQSKCHKCPQLQYTGVQKPGPVRGEVGADCPQGYKRLNSTHCQDINECAMPGVCRHGDCLNNPGSYRCVCPPGHSLGPSRTQCIADKPEEKSLCFRLVSPEHQCQHPLTTRLTRQLCCCSVGKAWGARCQRCPTDGTAAFKEICPAGKGYHILTSHQTLTIQGESDFSLFLHPDGPPKPQQLPESPSQAPPPEDTEEERGVTTDSPVSEERSVQQSHPTATTTPARPYPELISRPSPPTMRWFLPDLPPSRSAVEIAPTQVTETDECRLNQNICGHGECVPGPPDYSCHCNPGYRSHPQHRYCVDVNECEAEPCGPGRGICMNTGGSYNCHCNRGYRLHVGAGGRSCVDLNECAKPHLCGDGGFCINFPGHYKCNCYPGYRLKASRPPVCEDIDECRDPSSCPDGKCENKPGSFKCIACQPGYRSQGGGACRDVNECAEGSPCSPGWCENLPGSFRCTCAQGYAPAPDGRSCLDVDECEAGDVCDNGICSNTPGSFQCQCLSGYHLSRDRSHCEDIDECDFPAACIGGDCINTNGSYRCLCPQGHRLVGGRKCQDIDECSQDPSLCLPHGACKNLQGSYVCVCDEGFTPTQDQHGCEEVEQPHHKKECYLNFDDTVFCDSVLATNVTQQECCCSLGAGWGDHCEIYPCPVYSSAEFHSLCPDGKGYTQDNNIVNYGIPAHRDIDECMLFGSEICKEGKCVNTQPGYECYCKQGFYYDGNLLECVDVDECLDESNCRNGVCENTRGGYRCACTPPAEYSPAQRQCLSPEEMDVDECQDPAACRPGRCVNLPGSYRCECRPPWVPGPSGRDCQLPESPAERAPERRDVCWSQRGEDGMCAGPLAGPALTFDDCCCRQGRGWGAQCRPCPPRGAGSHCPTSQSESNSFWDTSPLLLGKPPRDEDSSEEDSDECRCVSGRCVPRPGGAVCECPGGFQLDASRARCVDIDECRELNQRGLLCKSERCVNTSGSFRCVCKAGFARSRPHGACVPQRRR

SEQ ID NO: 51172 - protein, 263 aa, Homo sapiens
MLFGSEICKEGKCVNTQPGYECYCKQGFYYDGNLLECVDVDECLDESNCRNGVCENTRGGYRCACTPPAEYSPAQRQCLSPEEMDVDECQDPAACRPGRCVNLPGSYRCECRPPWVPGPSGRDCQLPESPAERAPERRDVCWSQRGEDGMCAGPLAGPALTFDDCCCRQGRGWGAQCRPCPPRGAGSHCPTSQSESNSFWDTSPLLLGKPPRDEDSSEEDSDECRCVSAAACRGRAAPCASVPAASSSTPPAPAAWISTSAES

SEQ ID NO: 51173 - protein, 1256 aa, Homo sapiens
MPGPRGAAGGLAPEMRGAGAAGLLALLLLLLLLLLGLGGRVEGGPAGERGAGGGGALARERFKVVFAPVICKRTCLKGQCRDSCQQGSNMTLIGENGHSTDTLTGSGFRVVVCPLPCMNGGQCSSRNQCLCPPDFTGRFCQVPAGGAGGGTGGSGPGLSRTGALSTGALPPLAPEGDSVASKHAIYAVQVIADPPGPGEGPPAQHAAFLVPLGPGQISAEVQAPPPVVNVRVHHPPEASVQVHRIESSNAESAAPSQHLLPHPKPSHPRPPTQKPLGRCFQDTLPKQPCGSNPLPGLTKQEDCCGSIGTAWGQSKCHKCPQLQYTGVQKPGPVRGEVGADCPQGYKRLNSTHCQDINECAMPGVCRHGDCLNNPGSYRCVCPPGHSLGPSRTQCIADKPEEKSLCFRLVSPEHQCQHPLTTRLTRQLCCCSVGKAWGARCQRCPTDGTAAFKEICPAGKGYHILTSHQTLTIQGESDFSLFLHPDGPPKPQQLPESPSQAPPPEDTEEERGVTTDSPVSEERSVQQSHPTATTTPARPYPELISRPSPPTMRWFLPDLPPSRSAVEIAPTQVTETDECRLNQNICGHGECVPGPPDYSCHCNPGYRSHPQHRYCVDVNECEAEPCGPGRGICMNTGGSYNCHCNRGYRLHVGAGGRSCVDLNECAKPHLCGDGGFCINFPGHYKCNCYPGYRLKASRPPVCEDIDECRDPSSCPDGKCENKPGSFKCIACQPGYRSQGGGACRDVNECAEGSPCSPGWCENLPGSFRCTCAQGYAPAPDGRSCLDVDECEAGDVCDNGICSNTPGSFQCQCLSGYHLSRDRSHCEDIDECDFPAACIGGDCINTNGSYRCLCPQGHRLVGGRKCQDIDECSQDPSLCLPHGACKNLQGSYVCVCDEGFTPTQDQHGCEEVEQPHHKKECYLNFDDTVFCDSVLATNVTQQECCCSLGAGWGDHCEIYPCPVYSSAEFHSLCPDGKGYTQDNNIVNYGIPAHRDIDECMLFGSEICKEGKCVNTQPGYECYCKQGFYYDGNLLECVDVDECLDESNCRNGVCENTRGGYRCACTPPAEYSPAQRQCLSPEEMERAPERRDVCWSQRGEDGMCAGPLAGPALTFDDCCCRQGRGWGAQCRPCPPRGAGSHCPTSQSESNSFWDTSPLLLGKPPRDEDSSEEDSDECRCVSGRCVPRPGGAVCECPGGFQLDASRARCVDIDECRELNQRGLLCKSERCVNTSGSFRCVCKAGFARSRPHGACVPQRRR

SEQ ID NO: 51174 - protein, 306 aa, Homo sapiens
MLFGSEICKEGKCVNTQPGYECYCKQGFYYDGNLLECVDVDECLDESNCRNGVCENTRGGYRCACTPPAEYSPAQRQCLSPEEMDVDECQDPAACRPGRCVNLPGSYRCECRPPWVPGPSGRDCQLPESPAERAPERRDVCWSQRGEDGMCAGPLAGPALTFDDCCCRQGRGWGAQCRPCPPRGAGSHCPTSQSESNSFWDTSPLLLGKPPRDEDSSEEDSDECRCVSGRCVPRPGGAVCECPGGFQLDASRARCVDIDECRELNQRGLLCKSERCVNTSGSFRCVCKAGFARSRPHGACVPQRRR

SEQ ID NO: 51175 - protein, 1137 aa, Homo sapiens
MTLIGENGHSTDTLTGSGFRVVVCPLPCMNGGQCSSRNQCLCPPDFTGRFCQVPAGGAGGGTGGSGPGLSRTGALSTGALPPLAPEGDSVASKHAIYAVQVIADPPGPGEGPPAQHAAFLVPLGPGQISAEVQAPPPVVNVRVHHPPEASVQVHRIESSNAESAAPSQHLLPHPKPSHPRPPTQKPLGRCFQDTLPKQPCGSNPLPGLTKQEDCCGSIGTAWGQSKCHKCPQLQYTGVQKPGPVRGEVGADCPQGYKRLNSTHCQDINECAMPGVCRHGDCLNNPGSYRCVCPPGHSLGPSRTQCIADKPEEKSLCFRLVSPEHQCQHPLTTRLTRQLCCCSVGKAWGARCQRCPTDGTAAFKEICPAGKGYHILTSHQTLTIQGESDFSLFLHPDGPPKPQQLPESPSQAPPPEDTEEERGVTTDSPVSEERSVQQSHPTATTTPARPYPELISRPSPPTMRWFLPDLPPSRSAVEIAPTQVTETDECRLNQNICGHGECVPGPPDYSCHCNPGYRSHPQHRYCVDVNECEAEPCGPGRGICMNTGGSYNCHCNRGYRLHVGAGGRSCVDLNECAKPHLCGDGGFCINFPGHYKCNCYPGYRLKASRPPVCEDIDECRDPSSCPDGKCENKPGSFKCIACQPGYRSQGGGACRDVNECAEGSPCSPGWCENLPGSFRCTCAQGYAPAPDGRSCLDVDECEAGDVCDNGICSNTPGSFQCQCLSGYHLSRDRSHCEDIDECDFPAACIGGDCINTNGSYRCLCPQGHRLVGGRKCQDIDECSQDPSLCLPHGACKNLQGSYVCVCDEGFTPTQDQHGCEEVEQPHHKKECYLNFDDTVFCDSVLATNVTQQECCCSLGAGWGDHCEIYPCPVYSSAEFHSLCPDGKGYTQDNNIVNYGIPAHRDIDECMLFGSEICKEGKCVNTQPGYECYCKQGFYYDGNLLECVDVDECLDESNCRNGVCENTRGGYRCACTPPAEYSPAQRQCLSPEEMDVDECQDPAACRPGRCVNLPGSYRCECRPPWVPGPSGRDCQLPESPAERAPERRDVCWSQRGEDGMCAGPLAGPALTFDDCCCRQGRGWGAQCRPCPPRGAGSHCPTSQSESNSFWDTSPLLLGKPPRDEDSSEEDSDECRCVSG

SEQ ID NO: 51176 - protein, 733 aa, Homo sapiens
MPAETDECRLNQNICGHGECVPGPPDYSCHCNPGYRSHPQHRYCVDVNECEAEPCGPGRGICMNTGGSYNCHCNRGYRLHVGAGGRSCVDLNECAKPHLCGDGGFCINFPGHYKCNCYPGYRLKASRPPVCEDIDECRDPSSCPDGKCENKPGSFKCIACQPGYRSQGGGACRDVNECAEGSPCSPGWCENLPGSFRCTCAQGYAPAPDGRSCLDVDECEAGDVCDNGICSNTPGSFQCQCLSGYHLSRDRSHCEDIDECDFPAACIGGDCINTNGSYRCLCPQGHRLVGGRKCQDIDECSQDPSLCLPHGACKNLQGSYVCVCDEGFTPTQDQHGCEEVEQPHHKKECYLNFDDTVFCDSVLATNVTQQECCCSLGAGWGDHCEIYPCPVYSSAEFHSLCPDGKGYTQDNNIVNYGIPAHRDIDECMLFGSEICKEGKCVNTQPGYECYCKQGFYYDGNLLECVDVDECLDESNCRNGVCENTRGGYRCACTPPAEYSPAQRQCLSPEEMDVDECQDPAACRPGRCVNLPGSYRCECRPPWVPGPSGRDCQLPESPAERAPERRDVCWSQRGEDGMCAGPLAGPALTFDDCCCRQGRGWGAQCRPCPPRGAGSHCPTSQSESNSFWDTSPLLLGKPPRDEDSSEEDSDECRCVSGRCVPRPGGAVCECPGGFQLDASRARCVDIDECRELNQRGLLCKSERCVNTSGSFRCVCKAGFARSRPHGACVPQRRR

SEQ ID NO: 51177 - protein, 882 aa, Homo sapiens
MTLIGENGHSTDTLTGSGFRVADKPEEKSLCFRLVSPEHQCQHPLTTRLTRQLCCCSVGKAWGARCQRCPTDGTAAFKEICPAGKGYHILTSHQTLTIQGESDFSLFLHPDGPPKPQQLPESPSQAPPPEDTEEERGVTTDSPVSEERSVQQSHPTATTTPARPYPELISRPSPPTMRWFLPDLPPSRSAVEIAPTQVTETDECRLNQNICGHGECVPGPPDYSCHCNPGYRSHPQHRYCVDVNECEAEPCGPGRGICMNTGGSYNCHCNRGYRLHVGAGGRSCVDLNECAKPHLCGDGGFCINFPGHYKCNCYPGYRLKASRPPVCEDIDECRDPSSCPDGKCENKPGSFKCIACQPGYRSQGGGACRDVNECAEGSPCSPGWCENLPGSFRCTCAQGYAPAPDGRSCLDVDECEAGDVCDNGICSNTPGSFQCQCLSGYHLSRDRSHCEDIDECDFPAACIGGDCINTNGSYRCLCPQGHRLVGGRKCQDIDECSQDPSLCLPHGACKNLQGSYVCVCDEGFTPTQDQHGCEEVEQPHHKKECYLNFDDTVFCDSVLATNVTQQECCCSLGAGWGDHCEIYPCPVYSSAEFHSLCPDGKGYTQDNNIVNYGIPAHRDIDECMLFGSEICKEGKCVNTQPGYECYCKQGFYYDGNLLECVDVDECLDESNCRNGVCENTRGGYRCACTPPAEYSPAQRQCLSPEEMERAPERRDVCWSQRGEDGMCAGPLAGPALTFDDCCCRQGRGWGAQCRPCPPRGAGSHCPTSQSESNSFWDTSPLLLGKPPRDEDSSEEDSDECRCVSGRCVPRPGGAVCECPGGFQLDASRARCVDIDECRELNQRGLLCKSERCVNTSGSFRCVCKAGFARSRPHGACVPQRRR

SEQ ID NO: 51178 - protein, 1586 aa, Homo sapiens
MGDVKALLFVAAARARRLGGAAASESLAVSEAFCRVRSCQPKKCAGPQRCLNPVPAVPSPSPSVRKRQVSLNWQPLTLQEARALLKRRRPRGPGGRGLLRRRPPQRAPAGKAPVLCPLICHNGGVCVKPDRCLCPPDFAGKFCQLHSSGARPPAPAVPGLTRSVYTMPLANHRDDEHGVASMVSVHVEHPQEASVVVHQVERVSGPWEEADAEAVARAEAAARAEAAAPYTVLAQSAPREDGYSDASGFGYCFRELRGGECASPLPGLRTQEVCCRGAGLAWGVHDCQLCSERLGNSERVSAPDGPCPTGFERVNGSCEDVDECATGGRCQHGECANTRGGYTCVCPDGFLLDSSRSSCISQHVISEAKGPCFRVLRDGGCSLPILRNITKQICCCSRVGKAWGRGCQLCPPFGSEGFREICPAGPGYHYSASDLRYNTRPLGQEPPRVSLSQPRTLPATSRPSAGFLPTHRLEPRPEPRPDPRPGPELPLPSIPAWTGPEIPESGPSSGMCQRNPQVCGPGRCISRPSGYTCACDSGFRLSPQGTRCIDVDECRRVPPPCAPGRCENSPGSFRCVCGPGFRAGPRAAECLDVDECHRVPPPCDLGRCENTPGSFLCVCPAGYQAAPHGASCQDVDECTQSPGLCGRGACKNLPGSFRCVCPAGFRGSACEEDVDECAQEPPPCGPGRCDNTAGSFHCACPAGFRSRGPGAPCQDVDECARSPPPCTYGRCENTEGSFQCVCPMGFQPNTAGSECEDVDECENHLACPGQECVNSPGSFQCRTCPSGHHLHRGRCTDVDECSSGAPPCGPHGHCTNTEGSFRCSCAPGYRAPSGRPGPCADVNECLEGDFCFPHGECLNTDGSFACTCAPGYRPGPRGASCLDVDECSEEDLCQSGICTNTDGSFECICPPGHRAGPDLASCLDVDECRERGPALCGSQRCENSPGSYRCVRDCDPGYHAGPEGTCDDVDECQEYGPEICGAQRCENTPGSYRCTPACDPGYQPTPGGGCQDVDECRNRSFCGAHAVCQNLPGSFQCLCDQYEGARDGRHCVDVNECETLQGVCGAALCENVEGSFLCVCPNSPEEFDPMTGRCVPPRTSAGTFPGSQPQAPASPVLPARPPPPPLPRRPSTPRQGPVGSGRRECYFDTAAPDACDNILARNVTWQECCCTVGEGWGSGCRIQQCPGTETAEYQSLCPHGRGYLAPSGDLSLRRDVDECQLFRDQVCKSGVCVNTAPGYSCYCSNGYYYHTQRLECIDNDECADEEPACEGGRCVNTVGSYHCTCEPPLVLDGSQRRCVSNESQSLDDNLGVCWQEVGADLVCSHPRLDRQATYTECCCLYGEAWGMDCALCPAQDSDDFEALCNVLRPPAYSPPRPGGFGLPYEYGPDLGPPYQGLPYGPELYPPPALPYDPYPPPPGPFARREAPYGAPRFDMPDFEDDGGPYGESEAPAPPGPGTRWPYRSRDTRRSFPEPEEPPEGGSYAGSLAEPYEELEAEECGILDGCTNGRCVRVPEGFTCRCFDGYRLDMTRMACVDINECDEAEAASPLCVNARCLNTDGSFRCICRPGFAPTHQPHHCAPARPRA

SEQ ID NO: 51179 - protein, 186 aa, Homo sapiens
MLGGAGGGPGLRTPCPADVDECSEEDLCQSGICTNTDGSFECICPPGHRAGPDLASCLDVDECRERGPALCGSQRCENSPGSYRCVRDCDPGYHAGPEGTCDDVDECRNRSFCGAHAVCQNLPGSFQCLCDQYEGARDGRHCVDVNECETLQGVCGAALCENVEGSFLCVCPNSPEEFDPMTGRCV

SEQ ID NO: 51180 - protein, 1623 aa, Homo sapiens
MPRPGTSGRRPLLLVLLLPLFAAATSAASPSPSPSQVVEVPGVPSRPASVAVCRCCPGQTSRRSRCIRAFCRVRSCQPKKCAGPQRCLNPVPAVPSPSPSVRKRQVSLNWQPLTLQEARALLKRRRPRGPGGRGLLRRRPPQRAPAGKAPVLCPLICHNGGVCVKPDRCLCPPDFAGKFCQLHSSGARPPAPAVPGLTRSVYTMPLANHRDDEHGVASMVSVHVEHPQEASVVVHQVERVSGPWEEADAEAVARAEAAARAEAAAPYTVLAQSAPREDGYSDASGFGYCFRELRGGECASPLPGLRTQEVCCRGAGLAWGVHDCQLCSERLGNSERVSAPDGPCPTGFERVNGSCEDVDECATGGRCQHGECANTRGGYTCVCPDGFLLDSSRSSCISQHVISEAKGPCFRVLRDGGCSLPILRNITKQICCCSRVGKAWGRGCQLCPPFGSEGFREICPAGPGYHYSASDLRYNTRPLGQEPPRVSLSQPRTLPATSRPSAGFLPTHRLEPRPEPRPDPRPGPELPLPSIPAWTGPEIPESGPSSGMCQRNPQVCGPGRCISRPSGYTCACDSGFRLSPQGTRCIDVDECRRVPPPCAPGRCENSPGSFRCVCGPGFRAGPRAAECLDVDECHRVPPPCDLGRCENTPGSFLCVCPAGYQAAPHGASCQDVDECTQSPGLCGRGACKNLPGSFRCVCPAGFRGSACEEDVDECAQEPPPCGPGRCDNTAGSFHCACPAGFRSRGPGAPCQDVDECARSPPPCTYGRCENTEGSFQCVCPMGFQPNTAGSECEDVDECENHLACPGQECVNSPGSFQCRTCPSGHHLHRGRCTDVDECSSGAPPCGPHGHCTNTEGSFRCSCAPGYRAPSGRPGPCADVNECLEGDFCFPHGECLNTDGSFACTCAPGYRPGPRGASCLDVDECSEEDLCQSGICTNTDGSFECICPPGHRAGPDLASCLDVDECRERGPALCGSQRCENSPGSYRCVRDCDPGYHAGPEGTCDDVDECQEYGPEICGAQRCENTPGSYRCTPACDPGYQPTPGGGCQDVDECRNRSFCGAHAVCQNLPGSFQCLCDQYEGARDGRHCVDVNECETLQGVCGAALCENVEGSFLCVCPNSPEEFDPMTGRCVPPRTSAGTFPGSQPQAPASPVLPARPPPPPLPRRPSTPRQGPVGSGRRECYFDTAAPDACDNILARNVTWQECCCTVGEGWGSGCRIQQCPGTETAEYQSLCPHGRGYLAPSGDLSLRRDVDECQLFRDQVCKSGVCVNTAPGYSCYCSNGYYYHTQRLECIDNDECADEEPACEGGRCVNTVGSYHCTCEPPLVLDGSQRRCVSNESQSLDDNLGVCWQEVGADLVCSHPRLDRQATYTECCCLYGEAWGMDCALCPAQDSDDFEALCNVLRPPAYSPPRPGGFGLPYEYGPDLGPPYQGLPYGPELYPPPALPYDPYPPPPGPFARREAPYGAPRFDMPDFEDDGGPYGESEAPAPPGPGTRWPYRSRDTRRSFPEPEEPPEGGSYAGSLAEPYEELEAEECGILDGCTNGRCVRVPEGFTCRCFDGYRLDMTRMACVDINECDEAEAASPLCVNARCLNTDGSFRCICRPGFAPTHQPHHCAPARPRA

SEQ ID NO: 51181 - protein, 384 aa, Homo sapiens
MTGRCVPPRTSADVDECQLFRDQVCKSGVCVNTAPGYSCYCSNGYYYHTQRLECIDNDECADEEPACEGGRCVNTVGSYHCTCEPPLVLDGSQRRCVSNESQSLDDNLGVCWQEVGADLVCSHPRLDRQATYTECCCLYGEAWGMDCALCPAQDSDDFEALCNVLRPPAYSPPRPGGFGLPYEYGPDLGPPYQGLPYGPELYPPPALPYDPYPPPPGPFARREAPYGAPRFDMPDFEDDGGPYGESEAPAPPGPGTRWPYRSRDTRRSFPEPEEPPEGGSYAGSLAEPYEELEAEECGILDGCTNGRCVRVPEGFTCRCFDGYRLDMTRMACVDINECDEAEAASPLCVNARCLNTDGSFRCICRPGFAPTHQPHHCAPARPRA

SEQ ID NO: 51182 - protein, 1556 aa, Homo sapiens
MAGGVRLLWVSLLVLLAQLGPQPGLGRLGERLRVRFTPVVCGLRCVHGPTGSRCTPTCAPRNATSVDSGAPGGAAPGGPGFRAFLCPLICHNGGVCVKPDRCLCPPDFAGKFCQLHSSGARPPAPAVPGLTRSVYTMPLANHRDDEHGVASMVSVHVEHPQEASVVVHQVERVSGPWEEADAEAVARAEAAARAEAAAPYTVLAQSAPREDGYSDASGFGYCFRELRGGECASPLPGLRTQEVCCRGAGLAWGVHDCQLCSERLGNSERVSAPDGPCPTGFERVNGSCEDVDECATGGRCQHGECANTRGGYTCVCPDGFLLDSSRSSCISQHVISEAKGPCFRVLRDGGCSLPILRNITKQICCCSRVGKAWGRGCQLCPPFGSEGFREICPAGPGYHYSASDLRYNTRPLGQEPPRVSLSQPRTLPATSRPSAGFLPTHRLEPRPEPRPDPRPGPELPLPSIPAWTGPEIPESGPSSGMCQRNPQVCGPGRCISRPSGYTCACDSGFRLSPQGTRCIDVDECRRVPPPCAPGRCENSPGSFRCVCGPGFRAGPRAAECLDVDECHRVPPPCDLGRCENTPGSFLCVCPAGYQAAPHGASCQDVDECTQSPGLCGRGACKNLPGSFRCVCPAGFRGSACEEDVDECAQEPPPCGPGRCDNTAGSFHCACPAGFRSRGPGAPCQDVDECARSPPPCTYGRCENTEGSFQCVCPMGFQPNTAGSECEDVDECENHLACPGQECVNSPGSFQCRTCPSGHHLHRGRCTDVDECSSGAPPCGPHGHCTNTEGSFRCSCAPGYRAPSGRPGPCADVNECLEGDFCFPHGECLNTDGSFACTCAPGYRPGPRGASCLDVDECSEEDLCQSGICTNTDGSFECICPPGHRAGPDLASCLDVDECRERGPALCGSQRCENSPGSYRCVRDCDPGYHAGPEGTCDDVDECQEYGPEICGAQRCENTPGSYRCTPACDPGYQPTPGGGCQDVDECRNRSFCGAHAVCQNLPGSFQCLCDQYEGARDGRHCVDVNECETLQGVCGAALCENVEGSFLCVCPNSPEEFDPMTGRCVPPRTSAGTFPGSQPQAPASPVLPARPPPPPLPRRPSTPRQGPVGSGRRECYFDTAAPDACDNILARNVTWQECCCTVGEGWGSGCRIQQCPGTETAEYQSLCPHGRGYLAPSGDLSLRRDVDECQLFRDQVCKSGVCVNTAPGYSCYCSNGYYYHTQRLECIDNDECADEEPACEGGRCVNTVGSYHCTCEPPLVLDGSQRRCVSNESQSLDDNLGVCWQEVGADLVCSHPRLDRQATYTECCCLYGEAWGMDCALCPAQDSDDFEALCNVLRPPAYSPPRPGGFGLPYEYGPDLGPPYQGLPYGPELYPPPALPYDPYPPPPGPFARREAPYGAPRFDMPDFEDDGGPYGESEAPAPPGPGTRWPYRSRDTRRSFPEPEEPPEGGSYAGSLAEPYEELEAEECGILDGCTNGRCVRVPEGFTCRCFDGYRLDMTRMACVDINECDEAEAASPLCVNARCLNTDGSFRCICRPGFAPTHQPHHCAPARPRA

SEQ ID NO: 51183 - protein, 899 aa, Homo sapiens
MCQRNPQVCGPGRCISRPSGYTCACDSGFRLSPQGTRCIDVDECRRVPPPCAPGRCENSPGSFRCVCGPGFRAGPRAAECLDVDECHRVPPPCDLGRCENTPGSFLCVCPAGYQAAPHGASCQDVDECTQSPGLCGRGACKNLPGSFRCVCPAGFRGSACEEDVDECAQEPPPCGPGRCDNTAGSFHCACPAGFRSRGPGAPCQDVDECARSPPPCTYGRCENTEGSFQCVCPMGFQPNTAGSECEDVDECENHLACPGQECVNSPGSFQCRTCPSGHHLHRGRCTDVDECSSGAPPCGPHGHCTNTEGSFRCSCAPGYRAPSGRPGPCADVNECLEGDFCFPHGECLNTDGSFACTCAPGYRPGPRGASCLDVDECSEEDLCQSGICTNTDGSFECICPPGHRAGPDLASCLDVDECRERGPALCGSQRCENSPGSYRCVRDCDPGYHAGPEGTCDDVNECETLQGVCGAALCENVEGSFLCVCPNSPEEFDPMTGRCVPPRTSAGTFPGSQPQAPASPVLPARPPPPPLPRRPSTPRQGPVGSGRRECYFDTAAPDACDNILARNVTWQECCCTVGEGWGSGCRIQQCPGTETAEYQSLCPHGRGYLAPSGDLSLRRDVDECQLFRDQVCKSGVCVNTAPGYSCYCSNGYYYHTQRLECIDNDECADEEPACEGGRCVNTVGSYHCTCEPPLVLDGSQRRCVSNESQSLDDNLGVCWQEVGADLVCSHPRLDRQATYTECCCLYGEAWGMDCALCPAQDSDDFEALCNVLRPPAYSPPRPGGFGLPYEYGPDLGPPYQGLPYGPELYPPPALPYDPYPPPPGPFARREAPYGAPRFDMPDFEDDGGPYGESEAPAPPGPGTRWPYRSRDTRRSFPEPEEPPEGGSYAGSLAEPYEEL

SEQ ID NO: 51184 - protein, 212 aa, Homo sapiens
MWTSATACRRRVTSGAARTRQAASCACAPPGTRLHRTEPAARMWMSVPEAPHPAPTAGVRTQKAASSVSAPWASNPTLLAPNVDECENHLACPGQECVNSPGSFQCRTCPSGHHLHRGRCTDVDECSSGAPPCGPHGHCTNTEGSFRCSCAPGYRAPSGRPGPCADVNECLEGDFCFPHGECLNTDGSFACTCAPGYRPGPRGASCLGSYPG

SEQ ID NO: 51185 - protein, 222 aa, Homo sapiens
MEIPPTNYPASRAALVAQNYINYQQGTPHRVFEVQKVKQASMEDIPGRGHKYHLKFAVEEIIQKQVKVNCTAEVLYPSTGQETAPEVNFTFEGETGKNPDEEDNTFYQRLKSMKEPLEAQNIPDNFGNVSPEMTLVLHLAWVACGYIIWQNSTEDTWYKMVKIQTVKQVQRNDDFIELDYTILLHNIASQEIIPWQMQVLWHPQYGTKVKHNSRLPKEVQLE

SEQ ID NO: 51186 - protein, 295 aa, Homo sapiens
MGLPVSWAPPALWVLGCCALLLSLWALCTACRRPEDAVAPRKRARRQRARLQGSATAAEASLLRRTHLCSLSKSDTRLHELHRGPRSSRALRPASMDLLRPHWLEVSRDITGPQAAPSAFPHQELPRALPAAAATAGCAGLEATYSNVGLAALPGVSLAASPVVAEYARVQKRKGTHRSPQEPQQGKTEVTPAAQVDVLYSRVCKPKRRDPGPTTDPLDPKGQGAILALAGDLAYQTLPLRALDVDSGPLENVYESIRELGDPAGRSSTCGAGTPPASSCPSLGRGWRPLPASLP

SEQ ID NO: 51187 - protein, 107 aa, Homo sapiens
MGLPVSWAPPALWVLGCCALLLSLWALCTACRRPEDAVAPRKRARRQRARLQGSATAAEASLLRRTHLCSLSKSDTRLHELHRGPRSSRALRPASMDLLRPHWLEVS

SEQ ID NO: 51188 - protein, 697 aa, Homo sapiens
MGERAGSPGTDQERKAGKHHYSYLSDFETPQSSGRSSLVSSSPASVRRKNPKRQTSDGQVHHQAPRKPSPKGLPNRKGVRVGFRSQSLNREPLRKDTDLVTKRILSARLLKINELQNEVSELQVKLAELLKENKSLKRLQYRQEKALNKFEDAENEISQLIFRHNNEITALKERLRKSQEKERATEKRVKDTESELFRTKFSLQKLKEISEARHLPERDDLAKKLVSAELKLDDTERRIKELSKNLELSTNSFQRQLLAERKRAYEAHDENKVLQKEVQRLYHKLKEKERELDIKNIYSNRLPKSSPNKEKELALRKNAACQSDFADLCTKGVQTMEDFKPEEYPLTPETIMCYENKWEEPGHLTLDLQSQKQDRHGEAGILNPIMEREEKFVTDEELHVVKQEVEKLEDEWEREELDKKQKEKASLLEREEKPEWETGRYQLGMYPIQNMDKLQGEEEERLKREMLLAKLNEIDRELQDSRNLKYPVLPLLPDFESKLHSPERSPKTYRFSESSERLFNGHHLQDISFSTPKGEGQNSGNVRSPASPNEFAFGSYVPSFAKTSERSNPFSQKSSFLDFQRNSMEKLSKDGVDLITRKEKKANLMEQLFGASGSSTISSKSSDPNSVASSKGDIDPLNFLPGNKGSRDQEHDEDEGFFLSEGRSFNPNRHRLKHADDKPAVKAADSVEDEIEEVALR

SEQ ID NO: 51189 - protein, 697 aa, Homo sapiens; identical to SEQ ID NO: 51188

SEQ ID NO: 51190 - protein, 230 aa, Homo sapiens
MKNPMLEVVSLLLEKLLLISNFTLFSSGAAGEDKGRNSFYETSSFHRGDVLEVPRTHLTHYGIYLGDNRVAHMMPDILLALTDDMGRTQKVVSNKRLILGVIVKVASIRVDTVEDFAYGANILVNHLDESLQKKALLNEEVARRAEKLLGFTPYSLLWNNCEHFVTYCRYGTPISPQSDKFCETVKIIIRDQRSVLASAVLGLASIVCTGLVSYTTLPAIFIPFFLWMAG

SEQ ID NO: 51191 - protein, 69 aa, Homo sapiens
MKNPMLEVVSLLLEKLLLISNFTLFSSGAAGEDKGRNSFYETSSFHRGDVLEVPRTHLTHYGIYLGDNR

SEQ ID NO: 51192 - protein, 230 aa, Homo sapiens; identical to SEQ ID NO: 51190

SEQ ID NO: 51193 - protein, 135 aa, Homo sapiens
MACGLVASNLNLKPGECLRVRGEVAPDAKSFVLNLGKDSNNLCLHFNPRFNAHGDANTIVCNSKDGGAWGTEQREAVFPFQPGSVAEVCITFDQANLTVKLPDGYEFKFPNRLNLEAINYMAADGDFKIKCVAFD

SEQ ID NO: 51194 - protein, 327 aa, Homo sapiens
MSQPSGGRAPGTRIYSWSCPTVMSPGEKLDPIPDSFILQPPVFHPVVPYVTTIFGGLHAGKMVMLQGVVPLDAHRFQVDFQCGCSLCPRPDIAFHFNPRFHTTKPHVICNTLHGGRWQREARWPHLALRRGSSFLILFLFGNEEVKVSVNGQHFLHFRYRLPLSHVDTLGIFGDILVEAVGFLNINPFVEGSREYPAGHEVPCSHALPQGLSPGQVIIVRGLVLQEPKHFTVSLRDQAAHAPVTLRASFADRTLAWISRWGQKKLISAPFLFYPQRFFEVLLLFQEGGLKLALNGQGLGATSMNQQALEQLRELRISGSVQLYCVHS

SEQ ID NO: 51195 - protein, 337 aa, Homo sapiens
MSQPSGGRAPGTRIYSWSCPTVMSPGEKLDPIPDSFILQPPVFHPVVPYVTTIFGGLHAGKMVMLQGVVPLDAHSRFQVDFQCGCSLCPRPDIAFHFNPRFHTTKPHVICNTLHGGRWQREARWPHLALRRGSSFLILFLFGNEEVKVSVNGQHFLHFRYRLPLSHVDTLGIFGDILVEAVGFLNINPFVEGSREYPAGHPFLLMSPRLEVPCSHALPQGLSPGQVIIVRGLVLQEPKHFTVSLRDQAAHAPVTLRASFADRTLAWISRWGQKKLISAPFLFYPQRFFEVLLLFQEGGLKLALNGQGLGATSMNQQALEQLRELRISGSVQLYCVHS

SEQ ID NO: 51196 - protein, 336 aa, Homo sapiens
MSQPSGGRAPGTRIYSWSCPTVMSPGEKLDPIPDSFILQPPVFHPVVPYVTTIFGGLHAGKMVMLQGVVPLDAHRFQVDFQCGCSLCPRPDIAFHFNPRFHTTKPHVICNTLHGGRWQREARWPHLALRRGSSFLILFLFGNEEVKVSVNGQHFLHFRYRLPLSHVDTLGIFGDILVEAVGFLNINPFVEGSREYPAGHPFLLMSPRLEVPCSHALPQGLSPGQVIIVRGLVLQEPKHFTVSLRDQAAHAPVTLRASFADRTLAWISRWGQKKLISAPFLFYPQRFFEVLLLFQEGGLKLALNGQGLGATSMNQQALEQLRELRISGSVQLYCVHS

SEQ ID NO: 51197 - protein, 275 aa, Homo sapiens
MVMLQGVVPLDAHRFQVDFQCGCSLCPRPDIAFHFNPRFHTTKPHVICNTLHGGRWQREARWPHLALRRGSSFLILFLFGNEEVKVSVNGQHFLHFRYRLPLSHVDTLGIFGDILVEAVGFLNINPFVEGSREYPAGHPFLLMSPRLEVPCSHALPQGLSPGQVIIVRGLVLQEPKHFTVSLRDQAAHAPVTLRASFADRTLAWISRWGQKKLISAPFLFYPQRFFEVLLLFQEGGLKLALNGQGLGATSMNQQALEQLRELRISGSVQLYCVHS

SEQ ID NO: 51198 - protein, 266 aa, Homo sapiens
MVMLQGVVPLDAHRFQVDFQCGCSLCPRPDIAFHFNPRFHTTKPHVICNTLHGGRWQREARWPHLALRRGSSFLILFLFGNEEVKVSVNGQHFLHFRYRLPLSHVDTLGIFGDILVEAVGFLNINPFVEGSREYPAGHEVPCSHALPQGLSPGQVIIVRGLVLQEPKHFTVSLRDQAAHAPVTLRASFADRTLAWISRWGQKKLISAPFLFYPQRFFEVLLLFQEGGLKLALNGQGLGATSMNQQALEQLRELRISGSVQLYCVHS

SEQ ID NO: 51199 - protein, 139 aa, Homo sapiens
MSSLPVPYKLPVSLSVGSCVIIKGTPIHSFINDPQLQVDFYTDMDEDSDIAFRFRVHFGNHVVMNRREFGIWMLEETTDYVPFEDGKQFELCIYVHYNEYEIKVNGIRIYGFVHRIPPSFVKMVQVSRDISLTSVCVCN

SEQ ID NO: 51200 - protein, 132 aa, Homo sapiens
MTGELEVKNMDMKPGSTLKITGSIADGTDGFVINLGQGTDKLNLHFNPRFSESTIVCNSLDGSNWGQEQREDHLCFSPGSEVKFTVTFESDKFKVKLPDGHELTFPNRLGHSHLSYLSVRGGFNMSSFKLKE

SEQ ID NO: 51201 - protein, 30 aa, Homo sapiens
MTGELEVKNMDMKPGSTLKITGSIADGTDG

SEQ ID NO: 51202 - protein, 585 aa, Homo sapiens
MTPPRLFWVWLLVAGTQGVNDGDMRLADGGATNQGRVEIFYRGQWGTVCDNLWDLTDASVVCRALGFENATQALGRAAFGQGSGPIMLDEVQCTGTEASLADCKSLGWLKSNCRHERDAGVVCTNETRSTHTLDLSRELSEALGQIFDSQRGCDLSISVNVQGEDALGFCGHTVILTANLEAQALWKEPGSNVTMSVDAECVPMVRDLLRYFYSRRIDITLSSVKCFHKLASAYGARQLQGYCASLFAILLPQDPSFQMPLDLYAYAVATGDALLEKLCLQFLAWNFEALTQAEAWPSVPTDLLQLLLPRSDLAVPSELALLKAVDTWSWGERASHEEVEGLVEKIRFPMMLPEELFELQFNLSLYWSHEALFQKKTLQALEFHTVPFQLLARYKGLNLTEDTYKPRIYTSPTWSAFVTDSSWSARKSQLVYQSRRGPLVKYSSDYFQAPSDYRYYPYQSFQTPQHPSFLFQDKRVSWSLVYLPTIQSCWNYGFSCSSDELPVLGLTKSGGSDRTIAYENKALMLCEGLFVADVTDFEGWKAAIPSALDTNSSKSTSSFPCPAGHFNGFRTVIRPFYLTNSSGVD

SEQ ID NO: 51203 - protein, 573 aa, Homo sapiens
MTPPRLFWVWLLVAGTQGVNDGDMRLADGGATNQGRVEIFYRGQWGTVCDNLWDLTDASVVCRALGFENATQALGRAAFGQGSGPIMLADCKSLGWLKSNCRHERDAGVVCTNETRSTHTLDLSRELSEALGQIFDSQRGCDLSISVNVQGEDALGFCGHTVILTANLEAQALWKEPGSNVTMSVDAECVPMVRDLLRYFYSRRIDITLSSVKCFHKLASAYGARQLQGYCASLFAILLPQDPSFQMPLDLYAYAVATGDALLEKLCLQFLAWNFEALTQAEAWPSVPTDLLQLLLPRSDLAVPSELALLKAVDTWSWGERASHEEVEGLVEKIRFPMMLPEELFELQFNLSLYWSHEALFQKKTLQALEFHTVPFQLLARYKGLNLTEDTYKPRIYTSPTWSAFVTDSSWSARKSQLVYQSRRGPLVKYSSDYFQAPSDYRYYPYQSFQTPQHPSFLFQDKRVSWSLVYLPTIQSCWNYGFSCSSDELPVLGLTKSGGSDRTIAYENKALMLCEGLFVADVTDFEGWKAAIPSALDTNSSKSTSSFPCPAGHFNGFRTVIRPFYLTNSSGVD

SEQ ID NO: 51204 - protein, 136 aa, Homo sapiens
MSNVPHKSSLPEGIRPGTVLRIRGLVPPNASRFHVNLLCGEEQGSDAALHFNPRLDTSEVVFNSKEQGSWGREERGPGVPFQRGQPFEVLIIASDDGFKAVVGDAQYHHFRHRLPLARVRLVEVGGDVQLDSVRIF

SEQ ID NO: 51205 - protein, 317 aa, Homo sapiens
MMLSLNNLQNIIYNPVIPFVGTIPDQLDPGTLIVIRGHVPSDADRFQVDLQNGSSMKPRADVAFHFNPRFKRAGCIVCNTLINEKWGREEITYDTPFKREKSFEIVIMVLKDKFQVAVNGKHTLLYGHRIGPEKIDTLGIYGKVNIHSIGFSFSSDLQSTQASSLELTEISRENVPKSGTPQLRLPFAARLNTPMGPGRTVVVKGEVNANAKSFNVDLLAGKSKDIALHLNPRLNIKAFVRNSFLQESWGEEERNITSFPFSPGMYFEMIIYCDVREFKVAVNGVHSLEYKHRFKELSSIDTLEINGDIHLLEVRSW

SEQ ID NO: 51206 - protein, 359 aa, Homo sapiens
MMLSLNNLQNIIYNPVIPFVGTIPDQLDPGTLIVIRGHVPSDADRFQVDLQNGSSMKPRADVAFHFNPRFKRAGCIVCNTLINEKWGREEITYDTPFKREKSFEIVIMVLKDKFQVAVNGKHTLLYGHRIGPEKIDTLGIYGKVNIHSIGFSFSSDLQSTQASSLELTEISRENVPKSGTPQLPSNRGGDISKIAPRTVYTKSKDSTVNHTLTCTKIPPMNYVSKRLPFAARLNTPMGPGRTVVVKGEVNANAKSFNVDLLAGKSKDIALHLNPRLNIKAFVRNSFLQESWGEEERNITSFPFSPGMYFEMIIYCDVREFKVAVNGVHSLEYKHRFKELSSIDTLEINGDIHLLEVRSW

SEQ ID NO: 51207 - protein, 358 aa, Homo sapiens
MMLSLNNLQNIIYNPVIPFVGTIPDQLDPGTLIVIRGHVPSDADRFQVDLQNGSSMKPRADVAFHFNPRFKRAGCIVCNTLINEKWGREEITYDTPFKREKSFEIVIMVLKDKFQVAVNGKHTLLYGHRIGPEKIDTLGIYGKVNIHSIGFSFSSDLQSTQASSLELTEISRENVPKSGTPQLRLSLPSWDLQGHGSETFRSVLWTRVFEIAFCRPLGTVASFQRLPFAARLNTPMGPGRTVVVKGEVNANAKSFNVDLLAGKSKDIALHLNPRLNIKAFVRNSFLQESWGEEERNITSFPFSPGMYFEMIIYCDVREFKVAVNGVHSLEYKHRFKELSSIDTLEINGDIHLLEVRSW

SEQ ID NO: 51208 - protein, 317 aa, Homo sapiens; identical to SEQ ID NO: 51205

SEQ ID NO: 51209 - protein, 208 aa, Homo sapiens
MMLSLNNLQNIIYNPVIPFVGTIPDQLDPGTLIVIRGHVPSDADRFQVDLQNGSSMKPRADVAFHFNPRFKRAGCIVCNTLINEKWGREEITYDTPFKREKSFEIVIMVLKDKFQVAVNGKHTLLYGHRIGPEKIDTLGIYGKVNIHSIGFSFSSDLQSTQASSLELTEISRENVPKSGTPQLPSNRGGDISKIAPRTVYTKSKDSTV

SEQ ID NO: 51210 - protein, 300 aa, Homo sapiens
MMLSLNNLQNIIYNPVIPFVGTIPDQLDPGTLIVIRGHVPSDADRFQVDLQNGSSMKPRADVAFHFNPRFKRAGCIVCNTLINEKWGREEITYDTPFKREKSFEIVIMVLKDKFQVPKSGTPQLPSNRGGDISKIAPRTVYTKSKDSTVNHTLTCTKIPPMNYVSKRLPFAARLNTPMGPGRTVVVKGEVNANAKSFNVDLLAGKSKDIALHLNPRLNIKAFVRNSFLQESWGEEERNITSFPFSPGMYFEMIIYCDVREFKVAVNGVHSLEYKHRFKELSSIDTLEINGDIHLLEVRSW

SEQ ID NO: 51211 - protein, 359 aa, Homo sapiens; identical to SEQ ID NO: 51206

SEQ ID NO: 51212 - protein, 168 aa, Homo sapiens
MMLSLNNLQNIIYNPVIPFVGTIPDQLDPGTLIVIRGHVPSDADRFQVDLQNGSSMKPRADVAFHFNPRFKRAGCIVCNTLINEKWGREEITYDTPFKREKSFEIVIMVLKDKFQVAVNGKHTLLYGHRIGPEKIDTLGIYGKVNIHSIGFSFSSDLQSTQASSLELT

SEQ ID NO: 51213 - protein, 106 aa, Homo sapiens
MMLSLNNLQNIIYNPVIPFVGTIPDQLDPGTLIVIRGHVPSDADRFQVDLQNGSSMKPRADVAFHFNPRFKRAGCIVCNTLINEKWGREEITYDTPFKREKSFEIV

SEQ ID NO: 51214 - protein, 359 aa, Homo sapiens; identical to SEQ ID NO: 51206

SEQ ID NO: 51215 - protein, 317 aa, Homo sapiens; identical to SEQ ID NO: 51205

SEQ ID NO: 51216 - protein, 359 aa, Homo sapiens; identical to SEQ ID NO: 51206

SEQ ID NO: 51217 - protein, 43 aa, Homo sapiens
MMLSLNNLQNIIYNPVIPFVGTIPDQLDPGTLIVIRGHVPSDA

SEQ ID NO: 51218 - protein, 323 aa, Homo sapiens
MAFSGSQAPYLSPAVPFSGTIQGGLQDGLQITVNGTVLSSSGTRFAVNFQTGFSGNDIAFHFNPRFEDGGYVVCNTRQNGSWGPEERKTHMPFQKGMPFDLCFLVQSSDFKVMVNGILFVQYFHRVPFHRVDTISVNGSVQLSYISFQPPGVWPANPAPITQTVIHTVQSAPGQMFSTPAIPPMMYPHPAYPMPFITTILGGLYPSKSILLSGTVLPSAQRFHINLCSGNHIAFHLNPRFDENAVVRNTQIDNSWGSEERSLPRKMPFVRGQSFSVWILCEAHCLKVAVDGQHLFEYYHRLRNLPTINRLEVGGDIQLTHVQT

SEQ ID NO: 51219 - protein, 311 aa, Homo sapiens
MAFSGSQAPYLSPAVPFSGTIQGGLQDGLQITVNGTVLSSSGTRFAVNFQTGFSGNDIAFHFNPRFEDGGYVVCNTRQNGSWGPEERKTHMPFQKGMPFDLCFLVQSSDFKVMVNGILFVQYFHRVPFHRVDTISVNGSVQLSYISFQTQTVIHTVQSAPGQMFSTPAIPPMMYPHPAYPMPFITTILGGLYPSKSILLSGTVLPSAQRFHINLCSGNHIAFHLNPRFDENAVVRNTQIDNSWGSEERSLPRKMPFVRGQSFSVWILCEAHCLKVAVDGQHLFEYYHRLRNLPTINRLEVGGDIQLTHVQT

SEQ ID NO: 51220 - protein, 246 aa, Homo sapiens
MAFSGSQAPYLSPAVPFSGTIQGGLQDGLQITVNGTVLSSSGTRFAVNFQTGFSGNDIAFHFNPRFEDGGYVVCNTRQNGSWGPEERKTHMPFQKGMPFDLCFLVQSSDFKVMVNGILFVQYFHRVPFHRVDTISVNGSVQLSYISFQPPGVWPANPAPITQTVIHTVQSAPGQMFSTPAIPPMMYPHPAYPMPFITTILGGLYPSKSILLSGTVLPSAQRCGSCVKLTASRWPWMVSTCLNTTIA

SEQ ID NO: 51221 - protein, 355 aa, Homo sapiens
MAFSGSQAPYLSPAVPFSGTIQGGLQDGLQITVNGTVLSSSGTRFAVNFQTGFSGNDIAFHFNPRFEDGGYVVCNTRQNGSWGPEERKTHMPFQKGMPFDLCFLVQSSDFKVMVNGILFVQYFHRVPFHRVDTISVNGSVQLSYISFQNPRTVPVQPAFSTVPFSQPVCFPPRPRGRRQKPPGVWPANPAPITQTVIHTVQSAPGQMFSTPAIPPMMYPHPAYPMPFITTILGGLYPSKSILLSGTVLPSAQRFHINLCSGNHIAFHLNPRFDENAVVRNTQIDNSWGSEERSLPRKMPFVRGQSFSVWILCEAHCLKVAVDGQHLFEYYHRLRNLPTINRLEVGGDIQLTHVQT

SEQ ID NO: 51222 - protein, 221 aa, Homo sapiens
MGPFSAPVEPDGGYVVCNTRQNGSWGPEERKTHMPFQKGMPFDLCFLVQSSDFKVMVNGILFVQYFHRVPFHRVDTISVNGSVQLSYISFQNPRTVPVQPAFSTVPFSQPVCFPPRPRGRRQKPPGVWPANPAPITQTVIHTVQSAPGQMFSTPAIPPMMYPHPAYPMPFITTILGGLYPSKSILLSGTVLPSAQRCGSCVKLTASRWPWMVSTCLNTTIA

SEQ ID NO: 51223 - protein, 119 aa, Homo sapiens
MAFSGSQAPYLSPAVPFSGTIQGGLQDGLQITVNGTVLSSSGTRFAVNFQTGFSGNDIAFHFNPRFEDGGYVVCNTRQNGSWGPEERKTHMPFQKGMPFDLCFLVQSSDFKVHLLLLLL

SEQ ID NO: 51224 - protein, 510 aa, Homo sapiens
MAGSRQRGLRARVRPLFCALLLSLGRFVRGDGVGGDPAVALPHRRFEYKYSFKGPHLVQSDGTVPFWAHAGNAIPSSDQIRVAPSLKSQRGSVWTKTKAAFENWEVEVTFRVTGRGRIGADGLAIWYAENQGLEGPVFGSADLWNGVGIFFDSFDNDGKKNNPAIVIIGNNGQIHYDHQNDGASQALASCQRDFRNKPYPVRAKITYYQNTLTVMINNGFTPDKNDYEFCAKVENMIIPAQGHFGISAATGGLADDHDVLSFLTFQLTEPGKEPPTPDKEISEKEKEKYQEEFEHFQQELDKKKEEFQKGHPDLQGQPAEEIFESVGDRELRQVFEGQNRIHLEIKQLNRQLDMILDEQRRYVSSLTEEISKRGAGMPGQHGQITQQELDTVVKTQHEILRQVNEMKNSMSETVRLVSGMQHPGSAGGVYETTQHFIDIKEHLHIVKRDIDNLVQRNMPSNEKPKCPELPPFPSCLSTVHFIIFVVVQTVLFIGYIMYRSQQEAAAKKFF

SEQ ID NO: 51225 - protein, 366 aa, Homo sapiens
MQPLWLCWALWVLPLASPGAALTGEQLLGSLLRQLQLKEVPTLDRADMEELVIPTHVRAQYVALLQRSHGDRSRGKRFSQSFREVAGRFLALEASTHLLVFGMEQRLPPNSELVQAVLRLFQEPVPKAALHRHGRLSPRSARARVTVEWLRVRDDGSNRTSLIDSRLVSVHESGWKAFDVTEAVNFWQQLSRPRQPLLLQVSVQREHLGPLASGAHKLVRFASQGAPAGLGEPQLELHTLDLGDYGAQGDCDPEAPMTEGTRCCRQEMYIDLQGMKWAENWVLEPPGFLAYECVGTCRQPPEALAFKWPFLGPRQCIASETDSLPMIVSIKEGGRTRPQVVSLPNMRVQKCSCASDGALVPRRLQP

SEQ ID NO: 51226 - protein, 366 aa, Homo sapiens
MWPLWLCWALWVLPLAGPGAALTEEQLLGSLLRQLQLSEVPVLDRADMEKLVIPAHVRAQYVVLLRRSHGDRSRGKRFSQSFREVAGRFLASEASTHLLVFGMEQRLPPNSELVQAVLRLFQEPVPKAALHRHGRLSPRSAQARVTVEWLRVRDDGSNRTSLIDSRLVSVHESGWKAFDVTEAVNFWQQLSRPRQPLLLQVSVQREHLGPLASGAHKLVRFASQGAPAGLGEPQLELHTLDLRDYGAQGDCDPEAPMTEGTRCCRQEMYIDLQGMKWAKNWVLEPPGFLAYECVGTCQQPPEALAFNWPFLGPRQCIASETASLPMIVSIKEGGRTRPQVVSLPNMRVQKCSCASDGALVPRRLQP

SEQ ID NO: 51227 - protein, 332 aa, Homo sapiens
MWPLWLCWALWVLPLAGPGAALTEEQLLGSLLRQLQLSEVPVLDRADMEKLVIPAHVRAQYVVLLRRSHGDRSRGKRFSQSFREVAGRFLASEAALHRHGRLSPRSAQARVTVEWLRVRDDGSNRTSLIDSRLVSVHESGWKAFDVTEAVNFWQQLSRPRQPLLLQVSVQREHLGPLASGAHKLVRFASQGAPAGLGEPQLELHTLDLRDYGAQGDCDPEAPMTEGTRCCRQEMYIDLQGMKWAKNWVLEPPGFLAYECVGTCQQPPEALAFNWPFLGPRQCIASETASLPMIVSIKEGGRTRPQVVSLPNMRVQKCSCASDGALVPRRLQP

SEQ ID NO: 51228 - protein, 376 aa, Homo sapiens
MVWKVAVFLSVALGIGAVPIDDPEDGGKHWVVIVAGSNGWYNYRHQADACHAYQIIHRNGIPDEQIVVMMYDDIAYSEDNPTPGIVINRPNGTDVYQGVPKDYTGEDVTPQNFLAVLRGDAEAVKGIGSGKVLKSGPQDHVFIYFTDHGSTGILVFPNEDLHVKDLNETIHYMYKHKMYRKMVFYIEACESGSMMNHLPDNINVYATTAANPRESSYACYYDEKRSTYLGDWYSVNWMEDSDVEDLTKETLHKQYHLVKSHTNTSHVMQYGNKTISTMKVMQFQGMKRKASSPVPLPPVTHLDLTPSPDVPLTIMKRKLMNTNDLEESRQLTEEIQRHLDYEYALRHLYVLVNLCEKPYPLHRIKLSMDHVCLGHY

SEQ ID NO: 51229 - protein, 372 aa, Homo sapiens
MVWKVAVFLSVALGIGAVPIDDPEDGGKHWVVIVAGSNGWYNYRHQADACHAYQIIHRNGIPDEQIVVMMYDDIAYSEDNPTPGIVINRPNGTDVYQGVPKDYTGEDVTPQNFLAVLRGDAEAVKGIGSGKVLKSGPQDHVFIYFTDHGSTGILVFPNEDLHVKDLNETIHYMYKHKMYRKMVFYIEACESGSMMNHLPDNINVYATTAANPRESSYACYYDEKRSTYLGDWYSVNWMEDSDVEDLTKETLHKQYHLVKSHTNTSHVMQYGNKTISTMKVMQFQGMKRKASSPVPLPPVTHLDLTPSPDVPLTIMKRKLMNTNDLEESRQLTEEIQRHLDDKIVHGPRVPWSLLKSCLLEAFPSVSAPPTVC

SEQ ID NO: 51230 - protein, 433 aa, Homo sapiens
MVWKVAVFLSVALGIGAVPIDDPEDGGKHWVVIVAGSNGWYNYRHQADACHAYQIIHRNGIPDEQIVVMMYDDIAYSEDNPTPGIVINRPNGTDVYQGVPKDYTGEDVTPQNFLAVLRGDAEAVKGIGSGKVLKSGPQDHVFIYFTDHGSTGILVFPNEDLHVKDLNETIHYMYKHKMYRKMVFYIEACESGSMMNHLPDNINVYATTAANPRESSYACYYDEKRSTYLGDWYSVNWMEDSDVEDLTKETLHKQYHLVKSHTNTSHVMQYGNKTISTMKVMQFQGMKRKASSPVPLPPVTHLDLTPSPDVPLTIMKRKLMNTNDLEESRQLTEEIQRHLDARHLIEKSVRKIVSLLAASEAEVEQLLSERAPLTGHSCYPEALLHFRTHCFNWHSPTYEYALRHLYVLVNLCEKPYPLHRIKLSMDHVCLGHY

SEQ ID NO: 51231 - protein, 433 aa, Homo sapiens; identical to SEQ ID NO: 51230

SEQ ID NO: 51232 - protein, 398 aa, Homo sapiens
MVWKVAVFLSVALGIGAVPIDDPEDGGKHWVVIVAGSNGWYNYRHQADACHAYQIIHRNGIPDEQIVVMMYDVTPQNFLAVLRGDAEAVKGIGSGKVLKSGPQDHVFIYFTDHGSTGILVFPNEDLHVKDLNETIHYMYKHKMYRKMVFYIEACESGSMMNHLPDNINVYATTAANPRESSYACYYDEKRSTYLGDWYSVNWMEDSDVEDLTKETLHKQYHLVKSHTNTSHVMQYGNKTISTMKVMQFQGMKRKASSPVPLPPVTHLDLTPSPDVPLTIMKRKLMNTNDLEESRQLTEEIQRHLDARHLIEKSVRKIVSLLAASEAEVEQLLSERAPLTGHSCYPEALLHFRTHCFNWHSPTYEYALRHLYVLVNLCEKPYPLHRIKLSMDHVCLGHY

SEQ ID NO: 51233 - protein, 410 aa, Homo sapiens
MVWKVAVFLSVAGSNGWYNYRHQADACHAYQIIHRNGIPDEQIVVMMYDDIAYSEDNPTPGIVINRPNGTDVYQGVPKDYTGEDVTPQNFLAVLRGDAEAVKGIGSGKVLKSGPQDHVFIYFTDHGSTGILVFPNEDLHVKDLNETIHYMYKHKMYRKMVFYIEACESGSMMNHLPDNINVYATTAANPRESSYACYYDEKRSTYLGDWYSVNWMEDSDVEDLTKETLHKQYHLVKSHTNTSHVMQYGNKTISTMKVMQFQGMKRKASSPVPLPPVTHLDLTPSPDVPLTIMKRKLMNTNDLEESRQLTEEIQRHLDARHLIEKSVRKIVSLLAASEAEVEQLLSERAPLTGHSCYPEALLHFRTHCFNWHSPTYEYALRHLYVLVNLCEKPYPLHRIKLSMDHVCLGHY

SEQ ID NO: 51234 - protein, 57 aa, Homo sapiens
MVWKVAVFLSVALGIGAVPIDDPEDGGKHWVVIVAGSNGWYNYRHQADACHAYQIIH

SEQ ID NO: 51235 - protein, 19 aa, Homo sapiens
MVWKVAVFLSVALGIGAVP

SEQ ID NO: 51236 - protein, 58 aa, Homo sapiens
MVWKVAVFLSVALGIGAVPIDDPEDGGKHWVVIVAGSNGWYNYRHQADACHAYQIIHR

SEQ ID NO: 51237 - protein, 78 aa, Homo sapiens
MVWKVAVFLSVALGIGAVPIDDPEDGGKHWVVIVAGSNGWYNYRHQADACHAYQIIHRNGIPDEQIVVMMYDDIAYSE

SEQ ID NO: 51238 - protein, 78 aa, Homo sapiens; identical to SEQ ID NO: 51237

SEQ ID NO: 51239 - protein, 911 aa, Homo sapiens
MAAAAASAPQQLSDEELFSQLRRYGLSPGPVTESTRPVYLKKLKKLREEEQQQHRSGGRGNKTRNSNNNNTAAATVAAAGPAAAAAAGMGVRPVSGDLSYLRTPGGLCRISASGPESLLGGPGGASAAPAAGSKVLLGFSSDESDVEASPRDQAGGGGRKDRASLQYRGLKAPPAPLAASEVTNSNSAERRKPHSWWGARRPAGPELQTPPGKDGAVEDEEGEGEDGEERDPETEEPLWASRTVNGSRLVPYSCRENYSDSEEEDDDDVASSRQVLKDDSLSRHRPRRTHSKPLPPLTAKSAGGRLETSVQGGGGLAMNDRAAAAGSLDRSRNLEEAAAAEQGGGCDQVDSSPVPRYRVNAKKLTPLLPPPLTDMDSTLDSSTGSLLKTNNHIGGGAFSVDSPRIYSNSLPPSAAVAASSSLRINHANHTGSNHTYLKNTYNKPKLSEPEEELLQQFKREEVSPTGSFSAHYLSMFLLTAACLFFLILGLTYLGMRGTGVSEDGELSIENPFGETFGKIQESEKTLMMNTLYKLHDRLAQLAGDHECGSSSQRTLSVQEAAAYLKDLGPEYEGIFNTSLQWILENGKDVGIRCVGFGPEEELTNITDVQFLQSTRPLMSFWCRFRRAFVTVTHRLLLLCLGVVMVCVVLRYMKYRWTKEEEETRQMYDMVVKIIDVLRSHNEACQENKDLQPYMPIPHVRDSLIQPHDRKKMKKVWDRAVDFLAANESRVRTETRRIGGADFLVWRWIQPSASCDKILVIPSKVWQGQAFHLDRRNSPPNSLTPCLKIRNMFDPVMEIGDQWHLAIQEAILEKCSDNDGIVHIAVDKNSREGCVYVKCLSPEYAGKAFKALHGSWFDGKLVTVKYLRLDRYHHRFPQALTSNTPLKPSNKHMNSMSHLRLRTGLTNSQGSS

SEQ ID NO: 51240 - protein, 1503 aa, Homo sapiens
MPGPPALRRRLLLLLLVLLIAGSAGAAPLPQTGAGEAPPAAEVSSSFVILCVCSLIILIVLIANCVSCCKDPEIDFKEFEDNFDDEIDFTPPAEDTPSVQSPAEVFTLSVPNISLPAPSQFQPSVEGLKSQVARHSLNYIQEIGNGWFGKVLLGEIYTGTSVARVIVKELKASANPKEQDTFLKNGEPYYILQHPNILQCVGQCVEAIPYLLVFEFCDLGDLKAYLRSEQEHMRGDSQTMLLQRMACEVAAGLAAMHKLHFLHSDLALRNCFLTSDLNVKVGDYGIGFSRYKEDYIETDDKKVFPLRWTAPELVTSFQDRLLTADQTKYSNIWSLGVTLWELFDNAAQPYSNLSNLDVLNQVIRERDTKLPKPQLEQPYSDRWYEVLQFCWLSPEKRPAAEDVHRLLTYLRLQSQRDSEVDFEQQWNALKPNTNSRDSSNNAAFPILDHFARDRLGREMEEVLTVTETSQGLSFEYVWEAAKHDHFDERSRGHLDEGLSYTSIFYPVEVFESSLSDPGPGKQDDSGQDVPLRVPGVVPVFDAHNLSVGSDYYIQLEEKSGSNLELDYPPALLTTDMDNPERTGPELSQLTALRSVELEESSTDEDFFQSSTDPKDSSLPGDLHVTSGPESPFNNIFNDVDKSEDLPSHQKIFDLMELNGVQADFKPATLSSSLDNPKESVITGHFEKEKPRKIFDSEPLCLSDNLMHQDNFDPLNVQELSENFLFLQEKNLLKGSLSSKEHINDLQTELKNAGFTEAMLETSCRNSLDTELQFAENKPGLSLLQENVSTKGDDTDVMLTGDTLSTSLQSSPEVQVPPTSFETEETPRRVPPDSLPTQGETQPTCLDVIVPEDCLHQDISPDAVTVPVEILSTDARTHSLDNRSQDSPGESEETLRLTESDSVLADDILASRVSVGSSLPELGQELHNKPFSEDHHSHRRLEKNLEAVETLNQLNSKDAAKEAGLVSALSSDSTSQDSLLEDSLSAPFPASEPSLETPDSLESVDVHEALLDSLGSHTPQKLVPPDKPADSGYETENLESPEWTLHPAPEGTADSEPATTGDGGHSGLPPNPVIVISDAGDGHRGTEVTPETFTAGSQGSYRDSAYFSDNDSEPEKRSEEVPGTSPSALVLVQEQPLPEPVLPEQSPAAQDSCLEARKSQPDESCLSALHNSSDLELRATPEPAQTGVPQQVHPTEDEASSPWSVLNAELSSGDDFETQDDRPCTLASTGTNTNELLAYTNSALDKSLSSHSEGPKLKEPDIEGKYLGKLGVSGMLDLSEDGMDADEEDENSDDSDEDLRAFNLHSLSSESEDETEHPVPIILSNEDGRHLRSLLKPTAANAPDPLPEDWKKEKKAVTFFDDVTVYLFDQETPTKELGPCGGEACGPDLSGPAPASGSPYLSRCINSESSTDEEGGGFEWDDDFSPDPFMSKTTSNLLSSKPSLQTSKYFSPPPPARSTEQSWPHSAPYSRFSISPANIASFSLTHLTDSDIEQGGSSEDGEKD

SEQ ID NO: 51241 - protein, 61 aa, Homo sapiens
MQPRTQPLAQTLPFFLGGAPRDTGLRVPVIKMGTGWEGFQRTLKEVAYILLCCWCIKELLD

SEQ ID NO: 51242 - protein, 61 aa, Homo sapiens; identical to SEQ ID NO: 51241

SEQ ID NO: 51243 - protein, 173 aa, Homo sapiens
MYSFMGGGLFCAWVGTILLVVAMATDHWMQYRLSGSFAHQGLWRYCLGNKCYLQTDSIAYWNATRAFMILSALCAISGIIMGIMAFAHQPTFSRISRPFSAGIMFFSSTLFVVLALAIYTGVTVSFLGRRFGDWRFSWSYILGWVAVLMTFFAGIFYMCAYRVHECRRLSTPR

SEQ ID NO: 51244 - protein, 215 aa, Homo sapiens
MYSFMGGGLFCAWVGTILLVVAMATDHWMQYRLSGSFAHQGLWRYCLGNKCYLQTDSIGEPPGQGPGRAWGKSRADLGAQGHLYSRWRTLRLKEGKGATQAYWNATRAFMILSALCAISGIIMGIMAFAHQPTFSRISRPFSAGIMFFSSTLFVVLALAIYTGVTVSFLGRRFGDWRFSWSYILGWVAVLMTFFAGIFYMCAYRVHECRRLSTPR

SEQ ID NO: 51245 - protein, 666 aa, Homo sapiens
MADMEDLFGSDADSEAERKDSDSGSDSDSDQENAASGSNASGSESDQDERGDSGQPSNKELFGDDSEDEGASHHSGSDNHSERSDNRSEASERSDHEDNDPSDVDQHSGSEAPNDDEDEGHRSDGGSHHSEAEGSEKAHSDDEKWGREDKSDQSDDEKIQNSDDEERAQGSDEDKLQNSDDDEKMQNTDDEERPQLSDDERQQLSEEEKANSDDERPVASDNDDEKQNSDDEEQPQLSDEEKMQNSDDERPQASDEEHRHSDDEEEQDHKSESARGSDSEDEVLRMKRKNAIASDSEADSDTEVPKDNSGTMDLFGGADDISSGSDGEDKPPTPGQPVDENGLPQDQQEEEPIPETRIEVEIPKVNTDLGNDLYFVKLPNFLSVEPRPFDPQYYEDEFEDEEMLDEEGRTRLKLKVENTIRWRIRRDEEGNEIKESNARIVKWSDGSMSLHLGNEVFDVYKAPLQGDHNHLFIRQGTGLQGQAVFKTKLTFRPHSTDSATHRKMTLSLADRCSKTQKIRILPMAGRDPECQRTEMIKKEEERLRASIRRESQQRRMREKQHQRGLSASYLEPDRYDEEEEGEESISLAAIKNRYKGGIREERARIYSSDSDEGSEEDKAQRLLKAKKLTSDEEGEPSGKRKAEDDDKANKKHKKYVISDEEEEDDD

SEQ ID NO: 51246 - protein, 606 aa, Homo sapiens
MADMEDLFGSDADSEAERKDSDSGSDSDSDQENAASGSNASGSESDQDERGDSGQPSNKELFGDDSEDEGASHHSGSDNHSERSDNRSEASERSDHEDNDPSDVDQHSGSEAPNDDEDEGHRSDGGSHHSEAEGSEKAHSDDEKWGREDKSDQSDDEKIQNSDDEERAQGSDEDKLQNSDDDEKMQNTDDEERPQLSDDERQQLSEEEKANSDDERPVASDNDDEKQNSDDEEQPQLSDEEKMQNSDDERPQASDEEHRHSDDEEEQDHKSESARGSDSEDEVLRMKRKNAIASDSEADSDTEVPKDNSGTMDLFGGADDISSGSDGEDKPPTPGQPVDENGLPQDQQEEEPIPETRIEVEIPKVNTDLGNDLYFVKLPNFLSVEPSMSLHLGNEVFDVYKAPLQGDHNHLFIRQGTGLQGQAVFKTKLTFRPHSTDSATHRKMTLSLADRCSKTQKIRILPMAGRDPECQRTEMIKKEEERLRASIRRESQQRRMREKQHQRGLSASYLEPDRYDEEEEGEESISLAAIKNRYKGGIREERARIYSSDSDEGSEEDKAQRLLKAKKLTSDEEGEPSGKRKAEDDDKANKKHKKYVISDEEEEDDD

SEQ ID NO: 51247 - protein, 644 aa, Homo sapiens
MADMEDLFGSDADSEAERKDSDSGSDSDSDQENAASGSNASGSESDQDERGDSGQPSNKELFGDDSEDEGASHHSGSDNHSERSDNRSEASERSDHEDNDPSDVDQHSGSEAPNDDEDEGHRSDGGSHHSEAEGSEKAHSDDEKWGREDKSDQSDDEKIQNSDDEERAQGSDEDKLQNSDDDEKMQNTDDEERPQLSDDERQQLSEEEKANSDDERPVASDNDDDDERPQASDEEHRHSDDEEEQDHKSESARGSDSEDEVLRMKRKNAIASDSEADSDTEVPKDNSGTMDLFGGADDISSGSDGEDKPPTPGQPVDENGLPQDQQEEEPIPETRIEVEIPKVNTDLGNDLYFVKLPNFLSVEPRPFDPQYYEDEFEDEEMLDEEGRTRLKLKVENTIRWRIRRDEEGNEIKESNARIVKWSDGSMSLHLGNEVFDVYKAPLQGDHNHLFIRQGTGLQGQAVFKTKLTFRPHSTDSATHRKMTLSLADRCSKTQKIRILPMAGRDPECQRTEMIKKEEERLRASIRRESQQRRMREKQHQRGLSASYLEPDRYDEEEEGEESISLAAIKNRYKGGIREERARIYSSDSDEGSEEDKAQRLLKAKKLTSDEEGEPSGKRKAEDDDKANKKHKKYVISDEEEEDDD

SEQ ID NO: 51248 - protein, 708 aa, Homo sapiens
MRERIWAPPLLLLLPLLLPPPLWGGPPDSPRRELELEPGPLQPFDLLYASGAAAYYSGDYERAVRDLEAALRSHRRLREIRTRCARHCAARHPLPPPPPGEGPGAELPLFRSLLGRARCYRSCETQRLGGPASRHRVSEDVRSDFQRRVPYNYLQRAYIKLNQLEKAVEAAHTFFVANPEHMEMQQNIENYRATAGVEALQLVDREAKPHMESYNAGVKHYEADDFEMAIRHFEQALREYFVEDTECRTLCEGPQRFEEYEYLGYKAGLYEAIADHYMQVLVCQHECVRELATRPGRLSPIENFLPLHYDYLQFAYYRVGEYVKALECAKAYLLCHPDDEDVLDNVDYYESLLDDSIDPASIEAREDLTMFVKRHKLESELIKSAAEGLGFSYTEPNYWIRYGGRQDENRVPSGVNVEGAEVHGFSMGKKLSPKIDRDLREGGPLLYENITFVYNSEQLNGTQRVLLDNVLSEEQCRELHSVASGIMLVGDGYRGKTSPHTPNEKFEGATVLKALKSGYEGRVPLKSARLFYDISEKARRIVESYFMLNSTLYFSYTHMVCRTALSGQQDRRNDLSHPIHADNCLLDPEANECWKEPPAYTFRDYSALLYMNDDFEGGEFIFTEMDAKTVTASIKPKCGRMISFSSGGENPHGVKAVTKGKRCAVALWFTLDPLYRELERIQADEVIAILDQEQQGKHELNINPKDEL

SEQ ID NO: 51249 - protein, 527 aa, Homo sapiens
MEMQQNIENYRATAGVEALQLVDREAKPHMESYNAGVKHYEADDFEMAIRHFEQALREYFVEDTECRTLCEGPQRFEEYEYLGYKAGLYEAIADHYMQVLVCQHECVRELATRPGRLSPIENFLPLHYDYLQFAYYRVGEYVKALECAKAYLLCHPDDEDVLDNVDYYESLLDDSIDPASIEAREDLTMFVKRHKLESELIKSAAEGLGFSYTEPNYWIRYGGRQDENRVPSGVNVEGAEVHGFSMGKKLSPKIDRDLREGGPLLYENITFVYNSEQLNGTQRVLLDNVLSEEQCRELHSVASGIMLVGDGYRGKTSPHTPNEKFEGATVLKALKSGYEGRVPLKSARLFYDISEKARRIVESYFMLNSTLYFSYTHMVCRTALSGQQDRRNDLSHPIHADNCLLDPEANECWKEPPAYTFRDYSALLYMNDDFEGGEFIFTEMDAKTVTASIKPKCGRMISFSSGGENPHGVKAVTKGKRCAVALWFTLDPLYRELERIQADEVIAILDQEQQGKHELNINPKDEL

SEQ ID NO: 51250 - protein, 906 aa, Homo sapiens
MICQKFCVVLLHWEFIYVITAFNLSYPITPWRFKLSCMPPNSTYDYFLLPAGLSKNTSNSNGHYETAVEPKFNSSGTHFSNLSKTTFHCCFRSEQDRNCSLCADNIEGKTFVSTVNSLVFQQIDANWNIQCWLKGDLKLFICYVESLFKNLFRNYNYKVHLLYVLPEVLEDSPLVPQKGSFQMVHCNCSVHECCECLVPVPTAKLNDTLLMCLKITSGGVIFQSPLMSVQPINMVKPDPPLGLHMEITDDGNLKISWSSPPLVPFPLQYQVKYSENSTTVIREADKIVSATSLLVDSILPGSSYEVQVRGKRLDGPGIWSDWSTPRVFTTQDVIYFPPKILTSVGSNVSFHCIYKKENKIVPSKEIVWWMNLAEKIPQSQYDVVSDHVSKVTFFNLNETKPRGKFTYDAVYCCNEHECHHRYAELYVIDVNINISCETDGYLTKMTCRWSTSTIQSLAESTLQLRYHRSSLYCSDIPSIHPISEPKDCYLQSDGFYECIFQPIFLLSGYTMWIRINHSLGSLDSPPTCVLPDSVVKPLPPSSVKAEITINIGLLKISWEKPVFPENNLQFQIRYGLSGKEVQWKMYEVYDAKSKSVSLPVPDLCAVYAVQVRCKRLDGLGYWSNWSNPAYTVVMDIKVPMRGPEFWRIINGDTMKKEKNVTLLWKPLMKNDSLCSVQRYVINHHTSCNGTWSEDVGNHTKFTFLWTEQAHTVTVLAINSIGASVANFNLTFSWPMSKVNIVQSLSAYPLNSSCVIVSWILSPSDYKLMYFIIEWKNLNEDGEIKWLRISSSVKKYYIHDHFIPIEKYQFSLYPIFMEGVGKPKIINSFTQDDIEKHQSDAGLYVIVPVIISSSILLLGTLLISHQRMKKLFWEDVPNPKNCSWAQGLNFQKKMPGTKELLGGGWLT

SEQ ID NO: 51251 - protein, 1165 aa, Homo sapiens
MICQKFCVVLLHWEFIYVITAFNLSYPITPWRFKLSCMPPNSTYDYFLLPAGLSKNTSNSNGHYETAVEPKFNSSGTHFSNLSKTTFHCCFRSEQDRNCSLCADNIEGKTFVSTVNSLVFQQIDANWNIQCWLKGDLKLFICYVESLFKNLFRNYNYKVHLLYVLPEVLEDSPLVPQKGSFQMVHCNCSVHECCECLVPVPTAKLNDTLLMCLKITSGGVIFQSPLMSVQPINMVKPDPPLGLHMEITDDGNLKISWSSPPLVPFPLQYQVKYSENSTTVIREADKIVSATSLLVDSILPGSSYEVQVRGKRLDGPGIWSDWSTPRVFTTQDVIYFPPKILTSVGSNVSFHCIYKKENKIVPSKEIVWWMNLAEKIPQSQYDVVSDHVSKVTFFNLNETKPRGKFTYDAVYCCNEHECHHRYAELYVIDVNINISCETDGYLTKMTCRWSTSTIQSLAESTLQLRYHRSSLYCSDIPSIHPISEPKDCYLQSDGFYECIFQPIFLLSGYTMWIRINHSLGSLDSPPTCVLPDSVVKPLPPSSVKAEITINIGLLKISWEKPVFPENNLQFQIRYGLSGKEVQWKMYEVYDAKSKSVSLPVPDLCAVYAVQVRCKRLDGLGYWSNWSNPAYTVVMDIKVPMRGPEFWRIINGDTMKKEKNVTLLWKPLMKNDSLCSVQRYVINHHTSCNGTWSEDVGNHTKFTFLWTEQAHTVTVLAINSIGASVANFNLTFSWPMSKVNIVQSLSAYPLNSSCVIVSWILSPSDYKLMYFIIEWKNLNEDGEIKWLRISSSVKKYYIHDHFIPIEKYQFSLYPIFMEGVGKPKIINSFTQDDIEKHQSDAGLYVIVPVIISSSILLLGTLLISHQRMKKLFWEDVPNPKNCSWAQGLNFQKPETFEHLFIKHTASVTCGPLLLEPETISEDISVDTSWKNKDEMMPTTVVSLLSTTDLEKGSVCISDQFNSVNFSEAEGTEVTYEDESQRQPFVKYATLISNSKPSETGEEQGLINSSVTKCFSSKNSPLKDSFSNSSWEIEAQAFFILSDQHPNIISPHLTFSEGLDELLKLEGNFPEENNDKKSIYYLGVTSIKKRESGVLLTDKSRVSCPFPAPCLFTDIRVLQDSCSHFVENNINLGTSSKKTFASYMPQFQTCSTQTHKIMENKMCDLTV

SEQ ID NO: 51252 - protein, 906 aa, Homo sapiens; identical to SEQ ID NO: 51250

SEQ ID NO: 51253 - protein, 958 aa, Homo sapiens
MICQKFCVVLLHWEFIYVITAFNLSYPITPWRFKLSCMPPNSTYDYFLLPAGLSKNTSNSNGHYETAVEPKFNSSGTHFSNLSKTTFHCCFRSEQDRNCSLCADNIEGKTFVSTVNSLVFQQIDANWNIQCWLKGDLKLFICYVESLFKNLFRNYNYKVHLLYVLPEVLEDSPLVPQKGSFQMVHCNCSVHECCECLVPVPTAKLNDTLLMCLKITSGGVIFQSPLMSVQPINMVKPDPPLGLHMEITDDGNLKISWSSPPLVPFPLQYQVKYSENSTTVIREADKIVSATSLLVDSILPGSSYEVQVRGKRLDGPGIWSDWSTPRVFTTQDVIYFPPKILTSVGSNVSFHCIYKKENKIVPSKEIVWWMNLAEKIPQSQYDVVSDHVSKVTFFNLNETKPRGKFTYDAVYCCNEHECHHRYAELYVIDVNINISCETDGYLTKMTCRWSTSTIQSLAESTLQLRYHRSSLYCSDIPSIHPISEPKDCYLQSDGFYECIFQPIFLLSGYTMWIRINHSLGSLDSPPTCVLPDSVVKPLPPSSVKAEITINIGLLKISWEKPVFPENNLQFQIRYGLSGKEVQWKMYEVYDAKSKSVSLPVPDLCAVYAVQVRCKRLDGLGYWSNWSNPAYTVVMDIKVPMRGPEFWRIINGDTMKKEKNVTLLWKPLMKNDSLCSVQRYVINHHTSCNGTWSEDVGNHTKFTFLWTEQAHTVTVLAINSIGASVANFNLTFSWPMSKVNIVQSLSAYPLNSSCVIVSWILSPSDYKLMYFIIEWKNLNEDGEIKWLRISSSVKKYYIHDHFIPIEKYQFSLYPIFMEGVGKPKIINSFTQDDIEKHQSDAGLYVIVPVIISSSILLLGTLLISHQRMKKLFWEDVPNPKNCSWAQGLNFQKMLEGSMFVKSHHHSLISSTQGHKHCGRPQGPLHRKTRDLCSLVYLLTLPPLLSYDPAKSPSVRNTQE

SEQ ID NO: 51254 - protein, 896 aa, Homo sapiens
MICQKFCVVLLHWEFIYVITAFNLSYPITPWRFKLSCMPPNSTYDYFLLPAGLSKNTSNSNGHYETAVEPKFNSSGTHFSNLSKTTFHCCFRSEQDRNCSLCADNIEGKTFVSTVNSLVFQQIDANWNIQCWLKGDLKLFICYVESLFKNLFRNYNYKVHLLYVLPEVLEDSPLVPQKGSFQMVHCNCSVHECCECLVPVPTAKLNDTLLMCLKITSGGVIFQSPLMSVQPINMVKPDPPLGLHMEITDDGNLKISWSSPPLVPFPLQYQVKYSENSTTVIREADKIVSATSLLVDSILPGSSYEVQVRGKRLDGPGIWSDWSTPRVFTTQDVIYFPPKILTSVGSNVSFHCIYKKENKIVPSKEIVWWMNLAEKIPQSQYDVVSDHVSKVTFFNLNETKPRGKFTYDAVYCCNEHECHHRYAELYVIDVNINISCETDGYLTKMTCRWSTSTIQSLAESTLQLRYHRSSLYCSDIPSIHPISEPKDCYLQSDGFYECIFQPIFLLSGYTMWIRINHSLGSLDSPPTCVLPDSVVKPLPPSSVKAEITINIGLLKISWEKPVFPENNLQFQIRYGLSGKEVQWKMYEVYDAKSKSVSLPVPDLCAVYAVQVRCKRLDGLGYWSNWSNPAYTVVMDIKVPMRGPEFWRIINGDTMKKEKNVTLLWKPLMKNDSLCSVQRYVINHHTSCNGTWSEDVGNHTKFTFLWTEQAHTVTVLAINSIGASVANFNLTFSWPMSKVNIVQSLSAYPLNSSCVIVSWILSPSDYKLMYFIIEWKNLNEDGEIKWLRISSSVKKYYIHDHFIPIEKYQFSLYPIFMEGVGKPKIINSFTQDDIEKHQSDAGLYVIVPVIISSSILLLGTLLISHQRMKKLFWEDVPNPKNCSWAQGLNFQKRTDIL

SEQ ID NO: 51255 - protein, 232 aa, Homo sapiens
MMPTTVVSLLSTTDLEKGSVCISDQFNSVNFSEAEGTEVTYEDESQRQPFVKYATLISNSKPSETGEEQGLINSSVTKCFSSKNSPLKDSFSNSSWEIEAQAFFILSDQHPNIISPHLTFSEGLDELLKLEGNFPEENNDKKSIYYLGVTSIKKRESGVLLTDKSRVSCPFPAPCLFTDIRVLQDSCSHFVENNINLGTSSKKTFASYMPQFQTCSTQTHKIMENKMCDLTV

SEQ ID NO: 51256 - protein, 131 aa, Homo sapiens
MAGVKALVALSFSGAIGLTFLMLGCALEDYGVYWPLFVLIFHAISPIPHFIAKRVTYDSDATSSACRELAYFFTTGIVVSAFGFPVILARVAVIKWGACGLVLAGNAVIFLTIQGFFLIFGRGDDFSWEQW

SEQ ID NO: 51257 - protein, 131 aa, Homo sapiens
MAGIKALISLSFGGAIGLMFLMLGCALPIYNKYWPLFVLFFYILSPIPYCIARRLVDDTDAMSNACKELAIFLTTGIVVSAFGLPIVFARAHLIEWGACALVLTGNTVIFATILGFFLVFGSNDDFSWQQW

SEQ ID NO: 51258 - protein, 169 aa, Homo sapiens
MAGIKALISLSFGGAIGLMFLMLGCALPIYNKYWPLFVLFFYILSPIPYCIARRLVDDTDAMSNACKELAIFLTTGIVVSAFGLPIVFARAHLMGRLPFFSKMGTAESEGRETLTQQLPLPAAAMRRLLPASRVSTQPVLRLADSAESLLGRPALWALGFLLCPPSQAQ

SEQ ID NO: 51259 - protein, 1064 aa, Homo sapiens
MMKFRFRRQGADPQREKLKQELFAFNKTVEHGFPNQPSALAFDPELRIMAIGTRSGAVKIYGAPGVEFTGLHRDAATVTQMHFLTGQGRLLSLLDDSSLHLWEIVHHNGCAHLEEALSFQLPSRPGFDGASAPLSLTRVTVVLLVAASDIAALGTEGSSVFFLDVTTLTLLEGQTLAPGEVLRSVPDDYRCGKALGPVESLQGHLRDPTKILIGYSRGLLVIWNQASQCVDHIFLGNQQLESLCWGRDSSTVVSSHSDGSYAVWSVDAGSFPTLQPTVATTPYGPFPCKAINKILWRNCESGGHFIIFSGGMPRASYGDRHCVSVLRAETLVTLDFTSRIIDFFTVHSTRPEDEFDDPQALAVLLEEELVVLDLQTPGWPAVPAPYLAPLHSSAITCSAHVASVPAKLWARIVSAGEQQSPQPVSSALSWPITGGRNLAQEPSQRGLLLTGHEDGTVRFWDASGVALRPLYKLSTAGLFQTDCEHADSLAQAAEDDWPPFRKVGCFDPYSDDPRLGVQKVALCKYTAQMVVAGTAGQVLVLELSDVPVEQAVSVAIIDLLQDREGFTWKGHERLSPRTGPLPWPAGFQPRVLVQCLPPAAVTAVTLHTEWSLVAFGTSHGFGLFDYQRKSPVLARCTLHPNDSLAMEGPLSRVKSLKKSLRQSFRRIRKSRVSGKKRAANASSKLQEANAQLAEQACPHDVEMTPVQRRIEPRSADDSLSGVVRCLYFADTFLRDGAHHGPTMWAGTNSGSVFAYALEVPAAAVGGEKRPEQAVEAVLGKEVQLMHRAPVVAIAVLDGRGRPLPEPYEASRDLAQAPDMQGGHAVLIASEEQFKVFTLPKVSAKTKFKLTAHEGCRVRKVALATFASVACEDYAETCLACLTNLGDVHVFSVPGLRPQVHYSCIRKEDISGIASCVFTRHGQGFYLISPSEFERFSLSARNITEPLCSLDINWPRDATQASYRIRESPKLSQANGTPSILLAPQSLDGSPDPAHSMGPDTPEPPEAALSPMSIDSATSADTTLDTTGDVTVEDVKDFLGSSEESEKNLRNLAEDEAHACAILIK

SEQ ID NO: 51260 - protein, 351 aa, Homo sapiens
ELPSAAPDSTLLLTAQHWVANLFILATLIGWTVRSFFLGRMETCCSHLGLRSGRRFAVSIGYWHDPYIQHFVRLSKERKAPEINRGYFARVHGVSQLIKAFLRKTECHCQIVNLGAGMDTTFWRLKDEDLLPSKYFEVDFPMIVTRKLHSIKCKPPLSSPILELHSEDTLQMDGHILDSKRYAVIGADLRDLSELEEKLKKCNMNTQLPTLLIAECVLVYMTPEQSANLLKWAANSFERAMFINYEQVNMGDRFGQIMIENLRRRQCDLAGVETCKSLESQKERLLSNGWETASAVDMMELYNRLPRAEVSRIESLEFLDEMELLEQLMRHYCLCWATKGGNELGLKEITY

SEQ ID NO: 51261 - protein, 279 aa, Homo sapiens
MATRQRESSITSCCSTSSCDADDEGVRGTCEDASLCKRFAVSIGYWHDPYIQHFVRLSKERKAPEINRGYFARVHGVSQLIKAFLRKTECHCQIVNLGAGMDTTFWRLKDEDLLPSKYFEVDFPMIVTRKLHSIKLPTLLIAECVLVYMTPEQSANLLKWAANSFERAMFINYEQVNMGDRFGQIMIENLRRRQCDLAGVETCKSLESQKERLLSNGWETASAVDMMELYNRLPRAEVSRIESLEFLDEMELLEQLMRHYCLCWATKGGNELGLKEITY

SEQ ID NO: 51262 - protein, 334 aa, Homo sapiens
MATRQRESSITSCCSTSSCDADDEGVRGTCEDASLCKRFAVSIGYWHDPYIQHFVRLSKERKAPEINRGYFARVHGVSQLIKAFLRKTECHCQIVNLGAGMDTTFWRLKDEDLLPSKYFEVDFPMIVTRKLHSIKCKPPLSSPILELHSEDTLQMDGHILDSKRYAVIGADLRDLSELEEKLKKCNMNTQLPTLLIAECVLVYMTPEQSANLLKWAANSFERAMFINYEQVNMGDRFGQIMIENLRRRQCDLAGVETCKSLESQKERLLSNGWETASAVDMMELYNRLPRAEVSRIESLEFLDEMELLEQLMRHYCLCWATKGGNELGLKEITY

SEQ ID NO: 51263 - protein, 804 aa, Homo sapiens
MAVRALKLLTTLLAVVAAASQAEVESEAGWGMVTPDLLFAEGTAAYARGDWPGVVLSMERALRSRAALRALRLRCRTQCAADFPWELDPDWSPSPAQASGAAALRDLSFFGGLLRRAACLRRCLGPPAAHSLSEEMELEFRKRSPYNYLQVAYFKINKLEKAVAAAHTFFVGNPEHMEMQQNLDYYQTMSGVKEADFKDLETQPHMQEFRLGVRLYSEEQPQEAVPHLEAALQEYFVAYEECRALCEGPYDYDGYNYLEYNADLFQAITDHYIQVLNCKQNCVTELASHPSREKPFEDFLPSHYNYLQFAYYNIGNYTQAVECAKTYLLFFPNDEVMNQNLAYYAAMLGEEHTRSIGPRESAKEYRQRSLLEKELLFFAYDVFGIPFVDPDSWTPEEVIPKRLQEKQKSERETAVRISQEIGNLMKEIETLVEEKTKESLDVSRLTREGGPLLYEGISLTMNSKLLNGSQRVVMDGVISDHECQELQRLTNVAATSGDGYRGQTSPHTPNEKFYGVTVFKALKLGQEGKVPLQSAHLYYNVTEKVRRIMESYFRLDTPLYFSYSHLVCRTAIEEVQAERKDDSHPVHVDNCILNAETLVCVKEPPAYTFRDYSAILYLNGDFDGGNFYFTELDAKTVTAEVQPQCGRAVGFSSGTENPHGVKAVTRGQRCAIALWFTLDPRHSERVRAARAGESSWCCGDPFPERPWFAFLFPKSHCQWLRHERSTWDTSSNALSLWSHCLVLPGPAVNGIQVGKEVKTGSDAEFLVPSLGPTSAVLFQRVGPAGKEMSLGPLRNLPCPLGSSS

SEQ ID NO: 51264 - protein, 736 aa, Homo sapiens
MAVRALKLLTTLLAVVAAASQAEVESEAGWGMVTPDLLFAEGTAAYARGDWPGVVLSMERALRSRAALRALRLRCRTQCAADFPWELDPDWSPSPAQASGAAALRDLSFFGGLLRRAACLRRCLGPPAAHSLSEEMELEFRKRSPYNYLQVAYFKINKLEKAVAAAHTFFVGNPEHMEMQQNLDYYQTMSGVKEADFKDLETQPHMQEFRLGVRLYSEEQPQEAVPHLEAALQEYFVAYEECRALCEGPYDYDGYNYLEYNADLFQAITDHYIQVLNCKQNCVTELASHPSREKPFEDFLPSHYNYLQFAYYNIGNYTQAVECAKTYLLFFPNDEVMNQNLAYYAAMLGEEHTRSIGPRESAKEYRQRSLLEKELLFFAYDVFGIPFVDPDSWTPEEVIPKRLQEKQKSERETAVRISQEIGNLMKEIETLVEEKTKESLDVSRLTREGGPLLYEGISLTMNSKLLNGSQRVVMDGVISDHECQELQRLTNVAATSGDGYRGQTSPHTPNEKFYGVTVFKALKLGQEGKVPLQSAHLYYNVTEKVRRIMESYFRLDTPLYFSYSHLVCRTAIEEVQAERKDDSHPVHVDNCILNAETLVCVKEPPAYTFRDYSAILYLNGDFDGGNFYFTELDAKTVTAEVQPQCGRAVGFSSGTENPHGVKAVTRGQRCAIALWFTLDPRHSERDRVQADDLVKMLFSPEEMDLSQEQPLDAQQGPPEPAQESLSGSESKPKDEL

SEQ ID NO: 51265 - protein, 697 aa, Homo sapiens
MAVRALKLLTTLLAVVAAASQAEVESEAGWGMVTPDLLFAEGTAAYARGDWPGVVLSMERALRSRAALRALRLRCRTQCAADFPWELDPDWSPSPAQASGAAALRDLSFFGGLLRRAACLRRCLGPPAAHSLSEEMELEFRKRSPYNYLQVAYFKINKLEKAVAAAHTFFVGNPEHMEMQQNLDYYQTMSGVKEADFKDLETQPHMQEFRLGVRLYSEEQPQEAVPHLEAALQEYFVAYEECRALCEGPYDYDGYNYLEYNADLFQAITDHYIQVLNCKQNCVTELASHPSREKPFEDFLPSHYNYLQFAYYNIGNYTQAVECAKTYLLFFPNDEVMNQNLAYYAAMLGEEHTRSIGPRESAKEYRQRSLLEKELLFFAYDVFGIPFVDPDSWTPEEVIPKRLQEKQKSERETAVRISQEIGNLMKEIETLVEEKTKESLDVSRLTREGGPLLYEGISLTMNSKLLNGSQRVVMDGVISDHECQELQRLTNVAATSGDGYRGQTSPHTPNEKFYGVTVFKALKLGQEGKVPLQSAHLYYNVTEKVRRIMESYFRLDTPLYFSYSHLVCRTAIEEVQAERKDDSHPVHVDNCILNAETLVCVKEPPAYTFRDYSAILYLNGDFDGGNFYFTELDAKTVTAEVQPQCGRAVGFSSGTENPHGVKAVTRGQRCAIALWFTLDPRHSERVRAARAGQGAGR

SEQ ID NO: 51266 - protein, 152 aa, Homo sapiens
  VARIANT 1: note = MOD_RES - Any amino acid
XERETAVRISQEIGNLMKEIETLVEEKTKESLDVSRLTREGGPLLYEGISLTMNSKLLNGSQRVVMDGVISDHECQELQRLTNVAATSGDGYRGQTSPHTPNEKFYGVTVFKALKRGVVLVRFHTADKDVPETGQFTKERGLLGLTVPCGWG

SEQ ID NO: 51267 - protein, 601 aa, Homo sapiens
MELEFRKRSPYNYLQVAYFKINKLEKAVAAAHTFFVGNPEHMEMQQNLDYYQTMSGVKEADFKDLETQPHMQEFRLGVRLYSEEQPQEAVPHLEAALQEYFVAYEECRALCEGPYDYDGYNYLEYNADLFQAITDHYIQVLNCKQNCVTELASHPSREKPFEDFLPSHYNYLQFAYYNIGNYTQAVECAKTYLLFFPNDEVMNQNLAYYAAMLGEEHTRSIGPRESAKEYRQRSLLEKELLFFAYDVFGIPFVDPDSWTPEEVIPKRLQEKQKSERETAVRISQEIGNLMKEIETLVEEKTKESLDVSRLTREGGPLLYEGISLTMNSKLLNGSQRVVMDGVISDHECQELQRLTNVAATSGDGYRGQTSPHTPNEKFYGVTVFKALKLGQEGKVPLQSAHLYYNVTEKVRRIMESYFRLDTPLYFSYSHLVCRTAIEEVQAERKDDSHPVHVDNCILNAETLVCVKEPPAYTFRDYSAILYLNGDFDGGNFYFTELDAKTVTAEVQPQCGRAVGFSSGTENPHGVKAVTRGQRCAIALWFTLDPRHSERDRVQADDLVKMLFSPEEMDLSQEQPLDAQQGPPEPAQESLSGSESKPKDEL

SEQ ID NO: 51268 - protein, 784 aa, Homo sapiens
MTSPAAAQSREIDCLSPEAQKLAEARLAAKRAARAEAREIRMKELERQQKEEDSERYSRRSRRNTSASDEDERMSVGSRGSLRVEERPEKDFTEKGSRNMPGLSAATLASLGGTSSRRGSGDTSISIDTEASIREIKDSLAEVEEKYKKAMVSNAQLDNEKTNFMYQVDTLKDMLLELEEQLAESRRQYEEKNKEFEREKHAHSILQFQFAEVKEALKQREEMLEKHGIILNSEIATNGETSDTLNNVGYQGPTKMTKEELNALKSTGDGTLGRASEVEVKNEIVANVGKREILHNTEKEQHTEDTVKDCVDIEVFPAGENTEDQKSSEDTAPFLGTLAGATYEEQVQSQILESSSLPENTVQVESNEVMGAPDDRTRTPLEPSNCWSDLDGGNHTENVGEAAVTQVEEQAGTVASCPLGHSDDTVYHDDKCMVEVPQELETSTGHSLEKEFTNQEAAEPKEVPAHSTEVGRDHNEEEGEETGLRDEKPIKTEVPGSPAGTEGNCQEATGPSTVDTQNEPLDMKEPDEEKSDQQGEALDSSQKKTKNKKKKNKKKKSPVPVETLKDVKKELTYQNTDLSEIKEEEQVKSTDRKSAVEAQNEVTENPKQKIAAESSENVDCPENPKIKLDGKLDQEGDDVQTAAEEVLADGDTLDFEDDTVQSSGPRAGGEELDEGVAKDNAKIDGATQSSPAEPKSEDADRCTLPEHESPSQDISDACEAESTERCEMSEHPSQTVRKALDSNSLENDDLSAPGREPGHFNPESREDTRGGNEKGKSKEDCTMS

SEQ ID NO: 51269 - protein, 752 aa, Homo sapiens
MTSPAAAQSREIDCLSPEAQKLAEARLAAKRAARAEAREIRMKELERQQKEVEERPEKDFTEKGSRNMPGLSAATLASLGGTSSRRGSGDTSISIDTEASIREIKDSLAEVEEKYKKAMVSNAQLDNEKTNFMYQVDTLKDMLLELEEQLAESRRQYEEKNKEFEREKHAHSILQFQFAEVKEALKQREEMLEKHGIILNSEIATNGETSDTLNNVGYQGPTKMTKEELNALKSTGDGTLGRASEVEVKNEIVANVGKREILHNTEKEQHTEDTVKDCVDIEVFPAGENTEDQKSSEDTAPFLGTLAGATYEEQVQSQILESSSLPENTVQVESNEVMGAPDDRTRTPLEPSNCWSDLDGGNHTENVGEAAVTQVEEQAGTVASCPLGHSDDTVYHDDKCMVEVPQELETSTGHSLEKEFTNQEAAEPKEVPAHSTEVGRDHNEEEGEETGLRDEKPIKTEVPGSPAGTEGNCQEATGPSTVDTQNEPLDMKEPDEEKSDQQGEALDSSQKKTKNKKKKNKKKKSPVPVETLKDVKKELTYQNTDLSEIKEEEQVKSTDRKSAVEAQNEVTENPKQKIAAESSENVDCPENPKIKLDGKLDQEGDDVQTAAEEVLADGDTLDFEDDTVQSSGPRAGGEELDEGVAKDNAKIDGATQSSPAEPKSEDADRCTLPEHESPSQDISDACEAESTERCEMSEHPSQTVRKALDSNSLENDDLSAPGREPGHFNPESREDTRGGNEKGKSKEDCTMS

SEQ ID NO: 51270 - protein, 630 aa, Homo sapiens
MTSPAAAQSREIDCLSPEAQKLAEARLAAKRAARAEAREIRMKELERQQKEVTSAQEKYYGLDTKWGDIEQWMEDSERYSRRSRRNTSASDEDERMSVGSRGSLRSQPDLEYGGPYAWTNGYDGELYGSQSLNRRSGRPSCLYSAARPSGSYRASVLDEGSFGGTRRGSTSGSRAPSEYSGHLNSSSRASSRASSARASPVVEERPEKDFTEKGSRNMPGLSAATLASLGGTSSRRGSGDTSISIDTEASIREIKELNELKDQIQDVEGKYMQGLKEMKDSLAEVEEKYKKAMVSNAQLDNEKTNFMYQVDTLKDMLLELEEQLAESRRQYEEKNKEFEREKHAHSILQFQFAEVKEALKQREEMLEEIRQLQQKQASSIREISDLQETIEWKDKKIGALERQKEFFDSVRSERDDLREEVVMLKEELKKHGIILNSEIATNGETSDTLNNVGYQGPTKMTKEELNALKSTGDGTLDIRLKKLVDERECLLEQIKKLKGQLEERQKIGKLDNLRSEDDVLENGTDMHVMDLQRDANRQISDLKFKLAKSEQEITALEQNVIRLESQVSRYKSAAENAEKIEDELKAEKRKLQRELRSALDKTEELEVSNGHLVKRLEKMKANRSALLSQQ

SEQ ID NO: 51271 - protein, 808 aa, Homo sapiens
MTSPAAAQSREIDCLSPEAQKLAEARLAAKRAARAEAREIRMKELERQQKEEDSERYSRRSRRNTSASDEDERMSVGSRGSLRVEERPEKDFTEKGSRNMPGLSAATLASLGGTSSRRGSGDTSISIDTEASIREIKELNELKDQIQDVEGKYMQGLKEMKDSLAEVEEKYKKAMVSNAQLDNEKTNFMYQVDTLKDMLLELEEQLAESRRQYEEKNKEFEREKHAHSILQFQFAEVKEALKQREEMLEKHGIILNSEIATNGETSDTLNNVGYQGPTKMTKEELNALKSTGDGTLGRASEVEVKNEIVANVGKREILHNTEKEQHTEDTVKDCVDIEVFPAGENTEDQKSSEDTAPFLGTLAGATYEEQVQSQILESSSLPENTVQVESNEVMGAPDDRTRTPLEPSNCWSDLDGGNHTENVGEAAVTQVEEQAGTVASCPLGHSDDTVYHDDKCMVEVPQELETSTGHSLEKEFTNQEAAEPKEVPAHSTEVGRDHNEEEGEETGLRDEKPIKTEVPGSPAGTEGNCQEATGPSTVDTQNEPLDMKEPDEEKSDQQGEALDSSQKKTKNKKKKNKKKKSPVPVETLKDVKKELTYQNTDLSEIKEEEQVKSTDRKSAVEAQNEVTENPKQKIAAESSENVDCPENPKIKLDGKLDQEGDDVQTAAEEVLADGDTLDFEDDTVQSSGPRAGGEELDEGVAKDNAKIDGATQSSPAEPKSEDADRCTLPEHESPSQDISDACEAESTERCEMSEHPSQTVRKALDSNSLENDDLSAPGREPGHFNPESREDTRGGNEKGKSKEDCTMS

SEQ ID NO: 51272 - protein, 640 aa, Homo sapiens
MDMGTQGSGRKRLPNRERLTAEDDALNQIAREAEARLAAKRAARAEAREIRMKELERQQKEIYQVQKKYYGLDTKWGDIEQWMEDSERYSRRSRRNTSASDEDERMSVGSRGSLRSQPDLEYGGPYAWTNGYDGELYGSQSLNRRSGRPSCLYSAARPSGSYRASVLDEGSFGGTRRGSTSGSRAPSEYSGHLNSSSRASSRASSARASPVVEERPEKDFTEKGSRNMPGLSAATLASLGGTSSRRGSGDTSISIDTEASIREIKELNELKDQIQDVEGKYMQGLKEMKDSLAEVEEKYKKAMVSNAQLDNEKTNFMYQVDTLKDMLLELEEQLAESRRQYEEKNKEFEREKHAHSILQFQFAEVKEALKQREEMLEEIRQLQQKQASSIREISDLQETIEWKDKKIGALERQKEFFDSVRSERDDLREEVVMLKEELKKHGIILNSEIATNGETSDTLNNVGYQGPTKMTKEELNALKSTGDGTLDIRLKKLVDERECLLEQIKKLKGQLEERQKIGKLDNLRSEDDVLENGTDMHVMDLQRDANRQISDLKFKLAKSEQEITALEQNVIRLESQVSRYKSAAENAEKIEDELKAEKRKLQRELRSALDKTEELEVSNGHLVKRLEKMKANRSALLSQQ

SEQ ID NO: 51273 - protein, 721 aa, Homo sapiens
MGTPASGRKRTPVKDRFSAEDEALSNIAREAEARLAAKRAARAEARDIRMRELERQQKEYSLHSFDRKWGQIQKWLEDSERARYSHRSSHHRPYLGVEDALSIRSVGSHRYDMFKDRSSRLSSLNHSYSHSHGMKKRSSDSHKDLLSGLYFDQRNYSSLRHSKPTSAYYTRQSSSLYSDPLATYKSDRASPTANSGLLRSASLASLYNGGLYNPYGPRTPSECSYYSSRISSARSSPGFTNDDTASIVSSDRASRGRRESVVSAADYFSRSNRRGSVVSEVDDISIPDLSSLDEKSDKQYAENYTRPSSRNSASATTPLSGNSSRRGSGDTSSLIDPDTSLSELRDIYDLKDQIQDVEGRYMQGLKELKESLSEVEEKYKKAMVSNAQLDNEKNNLIYQVDTLKDVIEEQEEQMAEFYRENEEKSKELERQKHMCSVLQHKMEELKEGLRQRDELIEEKQRMQQKIDTMTKEVFDLQETLLWKDKKIGALEKQKEYIACLRNERDMLREELADLQETVKTGEKHGLVIIPDGTPNGDVSHEPVAGAITVVSQEAAQVLESAGEGPLDVRLRKLAGEKEELLSQIRKLKLQLEEERQKCSRNDGTVGDLAGLQNGSDLQFIEMQRDANRQISEYKFKLSKAEQDITTLEQSISRLEGQVLRYKTAAENAEKVEDELKAEKRKLQRELRTALDKIEEMEMTNSHLAKRLEKMKANRTALLAQQ

SEQ ID NO: 51274 - protein, 400 aa, Homo sapiens
MGTPASGRKRTPVKDRFSAEDEALSNIAREAEARLAAKRAARAEARDIRMRELERQQKELDEKSDKQYAENYTRPSSRNSASATTPLSGNSSRRGSGDTSSLIDPDTSLSELRESLSEVEEKYKKAMVSNAQLDNEKNNLIYQVDTLKDVIEEQEEQMAEFYRENEEKSKELERQKHMCSVLQHKMEELKEGLRQRDELIEKHGLVIIPDGTPNGDVSHEPVAGAITVVSQEAAQVLESAGEGPLDVRLRKLAGEKEELLSQIRKLKLQLEEERQKCSRNDGTVGDLAGLQNGSDLQFIEMQRDANRQISEYKFKLSKAEQDITTLEQSISRLEGQVLRYKTAAENAEKVEDELKAEKRKLQRELRTALDKIEEMEMTNSHLAKRLEKMKANRTALLAQQ

SEQ ID NO: 51275 - protein, 721 aa, Homo sapiens; identical to SEQ ID NO: 51273

SEQ ID NO: 51276 - protein, 59 aa, Homo sapiens
MGTPASGRKRTPVKDRFSAEDEALSNIAREAEARLAAKRAARAEARDIRMRELERQQKE

SEQ ID NO: 51277 - protein, 59 aa, Homo sapiens; identical to SEQ ID NO: 51276

SEQ ID NO: 51278 - protein, 59 aa, Homo sapiens; identical to SEQ ID NO: 51276

SEQ ID NO: 51279 - protein, 424 aa, Homo sapiens
MGTPASGRKRTPVKDRFSAEDEALSNIAREAEARLAAKRAARAEARDIRMRELERQQKELDEKSDKQYAENYTRPSSRNSASATTPLSGNSSRRGSGDTSSLIDPDTSLSELRDIYDLKDQIQDVEGRYMQGLKELKESLSEVEEKYKKAMVSNAQLDNEKNNLIYQVDTLKDVIEEQEEQMAEFYRENEEKSKELERQKHMCSVLQHKMEELKEGLRQRDELIEKHGLVIIPDGTPNGDVSHEPVAGAITVVSQEAAQVLESAGEGPLDVRLRKLAGEKEELLSQIRKLKLQLEEERQKCSRNDGTVGDLAGLQNGSDLQFIEMQRDANRQISEYKFKLSKAEQDITTLEQSISRLEGQVLRYKTAAENAEKVEDELKAEKRKLQRELRTALDKIEEMEMTNSHLAKRLEKMKANRTALLAQQ

SEQ ID NO: 51280 - protein, 771 aa, Homo sapiens
MAPGPFSSALLSPPPAALPFLLLLWAGASRGQPCPGRCICQNVAPTLTMLCAKTGLLFVPPAIDRRVVELRLTDNFIAAVRRRDFANMTSLVHLTLSRNTIGQVAAGAFADLRALRALHLDSNRLAEVRGDQLRGLGNLRHLILGNNQIRRVESAAFDAFLSTVEDLDLSYNNLEALPWEAVGQMVNLNTLTLDHNLIDHIAEGTFVQLHKLVRLDMTSNRLHKLPPDGLFLRSQGTGPKPPTPLTVSFGGNPLHCNCELLWLRRLTREDDLETCATPEHLTDRYFWSIPEEEFLCEPPLITRQAGGRALVVEGQAVSLRCRAVGDPEPVVHWVAPDGRLLGNSSRTRVRGDGTLDVTITTLRDSGTFTCIASNAAGEATAPVEVCVVPLPLMAPPPAAPPPLTEPGSSDIATPGRPGANDSAAERRLVAAELTSNSVLIRWPAQRPVPGIRMYQVQYNSSVDDSLVYRMIPSTSQTFLVNDLAAGRAYDLCVLAVYDDGATALPATRVVGCVQFTTAGDPAPCRPLRAHFLGGTMIIAIGGVIVASVLVFIVLLMIRYKVYGDGDSRRVKGSRSLPRVSHVCSQTNGAGTGAAQAPALPAQDHYEALREVESQAAPAVAVEAKAMEAETASAEPEVVLGRSLGGSATSLCLLPSEETSGEESRAAVGPRRSRSGALEPPTSAPPTLALVPGGAAARPRPQQRYSFDGDYGALFQSHSYPRRARRTKRHRSTPHLDGAGGGAAGEDGDLGLGSARACLAFTSTEWMLESTV

SEQ ID NO: 51281 - protein, 789 aa, Homo sapiens
METLLGGLLAFGMAFAVVDACPKYCVCQNLSESLGTLCPSKGLLFVPPDIDRRTVELRLGGNFIIHISRQDFANMTGLVDLTLSRNTISHIQPFSFLDLESLRSLHLDSNRLPSLGEDTLRGLVNLQHLIVNNNQLGGIADEAFEDFLLTLEDLDLSYNNLHGLPWDSVRRMVNLHQLSLDHNLLDHIAEGTFADLQKLARLDLTSNRLQKLPPDPIFARSQASALTATPFAPPLSFSFGGNPLHCNCELLWLRRLERDDDLETCGSPGGLKGRYFWHVREEEFVCEPPLITQHTHKLLVLEGQAATLKCKAIGDPSPLIHWVAPDDRLVGNSSRTAVYDNGTLDIFITTSQDSGAFTCIAANAAGEATAMVEVSIVQLPHLSNSTSRTAPPKSRLSDITGSSKTSRGGGGSGGGEPPKSPPERAVLVSEVTTTSALVKWSVSKSAPRVKMYQLQYNCSDDEVLIYRMIPASNKAFVVNNLVSGTGYDLCVLAMWDDTATTLTATNIVGCAQFFTKADYPQCQSMHSQILGGTMILVIGGIIVATLLVFIVILMVRYKVCNHEAPSKMAAAVSNVYSQTNGAQPPPPSSAPAGAPPQGPPKVVVRNELLDFTASLARASDSSSSSSLGSGEAAGLGRAPWRIPPSAPRPKPSLDRLMGAFASLDLKSQRKEELLDSRTPAGRGAGTSARGHHSDREPLLGPPAARARSLLPLPLEGKAKRSHSFDMGDFAAAAAGGVVPGGYSPPRKVSNIWTKRSLSVNGMLLPFEESDLVGARGTFGSSEWVMESTV

SEQ ID NO: 51282 - protein, 628 aa, Homo sapiens
MAILPLLLCLLPLAPASSPPQSATPSPCPRRCRCQTQSLPLSVLCPGAGLLFVPPSLDRRAAELRLADNFIASVRRRDLANMTGLLHLSLSRNTIRHVAAGAFADLRALRALHLDGNRLTSLGEGQLRGLVNLRHLILSNNQLAALAAGALDDCAETLEDLDLSYNNLEQLPWEALGRLGNVNTLGLDHNLLASVPAGAFSRLHKLARLDMTSNRLTTIPPDPLFSRLPLLARPRGSPASALVLAFGGNPLHCNCELVWLRRLAREDDLEACASPPALGGRYFWAVGEEEFVCEPPVVTHRSPPLAVPAGRPAALRCRAVGDPEPRVRWVSPQGRLLGNSSRARAFPNGTLELLVTEPGDGGIFTCIAANAAGEATAAVELTVGPPPPPQLANSTSCDPPRDGDPDALTPPSAASASAKVADTGPPTDRGVQVTEHGATAALVQWPDQRPIPGIRMYQIQYNSSADDILVYRMIPAESRSFLLTDLASGRTYDLCVLAVYEDSATGLTATRPVGCARFSTEPALRPCGAPHAPFLGGTMIIALGGVIVASVLVFIFVLLMRYKVHGGQPPGKAKIPAPVSSVCSQTNGALGPTPTPAPPAPEPAALRAHTVVQLDCEPWGPGHEPVGP

SEQ ID NO: 51283 - protein, 628 aa, Homo sapiens; identical to SEQ ID NO: 51282

SEQ ID NO: 51284 - protein, 635 aa, Homo sapiens
MAPPLLLLLLASGAAACPLPCVCQNLSESLSTLCAHRGLLFVPPNVDRRTVELRLADNFIQALGPPDFRNMTGLVDLTLSRNAITRIGARAFGDLESLRSLHLDGNRLVELGTGSLRGPVNLQHLILSGNQLGRIAPGAFDDFLESLEDLDLSYNNLRQVPWAGIGAMPALHTLNLDHNLIDALPPGAFAQLGQLSRLDLTSNRLATLAPDPLFSRGRDAEASPAPLVLSFSGNPLHCNCELLWLRRLARPDDLETCASPPGLAGRYFWAVPEGEFSCEPPLIARHTQRLWVLEGQRATLRCRALGDPAPTMHWVGPDDRLVGNSSRARAFPNGTLEIGVTGAGDAGGYTCIATNPAGEATARVELRVLALPHGGNSSAEGGRPGPSDIAASARTAAEGEGTLESEPAVQVTEVTATSGLVSWGPGRPADPVWMFQIQYNSSEDETLIYRIVPASSHHFLLKHLVPGADYDLCLLALSPAAGPSDLTATRLLGCAHFSTLPASPLCHALQAHVLGGTLTVAVGGVLVAALLVFTVALLVRGRGAGNGRLPLKLSHVQSQTNGGPSPTPKAHPPRSPPPRPQRSCSLDLGDAGCYGYARRLGGAWARRSHSVHGGLLGAGCRGVGGSAERLEESVV

SEQ ID NO: 51285 - protein, 719 aa, Homo sapiens
MEKILFYLFLIGIAVKAQICPKRCVCQILSPNLATLCAKKGLLFVPPNIDRRTVELRLADNFVTNIKRKDFANMTSLVDLTLSRNTISFITPHAFADLRNLRALHLNSNRLTKITNDMFSGLSNLHHLILNNNQLTLISSTAFDDVFALEELDLSYNNLETIPWDAVEKMVSLHTLSLDHNMIDNIPKGTFSHLHKMTRLDVTSNKLQKLPPDPLFQRAQVLATSGIISPSTFALSFGGNPLHCNCELLWLRRLSREDDLETCASPPLLTGRYFWSIPEEEFLCEPPLITRHTHEMRVLEGQRATLRCKARGDPEPAIHWISPEGKLISNATRSLVYDNGTLDILITTVKDTGAFTCIASNPAGEATQIVDLHIIKLPHLLNSTNHIHEPDPGSSDISTSTKSGSNTSSSNGDTKLSQDKIVVAEATSSTALLKFNFQRNIPGIRMFQIQYNGTYDDTLVYRMIPPTSKTFLVNNLAAGTMYDLCVLAIYDDGITSLTATRVVGCIQFTTEQDYVRCHFMQSQFLGGTMIIIIGGIIVASVLVFIIILMIRYKVCNNNGQHKVTKVSNVYSQTNGAQIQGCSVTLPQSVSKQAVGHEENAQCCKATSDNVIQSSETCSSQDSSTTTSALPPSWTSSTSVSQKQKRKTGTKPSTEPQNEAVTNVESQNTNRNNSTALQLASRPPDSVTEGPTSKRAHIKPNALLTNVDQIVQETQRLELI

SEQ ID NO: 51286 - protein, 620 aa, Homo sapiens
MQVSKRMLAGGVRSMPSPLLACWQPILLLVLGSVLSGSATGCPPRCECSAQDRAVLCHRKRFVAVPEGIPTETRLLDLGKNRIKTLNQDEFASFPHLEELELNENIVSAVEPGAFNNLFNLRTLGLRSNRLKLIPLGVFTGLSNLTKLDISENKIVILLDYMFQDLYNLKSLEVGDNDLVYISHRAFSGLNSLEQLTLEKCNLTSIPTEALSHLHGLIVLRLRHLNINAIRDYSFKRLYRLKVLEISHWPYLDTMTPNCLYGLNLTSLSITHCNLTAVPYLAVRHLVYLRFLNLSYNPISTIEGSMLHELLRLQEIQLVGGQLAVVEPYAFRGLNYLRVLNVSGNQLTTLEESVFHSVGNLETLILDSNPLACDCRLLWVFRRRWRLNFNRQQPTCATPEFVQGKEFKDFPDVLLPNYFTCRRARIRDRKAQQVFVDEGHTVQFVCRADGDPPPAILWLSPRKHLVSAKSNGRLTVFPDGTLEVRYAQVQDNGTYLCIAANAGGNDSMPAHLHVRSYSPDWPHQPNKTFAFISNQPGEGEANSTRATVPFPFDIKTLIIATTMGFISFLGVVLFCLVLLFLWSRGKGNTKHNIEIEYVPRKSDAGISSADAPRKFNMKMI

SEQ ID NO: 51287 - protein, 55 aa, Homo sapiens
MLAGGVRSMPSPLLACWQPILLLVLGSVLSGSATGCPPRCECSAQDRAVLCHRKR

SEQ ID NO: 51288 - protein, 614 aa, Homo sapiens
MLAGGVRSMPSPLLACWQPILLLVLGSVLSGSATGCPPRCECSAQDRAVLCHRKRFVAVPEGIPTETRLLDLGKNRIKTLNQDEFASFPHLEELELNENIVSAVEPGAFNNLFNLRTLGLRSNRLKLIPLGVFTGLSNLTKLDISENKIVILLDYMFQDLYNLKSLEVGDNDLVYISHRAFSGLNSLEQLTLEKCNLTSIPTEALSHLHGLIVLRLRHLNINAIRDYSFKRLYRLKVLEISHWPYLDTMTPNCLYGLNLTSLSITHCNLTAVPYLAVRHLVYLRFLNLSYNPISTIEGSMLHELLRLQEIQLVGGQLAVVEPYAFRGLNYLRVLNVSGNQLTTLEESVFHSVGNLETLILDSNPLACDCRLLWVFRRRWRLNFNRQQPTCATPEFVQGKEFKDFPDVLLPNYFTCRRARIRDRKAQQVFVDEGHTVQFVCRADGDPPPAILWLSPRKHLVSAKSNGRLTVFPDGTLEVRYAQVQDNGTYLCIAANAGGNDSMPAHLHVRSYSPDWPHQPNKTFAFISNQPGEGEANSTRATVPFPFDIKTLIIATTMGFISFLGVVLFCLVLLFLWSRGKGNTKHNIEIEYVPRKSDAGISSADAPRKFNMKMI

SEQ ID NO: 51289 - protein, 606 aa, Homo sapiens
MLHTAISCWQPFLGLAVVLIFMGSTIGCPARCECSAQNKSVSCHRRRLIAIPEGIPIETKILDLSKNRLKSVNPEEFISYPLLEEIDLSDNIIANVEPGAFNNLFNLRSLRLKGNRLKLVPLGVFTGLSNLTKLDISENKIVILLDYMFQDLHNLKSLEVGDNDLVYISHRAFSGLLSLEQLTLEKCNLTAVPTEALSHLRSLISLHLKHLNINNMPVYAFKRLFHLKHLEIDYWPLLDMMPANSLYGLNLTSLSVTNTNLSTVPFLAFKHLVYLTHLNLSYNPISTIEAGMFSDLIRLQELHIVGAQLRTIEPHSFQGLRFLRVLNVSQNLLETLEENVFSSPRALEVLSINNNPLACDCRLLWILQRQPTLQFGGQQPMCAGPDTIRERSFKDFHSTALSFYFTCKKPKIREKKLQHLLVDEGQTVQLECSADGDPQPVISWVTPRRRFITTKSNGRATVLGDGTLEIRFAQDQDSGMYVCIASNAAGNDTFTASLTVKGFASDRFLYANRTPMYMTDSNDTISNGTNANTFSLDLKTILVSTAMGCFTFLGVVLFCFLLLFVWSRGKGKHKNSIDLEYVPRKNNGAVVEGEVAGPRRFNMKMI

SEQ ID NO: 51290 - protein, 606 aa, Homo sapiens; identical to SEQ ID NO: 51289

SEQ ID NO: 51291 - protein, 592 aa, Homo sapiens
MTCWLCVLSLPLLLLPAAPPPAGGCPARCECTVQTRAVACTRRRLTAVPDGIPAETRLLELSRNRIRCLNPGDLAALPALEELDLSENAIAHVEPGAFANLPRLRVLRLRGNQLKLIPPGVFTRLDNLTLLDLSENKLVILLDYTFQDLHSLRRLEVGDNDLVFVSRRAFAGLLALEELTLERCNLTALSGESLGHLRSLGALRLRHLAIASLEDQNFRRLPGLLHLEIDNWPLLEEVAAGSLRGLNLTSLSVTHTNITAVPAAALRHQAHLTCLNLSHNPISTVPRGSFRDLVRLRELHLAGALLAVVEPQAFLGLRQIRLLNLSNNLLSTLEESTFHSVNTLETLRVDGNPLACDCRLLWIVQRRKTLNFDGRLPACATPAEVRGDALRNLPDSVLFEYFVCRKPKIRERRLQRVTATAGEDVRFLCRAEGEPAPTVAWVTPQHRPVTATSAGRARVLPGGTLEIQDARPQDSGTYTCVASNAGGNDTYFATLTVRPEPAANRTPGEAHNETLAALRAPLDLTTILVSTAMGCITFLGVVLFCFVLLFVWSRGRGQHKNNFSVEYSFRKVDGPAAAAGQGGARKFNMKMI

SEQ ID NO: 51292 - protein, 723 aa, Homo sapiens
MPLFFRKRKPSEEARKRLEYQMCLAKEAGADDILDISKCELSEIPFGAFATCKVLQKKVLIVHTNHLTSLLPKSCSLLSLATIKVLDLHDNQLTALPDDLGQLTALQVLNVERNQLMQLPRSIGNLTQLQTLNVKDNKLKELPDTVGELRSLRTLNISGNEIQRLPQMLAHVRTLEMLSLDASAMVYPPREVCGAGTAAILQFLCKESGLEYYPPSQYLLPILEQDGIENSRDSPDGPTDRFSREELEWQNRFSDYEKRKEQKMLEKLEFERRLELGQREHTQLLQQSSSQKDEILQTVKEEQSRLEQGLSEHQRHLNAERQRLQEQLKQTEQNISSRIQKLLQDNQRQKKSSEILKSLENERIRMEQLMSITQEETESLRRRDVASAMQQMLTESCKNRLIQMAYESQRQNLVQQACSSMAEMDERFQQILSWQQMDQNKAISQILQESAMQKAAFEALQVKKDLMHRQIRSQIKLIETELLQLTQLELKRKSLDTESLQEMISEQRWALSSLLQQLLKEKQQREEELREILTELEAKSETRQENYWLIQYQRLLNQKPLSLKLQEEGMERQLVALLEELSAEHYLPIFAHHRLSLDLLSQMSPGDLAKVGVSEAGLQHEILRRVQELLDAARIQPELKPPMGEVVTPTAPQEPPESVRPSAPPAELEVQASECVVCLEREAQMIFLNCGHVCCCQQCCQPLRTCPLCRQDIAQRLRIYHSS

SEQ ID NO: 51293 - protein, 723 aa, Homo sapiens; identical to SEQ ID NO: 51292

SEQ ID NO: 51294 - protein, 723 aa, Homo sapiens; identical to SEQ ID NO: 51292

SEQ ID NO: 51295 - protein, 696 aa, Homo sapiens
MPLFFRKRKPSEEARKRLEYQMCLAKEAGADDILDISKCELSEIPFGAFATCKVLQKKVLIVHTNHLTSLLPKSCSLLSLATIKVLDLHDNQLTALPDDLGQLTALQVLNVERNQLMQLPRSIGNLTQLQTLNVKDNKLKELPDTVGELRSLRTLNISGNEIQRLPQMLAHVRTLEMLSLDASAMVYPPREVCGAGTAAILQFLCKESGLEYYPPSQYLLPILEQDGIENSRDSPDGPTDRFSREELEWQNRFSDYEKRKEQKMLEKLEFERRLELGQREHTQLLQQSSSQKDEILQTVKEEQSRLEQGLSEHQRHLNAERQRLQEQLKQTEQNISSRIQKLLQDNQRQKKSSEILKSLENERIRMEQLMSITQEETESLRRRDVASAMQQMLTESCKNRLIQMAYESQRQNLVQQACSSMAEMDERFQQILSWQQMDQNKAISQILQESAMQKAAFEALQVKKDLMHRQIRSQEMISEQRWALSSLLQQLLKEKQQREEELREILTELEAKSETRQENYWLIQYQRLLNQKPLSLKLQEEGMERQLVALLEELSAEHYLPIFAHHRLSLDLLSQMSPGDLAKVGVSEAGLQHEILRRVQELLDAARIQPELKPPMGEVVTPTAPQEPPESVRPSAPPAELEVQASECVVCLEREAQMIFLNCGHVCCCQQCCQPLRTCPLCRQDIAQRLRIYHSS

SEQ ID NO: 51296 - protein, 154 aa, Homo sapiens
MFHCIPLWRCNRHVESIDKRHCSLVYVPEEIYRYARSLEELLLDANQLRELPEQFFQLVKLRKLGLSDNEIQRLPPEIANFMQLVELDVSRNEIPEIPESISFCKALQVADFSGNPLTRLPESFPELQNLTCLSVNDISLQSLPENIGKQKTTS

SEQ ID NO: 51297 - protein, 524 aa, Homo sapiens
MFHCIPLWRCNRHVESIDKRHCSLVYVPEEIYRYARSLEELLLDANQLRELPEQFFQLVKLRKLGLSDNEIQRLPPEIANFMQLVELDVSRNEIPEIPESISFCKALQVADFSGNPLTRLPESFPELQNLTCLSVNDISLQSLPENIGNLYNLASLELRENLLTYLPDSLTQLRRLEELDLGNNEIYNLPESIGALLHLKDLWLDGNQLSELPQEIGNLKNLLCLDVSENRLERLPEEISGLTSLTDLVISQNLLETIPDGIGKLKKLSILKVDQNRLTQLPEAVGECESLTELVLTENQLLTLPKSIGKLKKLSNLNADRNKLVSLPKEIGGCCSLTVFCVRDNRLTRIPAEVSQATELHVLDVAGNRLLHLPLSLTALKLKALWLSDNQSQPLLTFQTDTDYTTGEKILTCVLLPQLPSEPTCQENLPRCGALENLVNDVSDEAWNERAVNRVSAIRFVEDEKDEEDNETRTLLRRATPHPGELKHMKKTVENLRNDMNAAKGLDSNKNEVNHAIDRVTTSV

SEQ ID NO: 51298 - protein, 277 aa, Homo sapiens
MGNTIRALVAFIPADRCQNYVVRDLREMPLDKMVDLSGSQLRRFPLHVCSFRELVKLYLSDNHLNSLPPELGQLQNLQILALDFNNFKALPQVVCTLKQLCILYLGNNKLCDLPSELSLLQNLRTLWIEANCLTQLPDVVCELSLLKTLHAGSNALRLLPGQLRRLQELRTIWLSGNRLTDFPTVLLHMPFLEVIDVDWNSIRYFPSLAHLSSLKLVIYDHNPCRNAPKVAKGVRRVGRWAEETPEPDPRKARRYALVREESQELQAPVPLLPPTNS

SEQ ID NO: 51299 - protein, 1371 aa, Homo sapiens
MTEESSDVPRELIESIKDVIGRKIKISVKKKVKLEVKGDKVENKVLVLTSCRAFLVTARIPTKLELTFSYLEIHGVVCSKSAQMIVETEKCSISMKMASPEDVSEVLAHIGTCLRKIFPGLSPVRIMKKVSMEPSERLASLQALWDSQTVAEQGPCGGFSQMYACVCDWLGFSYREEVQWDVDTIYLTQDTRELNLQDFSHLDHRDLIPIIAALEYNQWFTKLSSKDLKLSTDVCEQILRVVSRSNRLEELVLENAGLRTDFAQKLASALAHNPNSGLHTINLAGNPLEDRGVSSLSIQFAKLPKGLKHLNLSKTSLSPKGVNSLSQSLSANPLTASTLVHLDLSGNVLRGDDLSHMYNFLAQPNAIVHLDLSNTECSLDMVCGALLRGCLQYLAVLNLSRTVFSHRKGKEVPPSFKQFFSSSLALMHINLSGTKLSPEPLKALLLGLACNHNLKGVSLDLSNCELRSGGAQVLEGCIAEIHNITSLDISDNGLESDLSTLIVWLSKNRSIQHLALGKNFNNMKSKNLTPVLDNLVQMIQDEESPLQSLSLADSKLKTEVTIIINALGSNTSLTKVDISGNGMGDMGAKMLAKALQINTKLRTVIWDKNNITAQGFQDIAVAMEKNYTLRFMPIPMYDASQALKTNPEKTEDALQKIENYLLRNHETRKYLQEQAYRLQQGIVTSTTQQMIDRICVKVQDHLNSLRNCGGDAIQEDLKSAERLMRDAKNSKTLLPNLYHVGGASWAGASGLLSSPIQETLESMAGEVTRVVDEQLKALLESMVDAAENLCPNVMKKAHIRQDLIHASTEKISIPRTFVKNVLLEQSGIDILNKISEVKLTVASFLSDRIVDEILDALSHCHHKLADHFSRRGKTLPQQESLEIELAEEKPVKRSIITVEELTEIERLEDLDTCMMTPKSKRKSIHSRMLRPVSRAFEMEFDLDKALEEVPIHIEDPPFPSLRQEKRSSGFISELPSEEGKKLEHFTKLRPKRNKKQQPTQAAVCAANIVSQDGEQNGLMGRVDEGVDEFFTKKVTKMDSKKWSTRGSESHELNEGGDEKKKRDSRKSSGFLNLIKSRSKSERPPTILMTEEPSSPKGAVRSPPVDCPRKDTKAAEHNGNSERIEEIKTPDSFEESQGEEIGKVERSDSKSSPQAGRRYGVQVMGSGLLAEMKAKQEKRAACAQKKLGNDAVSQDSSSPALSGVERSDGGGAVPKLHPGLPENRFGLGTPEKNTKAEPKAEAGSRSRSSSSTPTSPKPLLQSPKPSLAARPVIPQKPRTASRPDDIPDSPSSPKVALLPPVLKKVPSDKERDGQSSPQPSPRTFSQEVSRRSWGQQAQEYQEQKQRSSSKDGHQGSKSNDSGEEAEKEFIFV

SEQ ID NO: 51300 - protein, 176 aa, Homo sapiens
MYACVCDWLGFSYREEVQWDVDTIYLTQDTRELNLQDFSHLDHRDLIPIIAALEYNQWFTKLSSKDLKLSTDVCEQILRVVSRSNRLEELVLENAGLRTDFAQKLASALAHNPNSGLHTINLAGNPLEDRETTTKIKRQNVPTVLQTYLVVCPSDYQPCPLPLGKDNYYSDFSHDG
